United States Patent Application Publication US 2005/0208558 A1 - sequence listing, part 16

SEQ ID NO: 15292 - DNA, 7090 bp, DROSOPHILA
gccacaatctgctggcgcagtgttttactttccgtcgaggtctccgtcagttctgagtcgcgctgccggttcctgttcgccagttttctgtaatggtgggacagaggaatcgttggaaatcaattggaatcaatgtaaaggcgtagcgcaatcaatgccactgtttgccagaacctgaccctcttccgatggccataaagagggggtcactaaataggtgcactaccaaaaaaaaaaggtaaggtctggagttgaatagaaattttagaaagcgatagatagaactttagatacaaacagcagttggaacgcggaaaagcgaggatcagtacttttttgatttcaaaaaaggttatagaacgattttttagaaagatttgaaacataagccaacctatttcagcttaactctagatgaccttttgtagtttcttctcatagattcaaatagttatacaacgtaatgcagtgtaaaatttcttttgtactttagttagcgaacatatgtaattcaaatgaatagatttaattgtttactaaatctttgcgataaaagtggcaatgaatcatgctcagtgcatgagtggataggagtatctagcattaactacccatgccaggcacgtagccacacacatccgcacttggccagaagctcaagaacacacggcagtcaaagtcgccatgccatcgccatcgaatcgccacagccacagccgtatccatcgccgtccgtcagtccgtcattaaggctaaacaaagttcaaatacccgtcactgccgccgctgacgcagagctgagatggctgagatggccgagagagaaactgacatttcgttgttacctttttggccaaggcggttagcacgttcgcacacatctatcctactgggcctcacctttgaaagagcggatatgggcagcaagagcgggctattcaagagctggctcatgccgtgaaaacatggcccaaaccatggctcagacgtttgttacctgcccaagcgaacggacgccgcgatcgcttggttgcatcggttggtcagttcattttggtcgattcagttctgtcccctagggaaccaaccgtctcaatcgaaaaagtgtagcgaatatctgtgtttttgttattgtgcgtgattgctgaaaccaaatcaaaacaaattgagccctctaccaaccagtttgcacattaaaccaccaaccgagttgcaaaaggtgcgatagcaaatgagggacggcatagttccatcccagctaagccagaattaatacaatgtggaagaggaaaccaagaatatttgctcgagttaattctcagtagtccattgttatcgcatataaacagcagatttttacctgatttcgtgccaagtgttgttattttaaacaaataaaaacaaaactagtttggttaacagattataagtgtttacagtcaataggaataaaggaattaagaataaagcaatggatgtgttaaaactgtgaaacaacagaacattttagaaataaaaaatatttatacatctacttcatttttttctactctacattttttgctgtttagctatattagtctataaggatcaacaaactgaactatattggtaaattaattgaaaaaagcaaggtgaagagcccaaaaaaggtgtagctgctatgaaaatatatttgacaatttgtgcaagattataaaaaattaacaaatggacccaacaatagaaaccgaaaaagcagggcaatataagcccacaaaaaagtgtataaaaagcctaaaaggcaccgaacaaatgtatactgcaattttgggtcataattgataagggtttcacttgcaattatgagcccattaattttcttaattaggtttataacgcaaccctccataaatcaagttagtaagctaacaagcaagttgcgtgatctcataaatgttataaatgttagttaagaaatcattttataaacttccagataaacagaaaatacacataacaaaccaactaatatttaaataaatacgcttagacgcgttgaacaaagaaaatccagttagtgtgtgcacagaagatgaaagtattcaaacaaatgccaagaatatttaacaacataatgggataaatcataaacacactataaattgaacaagggaaccagatcagcgaatgcaaaaggtgaaacacctgaagcggcttaattgatttgtataaaggtgatcacattaaatccagtttctgtgtgttaacaacaagcttgcgaaaggtgccaattcgagtggagtaaatgggccggagaatccccagttagccagaatgaaacgctgacgtagatgaaaaaccagttgccaatgcaaccgccgggttagcagagcgatccaaaaacgggccgcaaatcacgcaattcgtaccgcccaagtgtggcacctttcgtgtccggcggcggcggcggtgtgttgatcgcttcgctggctgtttgtggctgccacatgtttcatcatcttgcggccggttacataagatgggcggctagccagcagttggaaaatagcagaagatttctgaccagcggtcggcagctgaggcgaaaagaagtcaagataaatgggtatttgggtcatggttaaccgcgcgcgaaccgtttactggttttcagtgttttgggtttttggccttttagttttcaattttttttctttttttttttttgcgctgcggtccggccaacatgataatcagttgccccaaagggttggctaattcgaattggacccgctttaaaactctccgccggtgcagcgatgaattgatttttaaacagcagcggacacaatggaaaagtcatccatcatcaggtttaatggtagcttccacccccgatttcttgaaaagagcagggggaagtctactctagctcgaatttaatttaatttaatgacttaaattcaagttatttgccatttcagtacgaaacgtcaagggttaattttcacgcaaacgattcgttataaatgaacctcaaaaatgccgaaacctattgattatacaaatcgattaataatggtccagcacaatacgatattatgatttgttgacactttcataaagctctttgaattctgatatatggtgtttagcatcctagaaatcctataaaatgtagctttctgaaactccattgtaattatttcttgattagatgtgtggataggtttacttatcaaacactttcgattttcagattcaccatgaggcgtcgcaaagtgctcatctgctgggctgctctgcaggcgggcagctccatcctcacctgcctgctcctcctactgaccaccggccagaatccgcagcaggtggcagccggaatagtgccgcctccgtggagtgatcccgcacagaatccgtgcgccagcatgtccggtggctggcagctgctgtactgggcacctctgaagaagtgcttcaagatcttcaccctcggctatccatgtccggccaccatggagctcagtcccaccgcagtgagtgccaagcgtaaggatgcacctgcagccgagtgccgctgccctccgggaactgcactcagtccgcttcacgataatgtgtgctacaagctatacgaacggggaccctgccaacccgaggagtacttccaacccgtgccggatcaggtcaagaggtgagttgagttcggttcttagctcaaactatttgaattaagcaactgccatgttcgcattttcacttcactgaaggtttacaggttgttctctagtcgtatgaaacttttgatttcgattgcgaaactcgggtttcaacattaatcaagagttaagagaaagttctggtgcacttaagcaataacggaagcattctactttgatatctcgtttttatgcataacgaaagttcatcaagaacctatgtatgtacattcacatacagtttttacttttacgacacaacctgtcgtgtttaaaacatgaaatgcagttttgtttcctagtgcatttgaatatttacttttcattacatttgttttacataatgctacacaatactaaaaagattaatgactaattatccgaaaacttcactgaacataatttgtaaaggacgacatcttcccggttatactgattcatttgcaccatcatggtttattttgatcttattcctattcttgctaaattacaatcatataaataatgagcataatggccacgtagagaaagaacttagaaaggagtgtttcgttctgcccatcccttatgccgtgatcagcagcaggattgagtggctcgtccatatccagataagatgatagggcaccatatggaaagaataaaccaaaaagcaagtacgaaaatagtcccaactcgagatcatttgcgtaatccgaccaaattccagttggacgcggcggtgttttatcccgcggatcctcctgccttttatcatttcgtgcgtacaccggtattactttgctcctatccacgcccgacttgcaaacgggacacactgtgtgatcgggtttcgtcaatatccattggtacagacatggccagcaaaacaaatggccacacatgctgaccacggcattctgggcggtgtctagacatatgttacactcgtagaacgattcatccttggtgtccattacgaaagtatcagccgacattgtttccgatgtgtgtgtttctagcgcaggtaattttgtttaagtctaatgtcttctcaaaataaaatgaagtaatcttaacagttcatgtgatatcaacaattatctatcagactttctcacttcaaggcgatcattgatataggatgatgtgtgccgtatatatcaattaaatgtttaaaagttaactaaactataggcaaatcctttccagaaccgcaaccggcaaccgttggggtacgtgcaagcgaccgctgcattgcccggaggacatgctcttctggccgagggacaacaagtgctatgcgaggcatgcaaagggtccatgcagccggggtaaactcctcgttcgcaacgaggagggactggccgagtgccgttgcgaggatgtgggcgacttggcctcgttctactatccggcagaggagtcttgctatgagcactacaccaaaggaccctgctcgacgccgggtcacatcttcttgcccggcggtcgatgcgactgccagcggcacttgccgcactatcatgctccgcatcaaatgtgctatgagctgggtaggattgggattacatagcccgttaatttgcaattaccgccttggaaatgttgaaattctatctcaacataattttctcctatatcgtatttaatgttctcctatttttcagacactcctggcccctgtccacctggtcacatctttcgcatacccgacgaggtccaggagacaacgggcagcaccctgcagcttttgcctcgtgcccagtgccagtgcaaggagggctatgtgccctggagcgatggcatctgctatcgcctgtacacaaggggtccctgtggacccaatgagttcctggtcaacggaaccagctgtgtgcgcaacttctgtggcaagaatcgcctgtacttcccagcggaagattcttgctacaggattggatctcaaggcccgtgtgccctacatcaggtggtgatcttcgacttcaccgccaggccatccatcgatggcatctcctacaatggaatgtgcggttgttccggtgtcctcaccaatctggatcagcagtgcacgggagatggagcggataaggaacagaatatatgcgagtccacgcccggaatggtggagatcaatgggcagtgccacaagctgtatagccgaggaccctgcggcgcgggtcagtggctagagccactgaaatcgcaaaccacgaatggcacctcaattttggtccacgccagtcgggccaagtgcgtctgccgaccgggttatacgccctcggagtcggatcaacgcggcatgagcaactgcagcgctccaagtgtcagcctggcgaggtatttaaccaacgagcgactcaactcgaagtttctcaatgatctgcaccttggtgggaccacctaaaatccccaatcttcaagctattttctgtccggttgtgatgacttttattcttctttcaccgcatgcccacctaatttaccctatattacctccattaccctttgtttttgtgtttgcatgctcagtgtttattgatcgatgcgatcatttgttattcaattaaccattttgttctcttttaggtggtttttagaaatattcggttaacgtgttcgataggatgagacagtgccattaatgtattacatcgactaatgtacgagttgtatttaaggaaaatcacgataagggaaataaaagaatttgaaagactaacaatatagagtctagaaatgaaatataacatatttttcattttagcagaaaaattgagttgtaaataggtcaattattctgaaactctttggtatcgggttctgaagcacaaactaaacaattctcacacttaccgcaattgatcctccaggtccttcacattctgctctagggcattccgtttttctttgcaatcctttagctcatactccagtttgtatacccgctcagttttggtatccaattgatgctagtgaagcaaataacaatattgttaatatctctagaaaatatattattaaatgaagttaccagaagcgtatccttctcgtgttctaacgatatataggtctgccgcagagctcctaagtccatgcggagttgggtaacctcgctgcgattggattcccgactggagtccaaggtgctggcccgaacatccgccgactgtcgttgacgctcggccaccaaaagtttactctgataatccgctatgatgcgctcgttttgatcgttgagcatgctgccaataaataaataacaaatttataaacgatatgaaagcttagcagcaattccattgttactaacgttatttgatcattttcggtctttagttggtcaatttcggtttgcatagatgccacacgctgcctcatttgcaacaagtcctccttaagcagca

SEQ ID NO: 15293 - DNA, 1938 bp, DROSOPHILA
cccaagcgaacggacgccgcgatcgcttggttgcatcggttggtcagttcattttggtcgattcagttctgtcccctagggaaccaaccgtctcaatcgaaaaagtgtagcgaatatctgtgtttttgttattgtgcgtgattgctgaaaccaaatcaaaacaaattgagccctctaccaaccagtttgcacattaaaccaccaaccgagttgcaaaagataaacagaaaatacacataacaaaccaactaatatttaaataaatacgcttagacgcgttgaacaaagaaaatccagttagtgtgtgcacagaagatgaaagtattcaaacaaatgccaagaatatttaacaacataatgggataaatcataaacacactataaattgaacaagggaaccagatcagcgaatgcaaaagattcaccatgaggcgtcgcaaagtgctcatctgctgggctgctctgcaggcgggcagctccatcctcacctgcctgctcctcctactgaccaccggccagaatccgcagcaggtggcagccggaatagtgccgcctccgtggagtgatcccgcacagaatccgtgcgccagcatgtccggtggctggcagctgctgtactgggcacctctgaagaagtgcttcaagatcttcaccctcggctatccatgtccggccaccatggagctcagtcccaccgcagtgagtgccaagcgtaaggatgcacctgcagccgagtgccgctgccctccgggaactgcactcagtccgcttcacgataatgtgtgctacaagctatacgaacggggaccctgccaacccgaggagtacttccaacccgtgccggatcaggtcaagagaaccgcaaccggcaaccgttggggtacgtgcaagcgaccgctgcattgcccggaggacatgctcttctggccgagggacaacaagtgctatgcgaggcatgcaaagggtccatgcagccggggtaaactcctcgttcgcaacgaggagggactggccgagtgccgttgcgaggatgtgggcgacttggcctcgttctactatccggcagaggagtcttgctatgagcactacaccaaaggaccctgctcgacgccgggtcacatcttcttgcccggcggtcgatgcgactgccagcggcacttgccgcactatcatgctccgcatcaaatgtgctatgagctggacactcctggcccctgtccacctggtcacatctttcgcatacccgacgaggtccaggagacaacgggcagcaccctgcagcttttgcctcgtgcccagtgccagtgcaaggagggctatgtgccctggagcgatggcatctgctatcgcctgtacacaaggggtccctgtggacccaatgagttcctggtcaacggaaccagctgtgtgcgcaacttctgtggcaagaatcgcctgtacttcccagcggaagattcttgctacaggattggatctcaaggcccgtgtgccctacatcaggtggtgatcttcgacttcaccgccaggccatccatcgatggcatctcctacaatggaatgtgcggttgttccggtgtcctcaccaatctggatcagcagtgcacgggagatggagcggataaggaacagaatatatgcgagtccacgcccggaatggtggagatcaatgggcagtgccacaagctgtatagccgaggaccctgcggcgcgggtcagtggctagagccactgaaatcgcaaaccacgaatggcacctcaattttggtccacgccagtcgggccaagtgcgtctgccgaccgggttatacgccctcggagtcggatcaacgcggcatgagcaactgcagcgctccaagtgtcagcctggcgaggtatttaaccaacgagcgactcaactcgaagtttctcaatgatctgcaccttggtgggaccacctaa

SEQ ID NO: 15294 - protein, 503 aa, DROSOPHILA
MRRRKVLICWAALQAGSSILTCLLLLLTTGQNPQQVAAGIVPPPWSDPAQNPCASMSGGWQLLYWAPLKKCFKIFTLGYPCPATMELSPTAVSAKRKDAPAAECRCPPGTALSPLHDNVCYKLYERGPCQPEEYFQPVPDQVKRTATGNRWGTCKRPLHCPEDMLFWPRDNKCYARHAKGPCSRGKLLVRNEEGLAECRCEDVGDLASFYYPAEESCYEHYTKGPCSTPGHIFLPGGRCDCQRHLPHYHAPHQMCYELDTPGPCPPGHIFRIPDEVQETTGSTLQLLPRAQCQCKEGYVPWSDGICYRLYTRGPCGPNEFLVNGTSCVRNFCGKNRLYFPAEDSCYRIGSQGPCALHQVVIFDFTARPSIDGISYNGMCGCSGVLTNLDQQCTGDGADKEQNICESTPGMVEINGQCHKLYSRGPCGAGQWLEPLKSQTTNGTSILVHASRAKCVCRPGYTPSESDQRGMSNCSAPSVSLARYLTNERLNSKFLNDLHLGGTT

SEQ ID NO: 15295 - DNA, 4910 bp, DROSOPHILA
cgacttcgagcgggcggccaaggtgctgtacgagttggcccaatgcgaaacggagtttgtggcgcgcaagaagtctatgctgtcgctggccaaattggccgccttcgcggcagccgaatccgatttaactgcccaagttgaaaagatcaacgcagatcttacgctggtcgaatatcaatcgcaactgggccatgacgtactggaaagctttggcttcgatccagcagaacagaaggtgctcaaggcagaggagattatcagcgtaagatttcacaaattaatatacttaattcacttataaatattaccgtcttattatcattagctttacatcgccgaggaaaatgaaactgccagcgaaacggaattccgtaaagctttggaacttctgagctacgtggaacagccgtacgacatgcggcacaagatctggtgtgcagctataaaacgcgataactggacggactacgatcccaacaatgcggtgcattacatgcagaagttgctcttttacaagatcatcgaaatctcgcagctgatgggcaacgattccgagaacgttttgccacccatggaagactttctggagagcgtggagctcggcgatttgccgcagcagaaaccgtttcagtatctgttgaaactgacctatgagtatgtggccgacatgttcaaacagccagacgacatggaactctaatcaagcacctcacatgtctttctattaaagtttacgttaagaatttaaaatgatggctggtgttcttggacggtggacagttgcctgccttgttgttgcgtcgctcaaacgcaggcattataaaatattataaactaagttgctttgtcacagccggtctctgccggcgaaagtatctgaagtgtggcgaacggagagtcggaagcccaccaagtgtgttcggggcaactctagagtcggcctgactggcagctgtgctgtttgcatttgtcgccggtgcgcatcagtttaactttgattatgacggacgaaacaacgccgcttaccgatgccgttcccagtggctccggatatgttgtcctgccgccgtatcagggaccggagcgtgtctttccgggtggtgtttctccgcgtgcgcgacgcaacaagatgcgacagttccagtgctgcatgggcatcacctttatgtgagtgtgaaacgaagagttggaactgcggcaaaagaacacctatccttagaaactattgctataggctctaaattgtagaattgattttgtgaaggttccccaaaatcccagccttaaacaactatgttcaccaggatacttttgcacccttaaaagaaacttaaacagtgaaaagcaaatttgccatccccctccattgggatatttaatacacaattaacccattgtgaacgtttagtcgcgattaaccgcagcatgctaaccacaaagtaatttcactttcccaaccgcagagcgattgtatttaccgccctgtgcctggcactggtgttcagtgattccctgggcggagcggatggaggtcccagcttttttttcgtcgtcaatggatcggatagcgaattggccccaaataggccactgccagacgaaccggctgcggaatgggcgctgcagcaggcggcactgggtcatcatgatggtgctcaggcagtcagtgctgggattaaggcactgggagatcgggaaatactggaggagggtctgcagccgaacgaggtgaatacgccgtccttccgacactatcgttccctgagcacaaatccagaggcaaggaagctggcacgtcgcggctatgtggagaaccaggccaccatagacattgccaagaggtttaactacaccaaacagccgggacgcagcaacattggttggggacccaagatagttctgccagatcctacggtactccgtttggaatgcgatttcaatgcgcgctacagaagatccaccggggtgtgtaacaataaacaacatcccaggacctacggagcatcgatggttccatatcgtcgcatggtgtcgccggactatgcggatggtattgctgctccgcgagttagtcatcatggacggttaccgccggctcgtcaggtctctctgaaaatccatcgttccagctacgaaacggactcgaattttacggtaatgctggccgtttttggtcagttcatggaccatgacatcacagccacatcgctgaccacttcgcaggagggtgagtccatcgattgttgtgtggctgccacccgcgagcagcatccggaatgctatccggttgatattctgcccgatgatccctactacaagcagtacaacatcagttgcatgaatttcgtgagatctgctccagcgccaacgggtagatttggtccacggatgcagctgaaccaggccacggcatttatcgatgcctccgtcgtgtacggcaatctggagcagcggcaaaatcagctgcgcagctttatcaacggatctcttcggatgtttgtcacggatgatggtcgccagctattgcccatttcctcgaatccggcagatggctgcaatcgtgtccagatgactcgactgggtaaatactgtttcgagtccggcgatgatcgggccaatgagaacctgttgctcacatctatgcatttgctgtgggctagacatcacaactatttggctcgacaattgcaggagcagaatccacattgggaggatgagcggctctaccaggaagcccgaaagattcttggtgctcagatggcacacatcacctacaatgagtttttgccagtgctgctggggaagaatatcagcgaggccaagggcttgctgcctgccaaacacaatctaaatgctccggatacgtatgacccggaggtggatccaagtattgccaattgctttgcagcagccgcatttcgatttgcacacactcttctaccgggattgtttaatatctcgagggataacagcactcccgaggccatcgaactgcacaagatgctcttcaatccattctcgctctgggcggagcatggcattgaccacgccctgatgacagcggccaatacgccggtgatgcaagtggatcgcttcttttcactggaagtcacgcaaaagcttttcgaaggcaccgcagaggatagggtgcctctttgtggactcgatttggtatccttaaacattcagaggggtcgggatcatggcataccctcgtatccagtcttccgtcgccattgccgcctgccgacggtggacacgtgggaggagatgtcacaggccattgacaacgctactctggactccatccggcagatttatgagtaagtaaagttctcgattatagtattgccttaaaggtaaacacttttggtttttagatctccgcaggatgtggacgtctatacgggtgcacttagtgagccgccactggatggagctatttttggtccgttgctcagctgcatggtttccgaccagttcctacgcctcaaactaggtgactcccattggtacgaacggaaaatgggcccacagaagttcaccaaaggtgagagtccttggaagtcctattttctcattaagaatcgtgtttatcctgattcataagctcaattggcggagatctacaagaccagtctggccgccatcatttgtcgcaactcagatggaatcacccgagtgagggagcatgttatgcagagactgcgcgatggaggtaatccccatgtggattgccaggacctggagggattccatttcaatttcgaaccctggtccgagaagcaacagccccaggatcttcatagtgccggcataagcaggggatccacttcggtgcgagtaatgtccaaggcaaatcatcaagcccacaacgtaaccctacatattgataaaggaatctagttagaaacaagattcaattttgattaggaaggatttaatattaaatattataaaaaacatatacttctaaaccggttccttctattttaaaatagagttgctatgctaaagttagttaactaaacagcagcccatcataaatcaacaataagtcaacgaattctaagattataaatcaacttttaagtattttgtatataataattgttagcttataacataagagctttgttttgcatttcaccattaatataaagctgtcatcaagactatcaatgtagctttgttcatttagaattcttcgctgtaaagaattaagagaacgttactgccaaagagaacaaataatcgacgaatttcagcgcatataagtggaggctctccagtttgatagtcagttatatattgactttcgcagagaaagggtggatttaaaaaaaagaaaaggtgcactacttcgactatgttttcgctgattttattggccgtaacgctattgactttggcgtggttctatctgaagcgccactatgagtactgggagcgacgcggatttccatttgaaaaacactccgggattccattcggttgcttggacagtgtgtggcggcaggagaagagcatgggcttggccatctacgatgtgtatgtgaagagtaaagagcgcgtcttgggcatttatttgctcttccgtccggctgttttgatcagagacgccgatctggctcgccgtgttctggcccaggatttcgccagtttccacgatcgcggcgtttacgttgatgaggaacgggatcccctgtcggccaatatcttctcgcttcgcggtcagagctggcgatcgatgaggcacatgttgtcgccatgtttcacatccggaaagttgaagagcatgttcagcacatccgaggatattggtgacaagatggtggcccatctgcaaaaggagctgccggaggagggcttcaaggaggtggacataaagaaagtgatgcaaaactatg

SEQ ID NO: 15296 - DNA, 2497 bp, DROSOPHILA
atgacggacgaaacaacgccgcttaccgatgccgttcccagtggctccggatatgttgtcctgccgccgtatcagggaccggagcgtgtctttccgggtggtgtttctccgcgtgcgcgacgcaacaagatgcgacagttccagtgctgcatgggcatcacctttatagcgattgtatttaccgccctgtgcctggcactggtgttcagtgattccctgggcggagcggatggaggtcccagcttttttttcgtcgtcaatggatcggatagcgaattggccccaaataggccactgccagacgaaccggctgcggaatgggcgctgcagcaggcggcactgggtcatcatgatggtgctcaggcagtcagtgctgggattaaggcactgggagatcgggaaatactggaggagggtctgcagccgaacgaggtgaatacgccgtccttccgacactatcgttccctgagcacaaatccagaggcaaggaagctggcacgtcgcggctatgtggagaaccaggccaccatagacattgccaagaggtttaactacaccaaacagccgggacgcagcaacattggttggggacccaagatagttctgccagatcctacggtactccgtttggaatgcgatttcaatgcgcgctacagaagatccaccggggtgtgtaacaataaacaacatcccaggacctacggagcatcgatggttccatatcgtcgcatggtgtcgccggactatgcggatggtattgctgctccgcgagttagtcatcatggacggttaccgccggctcgtcaggtctctctgaaaatccatcgttccagctacgaaacggactcgaattttacggtaatgctggccgtttttggtcagttcatggaccatgacatcacagccacatcgctgaccacttcgcaggagggtgagtccatcgattgttgtgtggctgccacccgcgagcagcatccggaatgctatccggttgatattctgcccgatgatccctactacaagcagtacaacatcagttgcatgaatttcgtgagatctgctccagcgccaacgggtagatttggtccacggatgcagctgaaccaggccacggcatttatcgatgcctccgtcgtgtacggcaatctggagcagcggcaaaatcagctgcgcagctttatcaacggatctcttcggatgtttgtcacggatgatggtcgccagctattgcccatttcctcgaatccggcagatggctgcaatcgtgtccagatgactcgactgggtaaatactgtttcgagtccggcgatgatcgggccaatgagaacctgttgctcacatctatgcatttgctgtgggctagacatcacaactatttggctcgacaattgcaggagcagaatccacattgggaggatgagcggctctaccaggaagcccgaaagattcttggtgctcagatggcacacatcacctacaatgagtttttgccagtgctgctggggaagaatatcagcgaggccaagggcttgctgcctgccaaacacaatctaaatgctccggatacgtatgacccggaggtggatccaagtattgccaattgctttgcagcagccgcatttcgatttgcacacactcttctaccgggattgtttaatatctcgagggataacagcactcccgaggccatcgaactgcacaagatgctcttcaatccattctcgctctgggcggagcatggcattgaccacgccctgatgacagcggccaatacgccggtgatgcaagtggatcgcttcttttcactggaagtcacgcaaaagcttttcgaaggcaccgcagaggatagggtgcctctttgtggactcgatttggtatccttaaacattcagaggggtcgggatcatggcataccctcgtatccagtcttccgtcgccattgccgcctgccgacggtggacacgtgggaggagatgtcacaggccattgacaacgctactctggactccatccggcagatttatgaatctccgcaggatgtggacgtctatacgggtgcacttagtgagccgccactggatggagctatttttggtccgttgctcagctgcatggtttccgaccagttcctacgcctcaaactaggtgactcccattggtacgaacggaaaatgggcccacagaagttcaccaaagctcaattggcggagatctacaagaccagtctggccgccatcatttgtcgcaactcagatggaatcacccgagtgagggagcatgttatgcagagactgcgcgatggaggtaatccccatgtggattgccaggacctggagggattccatttcaatttcgaaccctggtccgagaagcaacagccccaggatcttcatagtgccggcataagcaggggatccacttcggtgcgagtaatgtccaaggcaaatcatcaagcccacaacgtaaccctacatattgataaaggaatctagttag

SEQ ID NO: 15297 - protein, 830 aa, DROSOPHILA
MTDETTPLTDAVPSGSGYVVLPPYQGPERVFPGGVSPRARRNKMRQFQCCMGITFIAIVFTALCLALVFSDSLGGADGGPSFFFVVNGSDSELAPNRPLPDEPAAEWALQQAALGHHDGAQAVSAGIKALGDREILEEGLQPNEVNTPSFRHYRSLSTNPEARKLARRGYVENQATIDIAKRFNYTKQPGRSNIGWGPKIVLPDPTVLRLECDFNARYRRSTGVCNNKQHPRTYGASMVPYRRMVSPDYADGIAAPRVSHHGRLPPARQVSLKIHRSSYETDSNFTVMLAVFGQFMDHDITATSLTTSQEGESIDCCVAATREQHPECYPVDILPDDPYYKQYNISCMNFVRSAPAPTGRFGPRMQLNQATAFIDASVVYGNLEQRQNQLRSFINGSLRMFVTDDGRQLLPISSNPADGCNRVQMTRLGKYCFESGDDRANENLLLTSMHLLWARHHNYLARQLQEQNPHWEDERLYQEARKILGAQMAHITYNEFLPVLLGKNISEAKGLLPAKHNLNAPDTYDPEVDPSIANCFAAAAFRFAHTLLPGLFNISRDNSTPEAIELHKMLFNPFSLWAEHGIDHALMTAANTPVMQVDRFFSLEVTQKLFEGTAEDRVPLCGLDLVSLNIQRGRDHGIPSYPVFRRHCRLPTVDTWEEMSQAIDNATLDSIRQIYESPQDVDVYTGALSEPPLDGAIFGPLLSCMVSDQFLRLKLGDSHWYERKMGPQKFTKAQLAEIYKTSLAAIICRNSDGITRVREHVMQRLRDGGNPHVDCQDLEGFHFNFEPWSEKQQPQDLHSAGISRGSTSVRVMSKANHQAHNVTLHIDKGI

SEQ ID NO: 15298 - DNA, 5110 bp, DROSOPHILA
gaaatatatatatttttctagacaccaatgtactttgtcaggcaattcgatggcgctgcagctaaaactcatttgataagcaaaaactctgcaagtacataaatcaaagtattcctgtgatcagaattagctgatattacacatttgcatacgtagataccatacattaaggttttgcatttgggttctttaagtcggtgctatgttgcttgggagttagtatgtttaattccaggtataaaccaatagttgattattgttgttaattacaatttgtatatttccaaaacttcgttttctcgtttataaacaaacgcatcactaagtcgtgagttgtgtatggtggccggtaataattttttgtttgttttttttttaggtattctggtttttggattttccgtggcttgggcgtgattgctgcagcgttgaggagtcggcttgatgccaggataattaaaattaagctgctcaatcacgcccaggcttttggtcatatagtacaagtacatacaatattctattaatgataagtcatacaaaatgttgtagcaagaacacatattaaagaaagtttcaaaacatttcgcaagcaaaattcaaagacagcaaatcatctcttctagaacatttcatcgcgttgcttcggttgtctgcctgatttccttttattggcttctgttttgttatcgttgtcagttgtagtagttatcgtcctgatccgtcgattcaggcacttcgcttgctaacatcacaaatcagtttccagtcgttagtaacgatctcgtccatatcatcattcatcattcagcatagtttcgaactctctctccatctctaattatacagtaaatagacggtagtcatagtagtattagataatatgttatggatggcgggcgggcaggctgttgatcgattgcttcatctagtgatcaattgagtgattgagtgaattgagtgcttgactctcgtccagtcctcgtcccgatcctcgtctctagtgcagctcgatgaactcgtacagtgtggctggtacggttccctcgtagcgaatgtcatgcttcttgatcgtcctcgcggccaaacacgccagcgttgtgtacttcattgggtcgatgatcttatgcatgggcgtgggtgccagcagactctcaaacgtctcgccagcatagtttttggtgtccttttagaaggagagaatcacattagtaaggtcaacgggactgccctcgataccatactcaccaaatgcgctccgccctcgagcaggatgtgcgacaggggctccacatagggctgcatggtagccaaatggagtggcgtattgcccgcttcgtcgatggcatttgggtcagctcccacctccagcaaggccttcgccagcgtcaccgaggggaactggcatgagggatagcggccggccagcgtgccctcccgatagcaggcgtagtgcaaggcggtgcgatcgaaccttacgcgcaccttcaagcgattcagacggtacagcgcccccatcacctggcgacgcatctctgggctcagggcgtctgtgtctagcagggagctcagcagacagcctatgtgaatggcacttatcatggtgcgactcagggcattgggatcgtgattacaatcgtgctgatgcgccgaaagcagcgtcgttgaggaggaggaagatgcggatgaggaagccgaacaggatggcgatttgtcagctgctggcagctgtttctgcggatgctgctggtccttctgctgttccaacgtgaaagccagtccacgctcaacctctttgaccgccttgtagaatatcgtcagcatgctgtcgggctcgatcggcggaaccactcgacctctcggcagcaagcgacccgcctcaaccagcataaagctgaacagctccgcgaaggacagcagcgaggactgcgtcattgggctgagtggctgtagaatcttctgctgcatggtgagcgcataggaccacagttcgatgcagcggtcaaagcgaccagcgtccgcatagtgagcgcccctaaatcgataaaaaaaaaaggtgattagataacgcaattgagaaatgcacttatatatttaactcacctaaatcgaatgtagtagctggtgtccggatgggtgggtccgagaatgcgctgccgaatgaccagagcctgcattcgcatctcatcaggatccaaaaccatctcctccagctcctccacgctggttacctcgcgaaccatctcatatgccggcactggttcctgaacctttttctccagcggtggctccacggcacgctcctcgagcgctcgacgccacaggtttagtgccgctgccatgtcccgctttcggtccacatacgtggcacctagcagttccaaagcatgaatcctcgattccctgctcacacagggcaaagtgattaagtgctccacgatgggcatgtgaccggtgacactggccgccagcagcggagtcattccgtaatagtccacgtccatggtggcgccgtgcttgagcagcaactggaggatctgcaaggagcccgactcggcgcagtcgtgcagtgccgtgttgcccttaacgctgcagcggttcacatcggcgttcagggagagcagatactgggcgatgcggaagtgacccttgtagcaggcgatcatcaagcaggtgtggccgtgacggttcgccacctcaaagtctgtggaattagacaaacaattagcacgtatatcatcaagaggcaaaactaacaaaaccagttccagttattatttttataagacctttatatttaaatagaatatacacaaactagatttgtgtagtatgttatataacgaattaagattaaatgaagaagtaatagctggaagattggtgcaccttcttagtaagcagtaatacaaagtagttacctgctccatggtgtaccaggtacttgacgatctcgtagtgtccatcgaagcaggcagctcgcagcggtgtggaattcgtcctggtggtactgttcacattcgcccctcggcggacgagcatctttacgatgcccaggtggccagcggccgcagcgcaccacagcggtggggcatcctctattggttccccgtcgaaactgaccgatcccacctgctccacgttggcccgacattttgtcaataggtattctacaatgtcgtagtggccattgcggcaggagatgaccagcggggtggctccgttcactttcgccgatatcaggctgcccacttcgacggagcttttgttgtaaagggtggcctaaaaaatagtagagaaacggtgcatatttagtaagatatttcaaatataagtcaagttttttttttagcaatcattcgccattctgaactacgttataaacgcgattattactgacaatttataaaatatctagatttggattatattccataccaatccagctcatatcattagctattttccactctgatagttaccaaatcacacaaaaattccaattagataatatttgtttttaatcaatagaaaggcgataataattatgggtgctttcaaacaaattgatgacgaacaaagcgaatcgctgacagcgtgaaaaaactcagaccacctgggcaatggataccacaaatgggtgggtaagtcgtggagatatagccagaaatcagctggggaatatagtatagcaccagtcacagttgctgatgatttttattgtgtagcggccgcattgcgtcccatgccaatttgaaattgaaattcatttatgtcaaacgtgtttcgtttttgttttatagtatgctaattatgttgtttgccagcgcgtgcaaaatggatggatagaggtgggcagggggtgcggtgggtggtaggcggtgggatggaatggtcgccacattggctaaggcgaatatattaaagcactaaggaatcaacaacaaagttccaatcaattctatttataattattcaaatcatttccataatcctactcaggaaaactgggtaaaaaaaaagaaatataatataacatttaaaaaagtttgtaacccagcttattagggaagtaaaacgcatttgctgaaatccctggctgtagctcatcaatccgttgagacaatagtattttccacctatctgactcaattttagttttccttcatatgtctgtgtcacctaaaaatcaccccctaaatatcgcccacaaaataaaaaaaacacctcatcagtctgctcagaaccaaaaactaaataaaaacaaagcgaggtagccaagttaagagatgctggcaaaaaggaaaataggaggggatggggggaatggcatcgaaagaccttgtgaatgccgcacggctctttagctacagtacaacctagaaagttcgacgatgtcaacgattcgaagacaacaaaatagaaataacatcacgtatttattttaaaacgcatttgcatgaagcagctataaggctctaattttgctagtattgaaaaaccctttatgttttaatattataatagtaaacatttcatgtagtattgtctaaagatttattctctctgcattagaatactcttaccaacctttttcctaacaatttcggtcaacaggaaatcgcttcctactttttgcgaagagaaccgcgctcttggccaattcgccttgtgtcgatattgttggtatcgtcaccagacagcggaattctttgttttggcccccttaagacccccccgaaaatcccctccgcccgcccggcggcaatcaacgcctcgtgcgcgtgacaaggaaaaaatagcatttaaaccaataaaagaaccagagaaagcttgagaaaatacaaattaagaaacatttttggcacgactattaggcggaaaacgtatgtattttcaaaatacagattattgggaagcatttgcggcacaacaacatatgtgcaagtgtgcgccagcgaattgaacaatgcaaattacgcattaattttgcatttaattcggtgcgaaagcaaaagctaaagtatatttatttatgttacagcgtcgcgtcattgtcgattccatttaatttcatttcattggctactgaacttttcgctttcgcacc

SEQ ID NO: 15299 - DNA, 1989 bp, DROSOPHILA
atgagctacagccagggatttcagcaaatgcgttttacttccctaataagctgggccaccctttacaacaaaagctccgtcgaagtgggcagcctgatatcggcgaaagtgaacggagccaccccgctggtcatctcctgccgcaatggccactacgacattgtagaatacctattgacaaaatgtcgggccaacgtggagcaggtgggatcggtcagtttcgacggggaaccaatagaggatgccccaccgctgtggtgcgctgcggccgctggccacctgggcatcgtaaagatgctcgtccgccgaggggcgaatgtgaacagtaccaccaggacgaattccacaccgctgcgagctgcctgcttcgatggacactacgagatcgtcaagtacctggtacaccatggagcagactttgaggtggcgaaccgtcacggccacacctgcttgatgatcgcctgctacaagggtcacttccgcatcgcccagtatctgctctccctgaacgccgatgtgaaccgctgcagcgttaagggcaacacggcactgcacgactgcgccgagtcgggctccttgcagatcctccagttgctgctcaagcacggcgccaccatggacgtggactattacggaatgactccgctgctggcggccagtgtcaccggtcacatgcccatcgtggagcacttaatcactttgccctgtgtgagcagggaatcgaggattcatgctttggaactgctaggtgccacgtatgtggaccgaaagcgggacatggcagcggcactaaacctgtggcgtcgagcgctcgaggagcgtgccgtggagccaccgctggagaaaaaggttcaggaaccagtgccggcatatgagatggttcgcgaggtaaccagcgtggaggagctggaggagatggttttggatcctgatgagatgcgaatgcaggctctggtcattcggcagcgcattctcggacccacccatccggacaccagctactacattcgatttaggggcgctcactatgcggacgctggtcgctttgaccgctgcatcgaactgtggtcctatgcgctcaccatgcagcagaagattctacagccactcagcccaatgacgcagtcctcgctgctgtccttcgcggagctgttcagctttatgctggttgaggcgggtcgcttgctgccgagaggtcgagtggttccgccgatcgagcccgacagcatgctgacgatattctacaaggcggtcaaagaggttgagcgtggactggctttcacgttggaacagcagaaggaccagcagcatccgcagaaacagctgccagcagctgacaaatcgccatcctgttcggcttcctcatccgcatcttcctcctcctcaacgacgctgctttcggcgcatcagcacgattgtaatcacgatcccaatgccctgagtcgcaccatgataagtgccattcacataggctgtctgctgagctccctgctagacacagacgccctgagcccagagatgcgtcgccaggtgatgggggcgctgtaccgtctgaatcgcttgaaggtgcgcgtaaggttcgatcgcaccgccttgcactacgcctgctatcgggagggcacgctggccggccgctatccctcatgccagttcccctcggtgacgctggcgaaggccttgctggaggtgggagctgacccaaatgccatcgacgaagcgggcaatacgccactccatttggctaccatgcagccctatgtggagcccctgtcgcacatcctgctcgagggcggagcgcatttggacaccaaaaactatgctggcgagacgtttgagagtctgctggcacccacgcccatgcataagatcatcgacccaatgaagtacacaacgctggcgtgtttggccgcgaggacgatcaagaagcatgacattcgctacgagggaaccgtaccagccacactgtacgagttcatcgagctgcactag

SEQ ID NO: 15300 - protein, 662 aa, DROSOPHILA
MSYSQGFQQMRFTSLISWATLYNKSSVEVGSLISAKVNGATPLVISCRNGHYDIVEYLLTKCRANVEQVGSVSFDGEPIEDAPPLWCAAAAGHLGIVKMLVRRGANVNSTTRTNSTPLRAACFDGHYEIVKYLVHHGADFEVANRHGHTCLMIACYKGHFRIAQYLLSLNADVNRCSVKGNTALHDCAESGSLQILQLLLKHGATMDVDYYGMTPLLAASVTGHMPIVEHLITLPCVSRESRIHALELLGATYVDRKRDMAAALNLWRRALEERAVEPPLEKKVQEPVPAYEMVREVTSVEELEEMVLDPDEMRMQALVIRQRILGPTHPDTSYYIRFRGAHYADAGRFDRCIELWSYALTMQQKILQPLSPMTQSSLLSFAELFSFMLVEAGRLLPRGRVVPPIEPDSMLTIFYKAVKEVERGLAFTLEQQKDQQHPQKQLPAADKSPSCSASSSASSSSSTTLLSAHQHDCNHDPNALSRTMISAIHIGCLLSSLLDTDALSPEMRRQVMGALYRLNRLKVRVRFDRTALHYACYREGTLAGRYPSCQFPSVTLAKALLEVGADPNAIDEAGNTPLHLATMQPYVEPLSHILLEGGAHLDTKNYAGETFESLLAPTPMHKIIDPMKYTTLACLAARTIKKHDIRYEGTVPATLYEFIELH

SEQ ID NO: 15301 - DNA, 4834 bp, DROSOPHILA
agatccagtcctcgctggactacttcacgcagattgtgcacaaggtgtttgagcatagctcgcgactgatgacattcccgcctcgcttggcccagattttgcgcctgcccatctggcgggatttcgaggccaatgtggatgaggtgctgcgtgagggagctgccataatcgatcactgcatcagagtgcaggaggaccaaaggagaccgcacgatgaggcgctttaccatcgcctccaggcggcggatgtgccaggcgatatgatcaagcggatatttgtagacttggtcattgcagcaggtgacacggtgagcaatccaattgaattgcaaagcccattactaattgtagttacacctcatttagaccgcattcagcagtcagtgggctttgtttgccctttcaaaggagccgaggctccagcaacgactggccaaggagcgagctaccaatgattctcgcctgatgcacggcctgatcaaggagtccctgcgtctgtaccccgtagctcccttcattggccgatatctgccgcaggacgcgcaacttggcggtcactttatcgaaaaggatgtgagtgaaagaaatttctttgagtgcctcatcgctcatgtttgccttttttcagaccatggtgctgctctccttgtacacggcaggtcgcgatccatcacactttgagcagccggaacgtgtgctcccggagcgctggtgcattggagagacggagcaggtgcataagtcacacggcagtctgccttttgccatcggccagcggtcttgcattggtcgccgtgtggcactcaagcagctccactccctgctgggccgatgtgctgctcagtttgagatgagctgccttaacgagatgcccgttgacagcgtactccgcatggtcaccgtgcccgatcggactttgcgtttagcccttcggccgcgaaccgagtgatacagtcatacacgcataaacataatcatagaactaacactaatcgtaattgtaatcgtagtctctttagttttatataaatatataaatgtcacatatttagtaatctatctagttaaaaatttcaaactaggaaaacaatgcctgcagcatgatatagactaatagcacagtcgccagaataaatattcccaggagtggggcaccccacaccagttgtccaaagatcatcgaacaaccgatcgttgtgagagcgggtatagagcccaatggtcgtaggcaaactcgcggaggaaccagattttcacatatttcaacgtggccggagcttttgtcaaaccactgttccgtcatcggagcgtacaacagttgccgggccacttttccgaagtaatcgtcgcggacgtagaatccttgtaattgactaccatactggataaaaaatgttatcagggaaaaacaaagaggccattttaaagaaacttaccttattgttaatcttttccgaaacgaaatgcagcattcttaccaatgctctaacttcattggtttggatgggcagcgtggcgggatcgacagcggcatgcaggctagaagcattgagcgacatttggtgcgggttcagctttgaggtgtccaaagtgtcgctggcgtcgaaaaagctgaaattttgcacagcaggcgcagaaggcacagatggttcctctggcagagtttcatgcatagatagattcgcttgatcaacctgtttagatattcaaatatttaaattttatgttaaccaaaaacgaacagtaaactcacattaaacgttcgacagaatgcgtcgatgcattgacgcaaaacctccggaatgcgactgaactcgcgcagggtcacttcttcctgggtgcactcgccaaagatcttcttataaaagttcttaagaaatccttcagaccgctgtctctccgcaatttcatttcgtagcttggcgatgtctctgagcaccgagttgcgggccatactgattagcaacaagaaggtttccatttgcgtttgcatagtataactaaaaagtttggcggagcttatgttaacagcttgattccacggagtgcctggagaaacggatttgctaaacgaaacaggattattttaaaatgagaagttatttaactaaatagtctcaacccacttcattatgttgacttggcgctgtggcgagtcaaagccaaaagaattgcctgcatgtatagcctcaaaacgctgaagtttatctactaaatcatgttgagagaagattgtggccagacggtacagcataaatgcgttcctatacacagtgtagtccaaccgcccaaagtgtggcagtagctgcataaatatgtgagtgtacataataaggttgtcgataataaagccatcgaagcaggacgaaatgggcggcctgtaggaaagactaggtctgaaaagaaatgtattagtggtctttagtgtttcaatttatcaagtttaatcttacgttttattgttcagcgacgctatggtgtatctccatggctgaatgtaactgagccaaagctccagcaccaccatcaacgagctgtccagaggccaacgatcgatcaaaccaacaataaaggcgtagattcttgccttaaccatactcaacgataccttacgcagcgcgcacagcgaactgtggtcgtgctgagcgccatttgcaaaaaagtgcacctgcttgaccaaggtgcgtacgccgcgcacaaaatcgctgctgggcaaatgatgctccgactcgatgtcgtaacgcagccagatgtctacgaaaaagtggagtacactttcagatcgccatgcgtaagcccggttggagctggcacttgggctgttggactgtggtgatatgttcccgacgccaacgcttgcactgggaatgccaccgccgcccgacacgtttccaccattgcgataggagctgggaatcttaatgtagcgcggttgtctttggggctgtaatgcttgggctggcaatggctgtggcgccttaaccccgctgctaaagtgcaccggttctatgcgtgcatcgggaagcagcggcaggaagttgttaaggtactcggccaccagtttcaagtagaccgttttgctgcgcacattgtggatttgcatggctatgggattgatagagtgtagtggctgcagggcatatagcacaaagtgaatcacatagaagtcgaaggcgttgagcgagagcgtggacacctggtgcatcatcgtctccacattgatgagttctgcatagaaactaggattctgaccattctgcagcaggctaacgaatttcgcctgaaacgaagggaattagagtgagccataaatacccctatttaatccacttaccggcagcagattgatgtctagttcgaatttgtactggtcgacgagcagacggtggcaaacatgcatcaggggaccacagacgccgaagaactggtgcagcgtttggaattgcaccggattgttttcaagcgtcgtggtccgcaggccccagcccaacggattgccatctatcccgaagatggagtgcacaacgtgggggaagatctcctgcacttggcgcaaggagcaccgatcgaacaggatgctcagctcgtgcacgcgctcgaatagaggcaaactgagcaccgtcaacaggcggctctggaatggaaagatattagagcgcaatttgtattacctcgatgctcgcaacttacgcttaggttttctggcggcatggtctgcgacatggtgagttcgtgtgcgtcaaaattgtcttaaattacaaataaatatcactttaaatcataaaaactcttgccggcgtgctgtaaacaaaaacctttcgtcgtgttgccggacctgcgaaaaatggtatcattccatagggctgcgacatcggcaaagaatacgtgaagtttttataataattacattaaaattttagtgaaattcgatagcggtaattaatcaaattctgaataattaataaaatattatttcttgcattttaatttagaaacggattggttattcgttttgcagatggtacgggttgaggtgggaacagagtatttcggaataaaaaatttggtatattttgtcggccctacaacggtcacactagcaaccggcagcgtttgttttgctgcagatttttgtgtttattttcgtttttgtgcaatttaacaagatcaacatgaagcgaagaagtcaaactagagccgaacaagccgttccaccagctaaaactacaaaggagaatagtggatcgctcacagtgtcccagctcagctccgatgttatttggcaggtgggtgctccgctggacaaaatcgaagtgtaaattatagatctggataacctatttacagctggcatcgcagtactggacgccggacacgaaagcagatcacctgccgtacagtgccaagatcatcgaacgcatttacaatgaggagatcggtgatggcggtggccacagtgcacggaggataaacatgctggagttcagtcagtatctggagcagtacctgtggccacactaccaacgtgaaaccgccacccatgcccaccttatgtccatcgttataatggccaacgagaagttccgggagcgcgtcgaagtttggaccgtgtttgaaaagctcccggatcagtatccagccttctttcgccacgtgctagagagctgtttgccgagcaaaaaggcaaaggaggctagtagcacgctaagggagcggacagcgctgttgatgttcattaaccactgctttaacagcatggagatagagctgtgcagagaacaggccaaacgactagtctccttgtccatgtggcattgcctgcagcctcgtaagt

SEQ ID NO: 15302 - DNA, 2493 bp, DROSOPHILA
tccggcaacacgacgaaaggtttttgtttacagcacgccggcaagagtttttatgatttaaagtgatatttatttgtaatttaagacaattttgacgcacacgaactcaccatgtcgcagaccatgccgccagaaaacctaagcagccgcctgttgacggtgctcagtttgcctctattcgagcgcgtgcacgagctgagcatcctgttcgatcggtgctccttgcgccaagtgcaggagatcttcccccacgttgtgcactccatcttcgggatagatggcaatccgttgggctggggcctgcggaccacgacgcttgaaaacaatccggtgcaattccaaacgctgcaccagttcttcggcgtctgtggtcccctgatgcatgtttgccaccgtctgctcgtcgaccagtacaaattcgaactagacatcaatctgctgccggcgaaattcgttagcctgctgcagaatggtcagaatcctagtttctatgcagaactcatcaatgtggagacgatgatgcaccaggtgtccacgctctcgctcaacgccttcgacttctatgtgattcactttgtgctatatgccctgcagccactacactctatcaatcccatagccatgcaaatccacaatgtgcgcagcaaaacggtctacttgaaactggtggccgagtaccttaacaacttcctgccgctgcttcccgatgcacgcatagaaccggtgcactttagcagcggggttaaggcgccacagccattgccagcccaagcattacagccccaaagacaaccgcgctacattaagattcccagctcctatcgcaatggtggaaacgtgtcgggcggcggtggcattcccagtgcaagcgttggcgtcgggaacatatcaccacagtccaacagcccaagtgccagctccaaccgggcttacgcatggcgatctgaaagtgtactccactttttcgtagacatctggctgcgttacgacatcgagtcggagcatcatttgcccagcagcgattttgtgcgcggcgtacgcaccttggtcaagcaggtgcacttttttgcaaatggcgctcagcacgaccacagttcgctgtgcgcgctgcgtaaggtatcgttgagtatggttaaggcaagaatctacgcctttattgttggtttgatcgatcgttggcctctggacagctcgttgatggtggtgctggagctttggctcagttacattcagccatggagatacaccatagcgtcgctgaacaataaaacacctagtctttcctacaggccgcccatttcgtcctgcttcgatggctttattatcgacaaccttattatgtacactcacatatttatgcagctactgccacactttgggcggttggactacactgtgtataggaacgcatttatgctgtaccgtctggccacaatcttctctcaacatgatttagtagataaacttcagcgttttgaggctatacatgcaggcaattcttttggctttgactcgccacagcgccaagtcaacataatgaacaaatccgtttctccaggcactccgtggaatcaagctgttaacataagctccgccaaactttttagttatactatgcaaacgcaaatggaaaccttcttgttgctaatcagtatggcccgcaactcggtgctcagagacatcgccaagctacgaaatgaaattgcggagagacagcggtctgaaggatttcttaagaacttttataagaagatctttggcgagtgcacccaggaagaagtgaccctgcgcgagttcagtcgcattccggaggttttgcgtcaatgcatcgacgcattctgtcgaacgtttaatgttgatcaagcgaatctatctatgcatgaaactctgccagaggaaccatctgtgccttctgcgcctgctgtgcaaaatttcagctttttcgacgccagcgacactttggacacctcaaagctgaacccgcaccaaatgtcgctcaatgcttctagcctgcatgccgctgtcgatcccgccacgctgcccatccaaaccaatgaagttagagcattggtaagaatgctgcatttcgtttcggaaaagattaacaataagtatggtagtcaattacaaggattctacgtccgcgacgattacttcggaaaagtggcccggcaactgttgtacgctccgatgacggaacagtggtttgacaaaagctccggccacgttgaaatatgtgaaaatctggttcctccgcgagtttgcctacgaccattgggctctatacccgctctcacaacgatcggttgttcgatgatctttggacaactggtgtggggtgccccactcctgggaatatttattctggcgactgtgctattagtctatatcatgctgcaggcattgttttcctagtttgaaatttttaactagatagattactaaatatgtgacatttatatatttatataaaactaaagagactacgattac

SEQ ID NO: 15303 - protein, 767 aa, DROSOPHILA
MSQTMPPENLSSRLLTVLSLPLFERVHELSILFDRCSLRQVQEIFPHVVHSIFGIDGNPLGWGLRTTTLENNPVQFQTLHQFFGVCGPLMHVCHRLLVDQYKFELDINLLPAKFVSLLQNGQNPSFYAELINVETMMHQVSTLSLNAFDFYVIHFVLYALQPLHSINPIAMQIHNVRSKTVYLKLVAEYLNNFLPLLPDARIEPVHFSSGVKAPQPLPAQALQPQRQPRYIKIPSSYRNGGNVSGGGGIPSASVGVGNISPQSNSPSASSNRAYAWRSESVLHFFVDIWLRYDIESEHHLPSSDFVRGVRTLVKQVHFFANGAQHDHSSLCALRKVSLSMVKARIYAFIVGLIDRWPLDSSLMVVLELWLSYIQPWRYTIASLNNKTPSLSYRPPISSCFDGFIIDNLIMYTHIFMQLLPHFGRLDYTVYRNAFMLYRLATIFSQHDLVDKLQRFEAIHAGNSFGFDSPQRQVNIMNKSVSPGTPWNQAVNISSAKLFSYTMQTQMETFLLLISMARNSVLRDIAKLRNEIAERQRSEGFLKNFYKKIFGECTQEEVTLREFSRIPEVLRQCIDAFCRTFNVDQANLSMHETLPEEPSVPSAPAVQNFSFFDASDTLDTSKLNPHQMSLNASSLHAAVDPATLPIQTNEVRALVRMLHFVSEKINNKYGSQLQGFYVRDDYFGKVARQLLYAPMTEQWFDKSSGHVEICENLVPPRVCLRPLGSIPALTTIGCSMIFGQLVWGAPLLGIFILATVLLVYIMLQALFS

SEQ ID NO: 15304 - DNA, 2813 bp, DROSOPHILA
tccgcatggtttgacatgctaaggcggtgaccaaactgaccgatgtgcactccctttccgcgtgcgcgatgtgatggctcaaacgactcttcttcgtcatcaataagtattgggcccgccgaacgggccttctttcgctccagcaacagttggcgggcatcgatgcccgagtcgcgcacgctcttgttgatcagatcccgggcatcggctatcttggcccgtgtcttcgcggcaatcgtgtttctggcatcgaaggtgcgctttgccggcatatcagagtgagatcctcgtgcacccgatggcttgaaaaaaggcttgttcagcagctggcgcggcttggagaagttcgcattgctgcaatggaaaacgcattgagtgacattatattttttcggctgtcctgtaaatgtacttacaactttctgtcgaggggacgatagccgcgttgcccgcgcttccgctctataatctcgtccagactcaaatcgatgtccatggctcgcagtatacgcttttcacaccctttcctaagctatgtttgaagtaaaaacaaccagattcaaattatcctgactattcgagctacgttcgtaaaaaaaataggactggcgtttcactggtgacacttggggtcgccaactatcgcccggcattatcgatagcaactatcgcttattaacattttcgtgatgctggaaataaaatgtaaaatagaaacagcaatatactaacactaatacaaatatacaaataatactattaactatttgttcattcacaaaaacagtttttgcatgtcttaacattagtttgtagaagattgaaaattctcagaactgacaatggtagcttagaatacataatacgttttatccactgacattacgcgccactaattcacagtgtgccccttcgcacagccgagaacaatcgcgcttaggtgctagccgacgtctggtctggtcacactgctacctgcacaacaacaacaacaacaacacactgaaaaacagcaaaatagagccagccttagctaccaaatatttatattagaatttcagctaccccaactgcgagtgcgcgctttttactgcgattttttggctgcccctcacgcgcacgcacacgaacagtgattgcgcaattccagtggaacgagtggagtgtggtggtgtgcggtgtgtgtgtgtaaacaacaagcggacgacaaggaaacagaaaccgaaacagaaacaacgggaattgattgggacgagtggagcttttgatgggcaactcgcaaccgcgtaatgcaagcagaagcagaaggacatcccagtggccacaaggcgcagcggaactaggcgcctcagccagcgatcaccactaccaccaggaggagctgtatcaggagcagcagcagcagcaacaacagccgcaacaggagcaaccgagcagcaggagaatccagttccaggcccacaccaaccagccaacacagtcgcatcctccgggcgacgaggaacagcctgtacaatcacagcagacttagcagctgcttggagctcaggttatagtccttgtagatggcaatcctttggagcgccatcacactgcggatacgctggcgcggctcaatggtgagcagcttgcgcagcacatccctgccctcgtgggtgaggtgctgcacctcctccggcaggaagtcctcgctgtcgccgtcactgtcctgcaggcagccgttgatctgagcaatggatggggcattggacaggccgtcctccggctccacgctctcacgccgtcgcagtaggtggcgtttgatgttgggcgactgcaattaggattatacaataagaagcattaatagtgaatccttttcactagagcatacttttcagcgtccctcgaaattagccgcgccgcaaaccctcatgcaaaatacctctgcgccaagttatacaggtatataaacaaatagaacccatgtgtcagagtatctgatttctgatttcaaaccatcaagtctgcaagaaatcatcggtagtcaccaaagcgatgagccatactcctctgtgtatcttcttcgcctgtctgtcagctattccaaaaaataataattagcgtccggtgccaacacgatcaatcgaacaatgccaatggtgacgccctgaatcatatctaaataaccaaacaatttgccacagatacatgaacacgcaaatacgcaaatcacaaacgtcagcttatggacagagtcaactaaccacatggctctggggtattttttttttttttttgccatggaactcaataaactggagtaaacataaacataaactgtgggcctaattatttgtgttacaaattcttctaggaaatcaagtatttgtttgaaatagctacaaaaacaccatctattcacaggtattcacaagtgctaagctacccgattacaagcatgtaatcgatctataattgtgaagtctgatatgagctaaatgttattttgtgtaaatttgttaagtttctaacttattacatatgtttcatttcagaaattacaaatagactacatacagtgggataagcctacaaacacaaccagaagtcgtaaggactaaggaaaagatcggggtcaccactaagtaccatgttccaattacagaaccaatatacctgaaatcagactactataatatttatattttctacataaccatcattataaaatggataatgaatattctggaactttgaaactaatttcagcatcacttctaagtctctatttcagtcaatctctgcaatgagcttgcaaaagatgctgcaat

SEQ ID NO: 15305 - DNA, 2028 bp, DROSOPHILA
cactgaaaaacagcaaaatagagccagccttagctaccaaatatttatattagaatttcagctaccccaactgcgagtgcgcgctttttactgcgattttttggctgcccctcacgcgcacgcacacgaacagtgattgcgcaattccagtggaacgagtggagtgtggtggtgtgcggtgtgtgtgtgtaaacaacaagcggacgacaaggaaacagaaaccgaaacagaaacaacgggaattgattgggacgagtggagcttttgatgggcaactcgcaaccgcgtaatgcaagcagaagcagaaggacatcccagtggccacaaggcgcagcggaactaggcgcctcagccagcgatcaccactaccaccaggaggagctgtatcaggagcagcagcagcagcaacaacagccgcaacaggagcaaccgagcagcaggagaatccagttccaggcccacaccaaccagccaacacagtcgcatcctccgggcgacgaggaacagcctgtacaatcacagcagcaacagctttccacctggagtcttggcagccttagcggaggacgactcaactggagcttctccggtgcccgcaactcatttcgtcatcgaaacaaggccacgcgaaagagcttgacctcacttcatggctctcgtcgtggcaagactcagtggcaccgacctctgaccaactcaatcttcaactcgcactttaaggagaccagcaagaacgatctgtaccgtatcgatcatttggtggccaagggagcctttggcgtggtcttcaaggtgtccagcaagagtgacattagtcagtgctacgccctgaaagtgctaaagaaatcaaagctcatcgaagacaacagtgtacggcagataaaggacgaggcggacattcagaaggtttgcggccatcatccgtttatcgtgaagcaaatagatctgtggcaaaaccgccacaacctccatattctatcggagtacgtacccaacggcgagttgttctcaaaaataactcacttctccattgatctggttcgtttatacattggcgagatagcacttgccttggattttctccacaacgctgggattatatatcgtgatgcgaagccggagaacatcctgctaactgaacagtttcacataaagctaaccgacttcggccttagcaagtggctcaaactgggggcaaacacgcgcaccatgtgtggcactttcaaatacatggccccggagattctgtgcggggaaccctatggccatgcggtggactggtgggccttgggcgttattgcctgtcagatgctgacgcagaagtcgcccaacatcaaacgccacctactgcgacggcgtgagagcgtggagccggaggacggcctgtccaatgccccatccattgctcagatcaacggctgcctgcaggacagtgacggcgacagcgaggacttcctgccggaggaggtgcagcacctcacccacgagggcagggatgtgctgcgcaagctgctcaccattgagccgcgccagcgtatccgcagtgtgatggcgctccaaaggattgccatctacaaggactataacctgagctccaagcagctgctaagtctctcgcctcgggagattatagccagggatggaatccgtatctacgaggacaggcatttcgaccagctgaccaatcagtgtgccatcgatgctttcctggacttctagcgcccgagctggaggagccttacaaacaacatcacatcgacttgatgttcagccatatttttttccacttgttttggtattatttaaactgcaacgttccattcaactaacaatttgtacaaaagtcttatactctcgactcgattaacaaatgcctttaaaatgaagaaatagtgtttgcattctttacaatcgaacaaatagcaaattgtttaaatattattaataaattatattccatattatatatgctatattgagcaaaaaaaaaattcaaatgtattcaaaaagcttgcagtgataaatttt

SEQ ID NO: 15306 - protein, 483 aa, DROSOPHILA
MGNSQPRNASRSRRTSQWPQGAAELGASASDHHYHQEELYQEQQQQQQQPQQEQPSSRRIQFQAHTNQPTQSHPPGDEEQPVQSQQQQLSTWSLGSLSGGRLNWSFSGARNSFRHRNKATRKSLTSLHGSRRGKTQWHRPLTNSIFNSHFKETSKNDLYRIDHLVAKGAFGVVFKVSSKSDISQCYALKVLKKSKLIEDNSVRQIKDEADIQKVCGHHPFIVKQIDLWQNRHNLHILSEYVPNGELFSKITHFSIDLVRLYIGEIALALDFLHNAGIIYRDAKPENILLTEQFHIKLTDFGLSKWLKLGANTRTMCGTFKYMAPEILCGEPYGHAVDWWALGVIACQMLTQKSPNIKRHLLRRRESVEPEDGLSNAPSIAQINGCLQDSDGDSEDFLPEEVQHLTHEGRDVLRKLLTIEPRQRIRSVMALQRIAIYKDYNLSSKQLLSLSPREIIARDGIRIYEDRHFDQLTNQCAIDAFLDF

SEQ ID NO: 15307 - DNA, 3651 bp, DROSOPHILA
ctggacgccggacacgaaagcagatcacctgccgtacagtgccaagatcatcgaacgcatttacaatgaggagatcggtgatggcggtggccacagtgcacggaggataaacatgctggagttcagtcagtatctggagcagtacctgtggccacactaccaacgtgaaaccgccacccatgcccaccttatgtccatcgttataatggccaacgagaagttccgggagcgcgtcgaagtttggaccgtgtttgaaaagctcccggatcagtatccagccttctttcgccacgtgctagagagctgtttgccgagcaaaaaggcaaaggaggctagtagcacgctaagggagcggacagcgctgttgatgttcattaaccactgctttaacagcatggagatagagctgtgcagagaacaggccaaacgactagtctccttgtccatgtggcattgcctgcagcctcgtaagttcttcttcgcaactcttcacatctatcaaagtgatcaaaaatgtatttgcttgcaggccgtcgcgaacaagagcttcgagaagttcctgagtggcgaaagtactggaaacgcttgctcaagaaggagaaagacagcaaaccggaggtcctctgggagagacactttatgcagaaccttatcattgacttcctgcacatactcgaaagcattcccgccgaaggcgaggtgccgcgcaacgtggttcactactgtgagcgcttcctagagtttattatcgacttggaggcacttttgccgactcgacgcttcttcaacacggttttagacgactgtcatctgattgtgcgggctcttctgtcacccttggttcgtcgcgaggagggaaaactgtttggtcaggtaggtgtcagacttctcatttaataactatctcgtacagcataaattagttaaaattaagtacaaatctcaatgttggacattgctaaactacgaaaacacttatattagtgtggacggtggctcctcagtaatcgttgccgttcatataatgcagctcatcgccccagtcgtttgccgacggtggctcattgtagcagcaggtctttttcagcagaaatgtcacatgtcgctggcgcagcacgcatatgtatagcaacagcggcgtctgcagggcgttaactacgatgtgggcgtaaagcaggccttccatctgcaaccaggacattatgaggaatagccaggctatagacattactaacagcatcagcgagaacatgataaaactgcaaggaagataatgttttcatatacttatatgtaatgcctagatgccgatctacttacttggctttcaatttgtgcgcaatgcggccgtataccgtcctgcggttaatcaacttcctggtggtcacatagaagaatatgtttaccaaaatggtacaagcaattggagcaaagaatatgcatatgcctagccagccgatcgtctcttgctcgcccaccatgtgctcctgtttgtaggattcggcgtcgaggaagaaatgtgcgaagacagccagtgcagccatcgttgctgtgcatccccaagcatacgcagaataatagcagtacttcctgccgtccgtgactcgcaggaagacgttcctcgaacgaaaggtcttccaaatgtaaaaaccgaaactgttcagccagaagaaagctgccaagaggctgaagcacaggataatgtccgccacaatgaagctcacatggctggtcagctcggtgaaaattctgacaaggtctgctgcctggcttaccataaggcacatggctatcgttgtcacaatgttaccaaccagatctctgctgaatggattgaaaattaacgcatgaagcaagtcaaattcaaactattgctcacctgagagtaggaagtataaaatagatgatggcgatgaccagcaggataacaagcgagatgccatggaaaattgggtttaagattttgcggagcagaaagtttgagtcactccacttgatctccttgcgggccaagcaaatgttggcgaatagcacattttcctctccagtactggaagtggcctgcgaatggattttatgatcatccatgcaatttatgtggactttagctactcttaccttgtcaatgcaatacaatcccttatcgtagtcatggtatagcggttccagactgccggcaatatcctcctcataatccgattgtattccatgacgctcctctgcttcgttttcggcattggtgtaatgccttagcctcccatcatccagtaacactagcttatcagagctctagaaaatataaaaatatctataagtatctaaaagtttctatgcaaagaacttcaaactcacgccagcatagtggtatattggccacatctgcatggatccacaatttggaatcccgatgacgaatttgaacttaacgggcctgttttgctctcctccatagctggtgaacatcggctggaagtagtctgcaaatggaaacggacgataaatagagaacacagaccgtggaaaatcataaaggcagttcaagttaacgctgcttttgttgcggctggtggatcagaggggagccagattttcttttctctctgcgaatataaatatttacgcttctgggcaaagaacttgagctgttccatgcgccttcatcagctggttttgcaatttgtgcagattggttcttcttcaattatcggagttcggatacatttttttccactcagccattcatatgttaatcatagctaagcacacggaaattagattgcatgttgcgattatgtgccctgttgtattgtagtattgggattactcaaatgactacaattaaaatcggatgagatcagtacaatgcaatgattcaactatcagtaatagttacatttttatgtgtcacctatatggccgatccatggtcataaatgttttatccagttttagttgtccgagctagaatatcgatatagatgctagagtacgcttttctatttcccacaattgttgcgattgtttgtcaaacattcacccaaggcaatatatcactatattcaccattagctccacaaacattaattaccagggctcgcatttatggggaacagaagcatcttatattaccttactaatggattttttgcctcattttacttccaagagataatattcccgatttgggaatccctcatcaagtggctactttatagtttaaacagaaacatgccccacagcataaatcatatttctcatcaggattggggccaccctctgtttgttttaagaactttcttgggggagtgcgaactgtggagttggggatatttagctgttggcttcgttccactgatccactgatagccaacaaatgggccatttaatgttgggcatacatatgttgcatgccagaagggaaaatccataaagttgaatggccaaccaacttcgttgtggttgttatggcaactttttcgagcgactaggagttttccgcctggccagctgttgaacttacccgtttcattgacctgctgacactcatggtccacgtgtatctcgaacttctcgcaacatttgttgaccagcactaggttgggatcggaagatagggctgttgatgatccggcgctagtgacatgactggtt

SEQ ID NO: 15308 - DNA, 1272 bp, DROSOPHILA
atggaacagctcaagttctttgcccagaagcactacttccagccgatgttcaccagctatggaggagagcaaaacaggcccgttaagttcaaattcgtcatcgggattccaaattgtggatccatgcagatgtggccaatataccactatgctggcagctctgataagctagtgttactggatgatgggaggctaaggcattacaccaatgccgaaaacgaagcagaggagcgtcatggaatacaatcggattatgaggaggatattgccggcagtctggaaccgctataccatgactacgataagggattgtattgcattgacaaggccacttccagtactggagaggaaaatgtgctattcgccaacatttgcttggcccgcaaggagatcaagtggagtgactcaaactttctgctccgcaaaatcttaaacccaattttccatggcatctcgcttgttatcctgctggtcatcgccatcatctattttatacttcctactctcagcagagatctggttggtaacattgtgacaacgatagccatgtgccttatggtaagccaggcagcagaccttgtcagaattttcaccgagctgaccagccatgtgagcttcattgtggcggacattatcctgtgcttcagcctcttggcagctttcttctggctgaacagtttcggtttttacatttggaagacctttcgttcgaggaacgtcttcctgcgagtcacggacggcaggaagtactgctattattctgcgtatgcttggggatgcacagcaacgatggctgcactggctgtcttcgcacatttcttcctcgacgccgaatcctacaaacaggagcacatggtgggcgagcaagagacgatcggctggctaggcatatgcatattctttgctccaattgcttgtaccattttggtaaacatattcttctatgtgaccaccaggaagttgattaaccgcaggacggtatacggccgcattgcgcacaaattgaaagccaattttatcatgttctcgctgatgctgttagtaatgtctatagcctggctattcctcataatgtcctggttgcagatggaaggcctgctttacgcccacatcgtagttaacgccctgcagacgccgctgttgctatacatatgcgtgctgcgccagcgacatgtgacatttctgctgaaaaagacctgctgctacaatgagccaccgtcggcaaacgactggggcgatgagctgcattatatgaacggcaacgattactga

SEQ ID NO: 15309 - protein, 423 aa, DROSOPHILA
MEQLKFFAQKHYFQPMFTSYGGEQNRPVKFKFVIGIPNCGSMQMWPIYHYAGSSDKLVLLDDGRLRHYTNAENEAEERHGIQSDYEEDIAGSLEPLYHDYDKGLYCIDKATSSTGEENVLFANICLARKEIKWSDSNFLLRKILNPIFHGISLVILLVIAIIYFILPTLSRDLVGNIVTTIAMCLMVSQAADLVRIFTELTSHVSFIVADIILCFSLLAAFFWLNSFGFYIWKTFRSRNVFLRVTDGRKYCYYSAYAWGCTATMAALAVFAHFFLDAESYKQEHMVGEQETIGWLGICIFFAPIACTILVNIFFYVTTRKLINRRTVYGRIAHKLKANFIMFSLMLLVMSIAWLFLIMSWLQMEGLLYAHIVVNALQTPLLLYICVLRQRHVTFLLKKTCCYNEPPSANDWGDELHYMNGNDY

SEQ ID NO: 15310 - DNA, 5882 bp, DROSOPHILA
atgtgatacatcaactagtccccctgagggcagcagtgggaacaatcgtgatgacacccacccagttcaacgaggtgcacttctctccactgggaacgtgcttctatttcagcgagaataatgtccccaatgatccactgactatggcacttctagagcgcgaaaagctgaatgcaactaaaacgatttcagtatgatttataatcatgaacgtttagtaaggtaacttttattttagtgcatttactcatagaccatcgtattcgtgagcacccgagattccaagggcttcaatatctccggctacatcgatttggagcacagtttgcgtagatacaagaccgctggatcgaagtctcatccgtgggcagatattttcgccggtcgccgccgcctggagcccaatcatcaggatctaagcttcatcaattggagcaacggcagggtgcattccaacgactcggataactacaaggttattccggatgccgtcaagggtttgtgcttcgcgcacaagggcgatggttcgatgctcagcatagagaagtatataaccgaagagcatccgttgtgcaaatttatagaatcgccaaaacacggctacactgtcgtctacgatcattatatacggcgaaagatgtgattgctgccagatcacattataatcgaaacataaattcagaatgcacttcaaccgatcatcaaagagcttttactggcaatcaaagcattttagaaatcaaaacaatatcgtgatcatgaaactggcagccagggagaggataaacaatcgccagactgactgatgccgccgacgtcatggacaagcgtcgcagggaaaatgcgcgagagcaagttgcgtatacgacgtgtggtactcggactctccgccgtgaactggagagagcttcccatcggctgagatgacattcttggccgtgccagtgagttccggcagtcagtaggcgtgcgaagcgctccaagactgggtgcttccgttgcgtgaaaataaattgtgaagaagaaagacggcactttgtatctgctcgttttgaattttttttttctgtggcagtctgtgtgcgtctgtagatatagatttgtacatatgcagttgggaagtgaacacgaaatggctgctgcatttagaaaattcaattagtttcgagtgtgttgaggtaaacgaaaaaatgcgcctttgtccagttgtcatctatgcatttataatcatcatcgggtttctggaggggattatagcccttggtggcgacgatcgcaatgaaatcacagtgggtaggtccctccattaattacttagtgatagcaatagctcaacgttttgccctcgaaggtgccattttctacgagaacgagaaggagatcgagctcagcttcgatcaggcctttcgcgaggtcaacaatatgaagttctcggagctgcgattcgtgaccatcaaacgctatatgcccaccaacgacagtttccttttgcagcagattagtaagtaaatacgctcggatgcggcagaaccaagttacgagaaattcatcttccgtgtgtagcatgtgaactgatttccaatggcgttgcggctattttcggaccaagttcaaaggcagccagtggtaagaaaagcacacacacacacacacactgtgtgtggacatggcccaaaacatatgttcgcgatgtgacggttcccccctttcgtggcagatattgttgcgcaaatcgcgaacgcgaccggcattccacacattgagtacgatttgaagctggaggccacgcgtcaggagcagctcaaccaccagatgtccatcaatgtggcaccctccttgtcagtactctcgcgtgcctacttcgagatcatcaaatccaactatgagtggcgcaccttcactctgatctatgagactccggagggtaagtagtgcctggataccccgtagagatatggactacatttgaagtccttaggcctggcgcgcctgcaggatctgatgaacatccaagcgctgaacagtgactatgtcaagctgcgaaatttggcagactatgcggatgactatcggatattgtggaaggagacagacgagactttccacgagcagcgcatcattttggactgtgagccgaagacccttaaggagctgcttaaagtatccatagactttaagttgcagggcccgtttagggtaattcttcatttatgaaagcgagaaagtacttactaagtcgctttatctttagaactggtttctcacccatctggatacgcataactcgggtctgagggatatttataatgaggacttcaaggccaacattacgtcggtgcgattgaaagtggtcgacgcgaatccattcgagagaaagaagacccggctcaccaaagtggatgtaagtggaggcccaactgactgtaaccttggatctaatctagcgtacttcgcagcaaatattggggaaccaaaccatgttgcccattctcatctacgacgctgtcgtcctgtttgccagttctgcccgaaatgttattgctgccatgcagccctttcatccacccaatcgccattgcggcagttcgtctccttggatgctgggagcatttatagtcaacgagatgaagaccatttccgaggatgatgtggaaccgcactttaagaccgaaaatatgaagcttgacgagtatgggcagcgcatccacttcaacctggagatctacaagccaacggtgaacgaaccaatgatggtctggacaccagacaatgggataaagaagcgtctcctcaacttggaactggaaagtgccggcaccacccaggatttctcggagcagcgtaaagtgtatacagtggttacccactacgaggagccctacttcatgatgaagttggttttgaagcagtaatctggtttttagcagactacaacctttccttatttcctttagggaggatcacgagaacttcagaggcagggaaaagtacgagggctatgccgtggatctcattagcaagctttccgagctcatggagttcgattacgagttcatgatcgttaatggcaatggcaaatacaatccggagacgaagcaatgggatggcattatacggaaactgatagaccacgtaggtttcaccagaagtatagtagtaactccacttgatatttgtatcttttatacacagcatgcccaaatcggcgtctgcgatctgaccatcacccaaatgcgacgttctgtggtggacttcacggtgcccttcatgcagttgggcattagcattctgcactacaagagtcctccggagccgaagaatcagtttgccttcttggaaccgtttgccgtcgaagtctggatctatatgatctttgcccagttgataatgactttggcttttgttttcatagccaggtgggattaggttaacgctcttgagtgaagcttaatttacttttcttacagactttcgtatcgcgaatggttgccacctaatcccgccattcaggatccagatgagctggaaaatatctggaatgtgaacaactcgacttggctgatggtgggctccatcatgcaacagggctgcgacattctgcctaggtctcagattatatattacacagtatcaatgggtatcgaaatgtaaactttcttcactcacagaggtccacacatgcgcatactcactggcatgtggtggttcttcgccctgatgatgctcagtacctacacggccaacttggccgccttcctgaccagcaacaagtggcagagcagcataaagagcctccaggacctcatcgaacaggataaggtgcacttcggcagcatgcgcggtggcagcacctcgttgttcttttcggagtcgaatgacacggattaccagcgtgcgtggaaccagatgaaggacttcaatccctcggccttcaccagcaccaacaaagagggagtggcacgtgtgcgcaaggagaagggcggctatgcctttctgatggagaccaccagtttgacctacaatatcgaacggaactgcgatctcacccagattggcgagcagatcggggagaagcactacggcctggccgtgccactgggtgagtagctgtgccgccagtggagggagttgggatattactttcttccatttcaaccaggctctgattaccggaccaacctcagcgtgtccattctccagctgagcgaaaggggcgagctgcagaagatgaagaacaagtggtggaagaaccacaatgtcacctgtgactcctaccacgaggtggatggtgacgagctgtccattattgagctgggcggcgtgtttcttgttctggccggtggcgttctcatcggcgttatcctgggcatctttgagttcctgtggaacgtgcagaacgtggcggtggaggagcgagtgactccgtggcaggctttcaaggcggagctcatctttgccctgaagttttgggtgcgcaaaaagccgatgcgcatctccagcagcagcgacaagtcgtcgtccaggcgatcatccggttccagacgcagctccaaggaaaagtcccgcagcaagacggttagctaggtggtcggaatattggacgattggcgtcttctactttggcatttcattagagagtcgcattggaaatgaggcactccatggtgtccacattgtatattgtgagctatatttgtagaattattttagaacacagatagcgcatttgggtatattgaatgttctgaagatttaacgaaactttcaatgaaataatttggataactaattttagtaaacttttctgttggctctaatgttttaatagttgacaataattgattttccttacaaagatttaataaataaacattaaaatataatatgtgtgtttatatacaatatatagtcagttagttgtgaaattatattctatacatttcttttgaaagctgcctaattttagaccacatttagttttcattcactggtccatttccagctaatgctcgtgtctgcatggtctagattaaagagtatagagtatagacgctagactctaaagtctagacatgtggtgattgctcttctcgccgagcatggaatccatccacaatggctgctgttctccatgacgtagtaagtctcgcagagatcgctcgtggcggaggtttaaaaaatatacacattttttgtgattgtcagtgctcgtggagcgttgcccggatctggccgatttctggctgggaattatttcgctgcgcgttaaaaaatatatactttttagtgcgttaatagtggatctattgttctggtgctctttttaaagttgtagtaatgcacggtctacagttcctggttcttctggcactagcaattgccagcggcgccaatgaagacaccttagtgatcaaaatcggttggttgataacttaagtgtatgttcaaaatgtacaaactgatttcgtttaggagccattttcttcgacacggaaatgaagttggccgatgcctttagtgcggcactcgaggaagtgaatgcaataaatcccgctctcaaactggatgcaatcaagcgctatgtgaccgtcgacgacagcattgttctgcaggatatttgtgagtactgacggaagtacggaagtggtgcacaattaatcctataaatcttactgctttagcttgcgatttgattggaagtggggtggctgctattttcggaccaagttcaaagacaaacagcggtaagtttcattttcctacgtataccataccctctgggatatattatttttaaaacgaatcatatggttcggcgtcataaaataaattgtctagctgcatatacgcgcgtatacaaaatccattaaagagaacggcga

SEQ ID NO: 15311 - DNA, 3212 bp, DROSOPHILA
gcgtgaaaataaattgtgaagaagaaagacggcactttgtatctgctcgttttgaattttttttttctgtggcagtctgtgtgcgtctgtagatatagatttgtacatatgcagttgggaagtgaacacgaaatggctgctgcatttagaaaattcaattagtttcgagtgtgttgaggtaaacgaaaaaatgcgcctttgtccagttgtcatctatgcatttataatcatcatcgggtttctggaggggattatagcccttggtggcgacgatcgcaatgaaatcacagtgggtgccattttctacgagaacgagaaggagatcgagctcagcttcgatcaggcctttcgcgaggtcaacaatatgaagttctcggagctgcgattcgtgaccatcaaacgctatatgcccaccaacgacagtttccttttgcagcagattacatgtgaactgatttccaatggcgttgcggctattttcggaccaagttcaaaggcagccagtgatattgttgcgcaaatcgcgaacgcgaccggcattccacacattgagtacgatttgaagctggaggccacgcgtcaggagcagctcaaccaccagatgtccatcaatgtggcaccctccttgtcagtactctcgcgtgcctacttcgagatcatcaaatccaactatgagtggcgcaccttcactctgatctatgagactccggagggcctggcgcgcctgcaggatctgatgaacatccaagcgctgaacagtgactatgtcaagctgcgaaatttggcagactatgcggatgactatcggatattgtggaaggagacagacgagactttccacgagcagcgcatcattttggactgtgagccgaagacccttaaggagctgcttaaagtatccatagactttaagttgcagggcccgtttaggaactggtttctcacccatctggatacgcataactcgggtctgagggatatttataatgaggacttcaaggccaacattacgtcggtgcgattgaaagtggtcgacgcgaatccattcgagagaaagaagacccggctcaccaaagtggatcaaatattggggaaccaaaccatgttgcccattctcatctacgacgctgtcgtcctgtttgccagttctgcccgaaatgttattgctgccatgcagccctttcatccacccaatcgccattgcggcagttcgtctccttggatgctgggagcatttatagtcaacgagatgaagaccatttccgaggatgatgtggaaccgcactttaagaccgaaaatatgaagcttgacgagtatgggcagcgcatccacttcaacctggagatctacaagccaacggtgaacgaaccaatgatggtctggacaccagacaatgggataaagaagcgtctcctcaacttggaactggaaagtgccggcaccacccaggatttctcggagcagcgtaaagtgtatacagtggttacccactacgaggagccctacttcatgatgaaggaggatcacgagaacttcagaggcagggaaaagtacgagggctatgccgtggatctcattagcaagctttccgagctcatggagttcgattacgagttcatgatcgttaatggcaatggcaaatacaatccggagacgaagcaatgggatggcattatacggaaactgatagaccaccatgcccaaatcggcgtctgcgatctgaccatcacccaaatgcgacgttctgtggtggacttcacggtgcccttcatgcagttgggcattagcattctgcactacaagagtcctccggagccgaagaatcagtttgccttcttggaaccgtttgccgtcgaagtctggatctatatgatctttgcccagttgataatgactttggcttttgttttcatagccagactttcgtatcgcgaatggttgccacctaatcccgccattcaggatccagatgagctggaaaatatctggaatgtgaacaactcgacttggctgatggtgggctccatcatgcaacagggctgcgacattctgcctagaggtccacacatgcgcatactcactggcatgtggtggttcttcgccctgatgatgctcagtacctacacggccaacttggccgccttcctgaccagcaacaagtggcagagcagcataaagagcctccaggacctcatcgaacaggataaggtgcacttcggcagcatgcgcggtggcagcacctcgttgttcttttcggagtcgaatgacacggattaccagcgtgcgtggaaccagatgaaggacttcaatccctcggccttcaccagcaccaacaaagagggagtggcacgtgtgcgcaaggagaagggcggctatgcctttctgatggagaccaccagtttgacctacaatatcgaacggaactgcgatctcacccagattggcgagcagatcggggagaagcactacggcctggccgtgccactgggctctgattaccggaccaacctcagcgtgtccattctccagctgagcgaaaggggcgagctgcagaagatgaagaacaagtggtggaagaaccacaatgtcacctgtgactcctaccacgaggtggatggtgacgagctgtccattattgagctgggcggcgtgtttcttgttctggccggtggcgttctcatcggcgttatcctgggcatctttgagttcctgtggaacgtgcagaacgtggcggtggaggagcgagtgactccgtggcaggctttcaaggcggagctcatctttgccctgaagttttgggtgcgcaaaaagccgatgcgcatctccagcagcagcgacaagtcgtcgtccaggcgatcatccggttccagacgcagctccaaggaaaagtcccgcagcaagacggttagctaggtggtcggaatattggacgattggcgtcttctactttggcatttcattagagagtcgcattggaaatgaggcactccatggtgtccacattgtatattgtgagctatatttgtagaattattttagaacacagatagcgcatttgggtatattgaatgttctgaagatttaacgaaactttcaatgaaataatttggataactaattttagtaaacttttctgttggctctaatgttttaatagttgacaataattgattttccttacaaagatttaataaataaacattaaaatata

SEQ ID NO: 15312 - protein, 907 aa, DROSOPHILA
MRLCPVVIYAFIIIIGFLEGIIALGGDDRNEITVGAIFYENEKEIELSFDQAFREVNNMKFSELRFVTIKRYMPTNDSFLLQQITCELISNGVAAIFGPSSKAASDIVAQIANATGIPHIEYDLKLEATRQEQLNHQMSINVAPSLSVLSRAYFEIIKSNYEWRTFTLIYETPEGLARLQDLMNIQALNSDYVKLRNLADYADDYRILWKETDETFHEQRIILDCEPKTLKELLKVSIDFKLQGPFRNWFLTHLDTHNSGLRDIYNEDFKANITSVRLKVVDANPFERKKTRLTKVDQILGNQTMLPILIYDAVVLFASSARNVIAAMQPFHPPNRHCGSSSPWMLGAFIVNEMKTISEDDVEPHFKTENMKLDEYGQRIHFNLEIYKPTVNEPMMVWTPDNGIKKRLLNLELESAGTTQDFSEQRKVYTVVTHYEEPYFMMKEDHENFRGREKYEGYAVDLISKLSELMEFDYEFMIVNGNGKYNPETKQWDGIIRKLIDHHAQIGVCDLTITQMRRSVVDFTVPFMQLGISILHYKSPPEPKNQFAFLEPFAVEVWIYMIFAQLIMTLAFVFIARLSYREWLPPNPAIQDPDELENIWNVNNSTWLMVGSIMQQGCDILPRGPHMRILTGMWWFFALMMLSTYTANLAAFLTSNKWQSSIKSLQDLIEQDKVHFGSMRGGSTSLFFSESNDTDYQRAWNQMKDFNPSAFTSTNKEGVARVRKEKGGYAFLMETTSLTYNIERNCDLTQIGEQIGEKHYGLAVPLGSDYRTNLSVSILQLSERGELQKMKNKWWKNHNVTCDSYHEVDGDELSIIELGGVFLVLAGGVLIGVILGIFEFLWNVQNVAVEERVTPWQAFKAELIFALKFWVRKKPMRISSSSDKSSSRRSSGSRRSSKEKSRSKTVS

SEQ ID NO: 15313 - DNA, 3440 bp, DROSOPHILA
atcccttctgcgccagccgtgtttcacgcaattcctgccggaataataccgtgtactcgacgaaaattgggaataatttacggattagtcatggacttggttaatgcgcccagcgaatcgctgttgagtggaccactgcagagttgtttacgcatgtttgttgcgatgattcttatatttactacaatatattactttaatggcggcacatcgtgtaacagaatgaaattgaaaaggaatgcaattgtatttgaggtaaaaactggttaaagtaactgtaccttttacatcatattcatggcagtcccaaggcagtaaagtgacttaactcataaattggagaagaatacattcacccctagttgaatctgtcttcacttccgcatccaattggatttgtttactttactttgcattggatctggaggcccaatttgatttcggtgtttgcacacgcaaaaaagtaaacccttgtattttatattatatacaatatatacaatcccccgtgattccagccatattcattcgtttgtcaatggcttcatttggctgccgtaagatatgcgaaattgatatgaatgacaaaatcgagcgggtaagggattcggggtaaatctagtgtgaagtcgtttcactgcgtgaatttaatatgggtttaaacgatgcggggtgtcctttttcccataattgcagagaaaaacaaagaaaagaaacgagttaaacagcttgcaatatattttttggtgttagctttaaactagttagtgaaatataattcagttcaaaattcaatttggatcctattagcattcgtttagaaatcaaacgagctaactaacaccaatcgtacaatcgaatcgtcgagcgtgaataaatcatttaaaaatgtgggaataacaaatactattttcctgcttactctagagagaattatctcaaatgccacagattgacacacatctggttggcattcaaaacgaaggcgagcaatctggaaatgaccgacaccgctggagtgtacgactccaaaggggtcagtaatcggaatcgcagtgatcaggaggtcaggatggagcgctacgcctccgatgggcaaattcccaggtgccgaaagacccgattcttcgtcgtcctgatgctcttctcgggaatggccaatgcctatgtgatgcgcacaaatatgtctgtggcgattgttgccatggtcaaccacacggcaatctcgcataccaagtcgtcgactcaatcgaaggaacgggatggtgacttcgagtggagttataagctgcagggctacatcctttctagcttcttctatggctatgtgataacccaaataccctttggcctgatgatcaaatactacggtgctcggcattttctcggctggggcatgatgatcaactcgttggccgccttctttattccgatctcggcaagatcgggtggcgtcgtcggtctgtgtgtggtgcgtttcatccagggcctgggcgagggacccattgtgccctgctcccactctttgctggcccagtgggttcccccgaacgagagatcactggccggagcagcggtctacgcaggtgcccagtttggtaccatagtatctatgccattgagtggacttctggctcactacggtttcgatggcggctggccatcgatcttctatatcttcgggctgttcagcaccatctggtgtatcatctttatttgcctggtgcaggagagtccggccgtgagtactcgcatctcggaggcggagaggcgacacatcatggaggccatttggcaggcacagccggaggaaaggagccggataccctttctgggcattgccaaatcgccacccttttatgccatactggtggcccatgccgggcacaattatggctatgaaacgctgatgaccatgctgcccacctatatgtacagagttctcaatgtgaacattcgcacaaatggcataatatcctcgctgccctacctggccatgtggattctggccattgtgtttggcatcctggcggattgcctcatccggcggaatttctccatcaccgtagttcgcaagttgatgaacagcctgggccagtacggacctgccgtggccctaatctccgtgggctttgtacaccacagcctctggctgactagcgtgattttcatcctgggcatgggactcaacggtgccatctactgcggcttcaagatcaatcatctggacctgtcgccgcgctttgccggcctgctaatctccgtaaccaattgcgtggccaacttggtgggtctgatggcgcccatggtggccggtcatgtgatcgatcccaagccgagcgtggagaactggaggattgtattttatattgctgctggtgtgtttattttcacagccagtttttataacgtatttgccagcggcaagcagcaatggtaaactcgttaataataatatgaagaaaacgaagagttggataaaaagtcagatgtaataatggtaactaacgcacagacaatctgctgcggaatggccgcagatatagaaactgaaactaaaaccgacgaacggcggccatcaggacatcaatcaaatggccgcatgtcctttggcctggtcgggccatttaatttcgcatttgtgccatttattttatggcacatttctgggcctaattagcagagatcggatggccacttgtcctcgtcatggttttggccaaacattcgcccagcaaccgaaaattgtcaggccatcaacagggcgtttgtaaattaacaatgatttattcgaacttgtctgccagcgcaactcgaacatttttggctcgtgtttggctggaacatcgaatgcttacttataaaccattttaaaatgttactaatttattgccgaatgatacggatcatagcagatacaattttccaacaattctttgtacttctgatcgacataaagataaacgtgtttgccctttgataggcgtcgttgttaaagggagttaaccggattcaaacgagattatgtgcgcatcaccttcgatttccgtggacctttttaaactgtcccagttaatctgtgactcgtaatccattaagcttttcaatttcgccccccccctggcagatagctaccctttcccaaatcaggttaaacacgagcgctgatgtctccatcatccgttggctaaatggggatgtggagtcgcccagaaagaggaggtggggccaaagcgttccggcaagtttaagcagcttaagtttcattgcaacaataatttgcgtgcgatagcagcagcaagagctatatggatgtacatacatatgtacatatatacagacacgagagcacaggtgtgcgtccaggcccacagatactcacctgcacgcccacagacacctggccacagaatgttcgccactcttgtaataaccagcga

SEQ ID NO: 15314 - DNA, 1440 bp, DROSOPHILA
atgaccgacaccgctggagtgtacgactccaaaggggtcagtaatcggaatcgcagtgatcaggaggtcaggatggagcgctacgcctccgatgggcaaattcccaggtgccgaaagacccgattcttcgtcgtcctgatgctcttctcgggaatggccaatgcctatgtgatgcgcacaaatatgtctgtggcgattgttgccatggtcaaccacacggcaatctcgcataccaagtcgtcgactcaatcgaaggaacgggatggtgacttcgagtggagttataagctgcagggctacatcctttctagcttcttctatggctatgtgataacccaaataccctttggcctgatgatcaaatactacggtgctcggcattttctcggctggggcatgatgatcaactcgttggccgccttctttattccgatctcggcaagatcgggtggcgtcgtcggtctgtgtgtggtgcgtttcatccagggcctgggcgagggacccattgtgccctgctcccactctttgctggcccagtgggttcccccgaacgagagatcactggccggagcagcggtctacgcaggtgcccagtttggtaccatagtatctatgccattgagtggacttctggctcactacggtttcgatggcggctggccatcgatcttctatatcttcgggctgttcagcaccatctggtgtatcatctttatttgcctggtgcaggagagtccggccgtgagtactcgcatctcggaggcggagaggcgacacatcatggaggccatttggcaggcacagccggaggaaaggagccggataccctttctgggcattgccaaatcgccacccttttatgccatactggtggcccatgccgggcacaattatggctatgaaacgctgatgaccatgctgcccacctatatgtacagagttctcaatgtgaacattcgcacaaatggcataatatcctcgctgccctacctggccatgtggattctggccattgtgtttggcatcctggcggattgcctcatccggcggaatttctccatcaccgtagttcgcaagttgatgaacagcctgggccagtacggacctgccgtggccctaatctccgtgggctttgtacaccacagcctctggctgactagcgtgattttcatcctgggcatgggactcaacggtgccatctactgcggcttcaagatcaatcatctggacctgtcgccgcgctttgccggcctgctaatctccgtaaccaattgcgtggccaacttggtgggtctgatggcgcccatggtggccggtcatgtgatcgatcccaagccgagcgtggagaactggaggattgtattttatattgctgctggtgtgtttattttcacagccagtttttataacgtatttgccagcggcaagcagcaatggtaa

SEQ ID NO: 15315 - protein, 479 aa, DROSOPHILA
MTDTAGVYDSKGVSNRNRSDQEVRMERYASDGQIPRCRKTRFFVVLMLFSGMANAYVMRTNMSVAIVAMVNHTAISHTKSSTQSKERDGDFEWSYKLQGYILSSFFYGYVITQIPFGLMIKYYGARHFLGWGMMINSLAAFFIPISARSGGVVGLCVVRFIQGLGEGPIVPCSHSLLAQWVPPNERSLAGAAVYAGAQFGTIVSMPLSGLLAHYGFDGGWPSIFYIFGLFSTIWCIIFICLVQESPAVSTRISEAERRHIMEAIWQAQPEERSRIPFLGIAKSPPFYAILVAHAGHNYGYETLMTMLPTYMYRVLNVNIRTNGIISSLPYLAMWILAIVFGILADCLIRRNFSITVVRKLMNSLGQYGPAVALISVGFVHHSLWLTSVIFILGMGLNGAIYCGFKINHLDLSPRFAGLLISVTNCVANLVGLMAPMVAGHVIDPKPSVENWRIVFYIAAGVFIFTASFYNVFASGKQQW

SEQ ID NO: 15316 - DNA, 2900 bp, DROSOPHILA
ctgaaaactctcttaaaaaacccacagaatcttgctgaggcagagtacattgtcgccgtgtacatgtatatgcgtctgctgggctaccctgcagctaagatctccattttgacaacctacaatggtcaaaagcatctcatccgcgacgtaatcaacgcccgatgcggaaacaatcctcttattggttggccgcataagattaccaccgtggataaataccagggtcagcagaacgactacatactcatttctctagtacgcaccaaggcggttggacatctgcgggatgtacgacgtttagtggtggccatgagtcgagcgcgtctgggattatatgtatttggcagggtctccttgtttaagaactgtctggaacttcagcagactttcaagcttgtaagtttttacaccattttatggttttttagaggtttataattccgtcactgtttcagctaacacagagacctttgaagttgagtctggtacccgaagacaagttccccacggatcgtttggctagtgctgctgtagccagtcaagatatcaagacggtagaaaacatgtccgaaatggcacagtttgtgtacgagcggtacatggcaaaaatggaggagctaaagggcactcttccttccgaagaagagttggaagcaatgcgcaaccagctgctgcaggaagatgaggaatctgttccagaagcttccgaagagcctccggaaaaaagagcagctaaggaagagccattgtccaaaaagaaaacaacagaagcctttaagcccacccctattctcaacgaaataaacgtggacgacacggagatgggtcaaagggaacaaattgaagaggaagctactgatcaagacaaaacccaggagtcggctccagctgaagagtcttagttattgttcagttgctcaaataatttaatttcattaagttccaacaaagttaaagtgacaaatcaaaaacgcatagaccacactccataaatttccgtttacttcttgggtgcggttatgccctctagctgagccttcagctgagcgttggtcttcttcaggaaagttatctcctccgtgaacttcttttcttcagaggccctcagctcagcattacgacgctctgcctgttcctgcttaagtttcatatctgcgattatctcctctagtgcctctttgtctagttcaagagtcttgacccgatcacgaagcatttccttttcctcatgcgcctgcaaagccttgcgcatgccaaaggctacggaactgcagtacaatgtttcataggcctccattgacatggcgatctcatcgcggatgcgaagcagtagcaggccacgctctgaacagttaatggtgacctggcgaatgatctcgtctgcgataatagagtttaaacaagaaggaaaatggtaaaagggattgtcttaccaaaacattgtgagtacagctcgcggcgcacgggacaaatacctgtctcacgagcttgggtctgctgcagcctagtatcaagcatctcctgcaaattgatcacatcctggcgtgttgctggagtactggacacagactgctgccacaactggccatcctcctcccagcagcgcggtggcaatatagaatttagaatttcctcagtttcccttttggtatctagcaaagcgcccgccgtttggggccttttcatctctatctctgtgagcggagcaccccctttcttgtccgggtgcttcaccaccagcaccgggttgttgtagcgcaccagggtctggaattgacccacgcttgttatatccagctcctccattttgttggtactatttcaatttctcgattcctatctcaaaaaatatatatatttttaatttatatttgtgtaattcaggaattcagcaggtttgtttgttcaccgcttttgatgattagaaaatcagaaatgcctgtggtaagaaaattccaggggttgtgagtttgttattctccctgcgccttctagcaaccatgcgcaactcggcaacggcttctgtttttgtttgcaaacttgcaaatatcaacaggtgtataagtacgcagttcaataggaccacaacattcaaataaaaccacaattatcatatgtatgtgtatatgtttaatgtaaatgcaaacataaatgagtttctggctctgcccgtgaggagtcggacagcggtcaaaagtaacttagttcgttgcacatttccaattcactccaacttaaattctgaacttataagtatgagcaagtttggctaattaaactagaatctaagtaactaattgttaacacacaactaaacgtgttacggaattggaagagcaaataatttagtctttttagtggtacaacttaagctgtagacgatttggatcgccattaaaactaatatcgcggaagttttcgagtaaagactgcattgtgtagatgccattgtagatgtacattagtaactcttacatattcatatcgtttcattacggctagacattgtcaatatataatagtacatatatattattgtcattaattatgcgggagaatttcctctatgggttcttgtagttctgtttctgctcctggctctctatcctgattacttgagttctagataaacgctggcttaccagttacaactacgctatgtatataagtatttatatgtgctatgtacggtacgtgtctagaatattgttgatgaaaacgcaacgacgaactcaaaggtgcaacagaacagattcggttgaacttaaccacggcgagggcttgtctacaacacagatacacagctactacataatttacacatctttttgggcaacagttcccatcgacccttagatcagctcggccacggcgtcgtctccgtcccggatgggagcctg

SEQ ID NO: 15317 - DNA, 847 bp, DROSOPHILA
caaacctgctgaattcctgaattacacaaatataaattaaaaatatatatattttttgagataggaatcgagaaattgaaatagtaccaacaaaatggaggagctggatataacaagcgtgggtcaattccagaccctggtgcgctacaacaacccggtgctggtggtgaagcacccggacaagaaagggggtgctccgctcacagagatagagatgaaaaggccccaaacggcgggcgctttgctagataccaaaagggaaactgaggaaattctaaattctatattgccaccgcgctgctgggaggaggatggccagttgtggcagcagtctgtgtccagtactccagcaacacgccaggatgtgatcaatttgcaggagatgcttgatactaggctgcagcagacccaagctcgtgagacaggtatttgtcccgtgcgccgcgagctgtactcacaatgttttgacgagatcattcgccaggtcaccattaactgttcagagcgtggcctgctactgcttcgcatccgcgatgagatcgccatgtcaatggaggcctatgaaacattgtactgcagttccgtagcctttggcatgcgcaaggctttgcaggcgcatgaggaaaaggaaatgcttcgtgatcgggtcaagactcttgaactagacaaagaggcactagaggagataatcgcagatatgaaacttaagcaggaacaggcagagcgtcgtaatgctgagctgagggcctctgaagaaaagaagttcacggaggagataactttcctgaagaagaccaacgctcagctgaaggctcagctagagggcataaccgcacccaagaagtaa

SEQ ID NO: 15318 - protein, 250 aa, DROSOPHILA
MEELDITSVGQFQTLVRYNNPVLVVKHPDKKGGAPLTEIEMKRPQTAGALLDTKRETEEILNSILPPRCWEEDGQLWQQSVSSTPATRQDVINLQEMLDTRLQQTQARETGICPVRRELYSQCFDEIIRQVTINCSERGLLLLRIRDEIAMSMEAYETLYCSSVAFGMRKALQAHEEKEMLRDRVKTLELDKEALEEIIADMKLKQEQAERRNAELRASEEKKFTEEITFLKKTNAQLKAQLEGITAPKK

SEQ ID NO: 15319 - DNA, 2513 bp, DROSOPHILA
ctcaaaagggtaaactacagcgtttattcttttgtttgttatttatattctcctttaagcaaacatttacacattcgttgtatgttgttgctaaattattagtggagatacaggaatactctcttactaccatgcggcacatttattagcttttattggtttgttttctgacagttttctttaaaggtcaaagctattaaataatattcgtcacatttcagtaaatattatttctatctgggcatataagataattcatgtcaaaataattggattctttatagcaaagatatattctttaaatttaagcagatgaaaatttcttcttgcttggttgattctttaactcgtacaattcgatttttgcaaagctgtcagggatttaaaaaggttatttaaattccgcaattgctatccatgaaatggtatcctgatccaaagtgggtggttactggccaggggagtgagagacttctaataggcagctccagacactcggccttcttaagcacttagtgcacattaagtgccagggattcggattgtttgctgcccagtcgtttggactcatgcccaatccacggcagaccccattcagcattgagaagccccgctttcttccccaactgctccttagtctgcttcaaagttaactgacacttacacttgcacttctgtgaaatcaaatgcattcgccttgggcttggatttggatttcctttatgttcgagcggggctacccattttcaagaggctggaaaaacgtttttccagttaacggacactgaatgattgggtagcattaaacgggtagcacttttcgggtgggtggggcttaaatgacttagtgatagacttaaatgaaaagccataaaagattgaaaaaccatgcaatcggtctgaaagtttgcatattaaaccattccatttaaacacatccactttagaacgcaacatatttattaaccaatcctagtcctcgcagaattcttcctccactctagcacttgtacatcaaacgaattttggtccaatccccttcggaaggtcctcgcacctgacccatttccctctccacagccttaccaccgattagggcacgaattgttggctttgagggatccttggcgaaggcgttcttcgaatagtgcataacgctctcgtaatcgtatggaacattgaaggtggttgtctgatccatggccatgaactgcgaccagtatttcctcgggatattgtcgtagtcgatttgcacgtactcatcgcgatcgggacgactctgctcgtggaaaaggcccagcaggtgaagggtttcgtgttgaattacagccggcatagtgaggcatttctcgttaaggacaacttcgtgcggaccaaaggacagaggttgatagcccactcgagtgccacacatattgggcgacttcttgaaggacacatatcgtttgcctgcgggcggagctccttcgatctcttcgaactgcacacaggtttgctcgccaaaacttgacattgctgtccgcacattggctacctcctgttcactgtagtccgtagatatgcggtacaatatcttattgcctggccaacgttggagtggagaagtcaatgcatttcgggttttggcctccgcctgctcgtcatcaatatgtatctcgttgtagtagttctcgtaggactcaattccttcggacgccaccagattgggtgcaaaaatccccgccaaaagcaaataccgaacagctttaaggaacatttctatagctatgaccaaacttcaaatgccaacccgcttttatagtcatttaattaaaatagttatcagttttatttctgtctcgaaaatattctttatattaaggttttacatacatacacggacaaatcaagtacaggcaaaaaaaaaatactttccctagcacaaacgtgaactttgtttttgaatgtaccctttttaaatgattacattttctttacaacatcgaaacgagaattttaaaaactttacatgatccaattaaaaaattgcagtgtagttagctaaacacaattccagattggagctacacatataccaccttcttttccatggagccaagtttgtagtgcttagcatagatacaataattatacgtttgcataagcctaatgaatgcacatcgaattgcatttcagaacacattggtggctagacacatgcacatattttactgttgaaacgttggccaagttaatagccatcccacaattacttttgactaccctttaaaatgtgtattttcagctgttctagagctaaaatggcgaaattcgattacctaataactaatacagtataattcgcttagctgcatcgatagttagctgcatcggcaagatatctgcattatttttccatttttttgtgtgaatagaaaatagaaaatagaaaaaaaaaaattaagttagctgcatttttaagttacctgcatcgaggcattgtgcaaagtactcgaggcagctaagcgaattat

SEQ ID NO: 15320 - DNA, 513 bp, DROSOPHILA
atgtcaagttttggcgagcaaacctgtgtgcagttcgaagagatcgaaggagctccgcccgcaggcaaacgatatgtgtccttcaagaagtcgcccaatatgtgtggcactcgagtgggctatcaacctctgtcctttggtccgcacgaagttgtccttaacgagaaatgcctcactatgccggctgtaattcaacacgaaacccttcacctgctgggccttttccacgagcagagtcgtcccgatcgcgatgagtacgtgcaaatcgactacgacaatatcccgaggaaatactggtcgcagttcatggccatggatcagacaaccaccttcaatgttccatacgattacgagagcgttatgcactattcgaagaacgccttcgccaaggatccctcaaagccaacaattcgtgccctaatcggtggtaaggctgtggagagggaaatgggtcaggtgcgaggaccttccgaaggggattggaccaaaattcgtttgatgtacaagtgctag

SEQ ID NO: 15321 - protein, 170 aa, DROSOPHILA
MSSFGEQTCVQFEEIEGAPPAGKRYVSFKKSPNMCGTRVGYQPLSFGPHEVVLNEKCLTMPAVIQHETLHLLGLFHEQSRPDRDEYVQIDYDNIPRKYWSQFMAMDQTTTFNVPYDYESVMHYSKNAFAKDPSKPTIRALIGGKAVEREMGQVRGPSEGDWTKIRLMYKC

SEQ ID NO: 15322 - DNA, 4147 bp, DROSOPHILA
attgtaatggatattattatatattgtattaaaattacctgtaaatgcattgcaaaacggtcgcttctcgtacttccattgtataacgccacttagcttgtgctgcaaataagacgataaattatatttatatcaaaactaatcaggtaacaactatttaattaggtatgtaaatgaacgttaaacaatgcgtcgcgttatcaacttagattataactccgcttaactaatttaacgaatttcacaatttacttccactttctgttgggtcttaatgaaatagttaatccattgataactcacatttgccatattggtgccctcgttgttctccctttccagcgaagcctgagagcaaatggcacaagccaggagtgcaagcagcctcagggaaatcctcatggacgttctcattgcaggagtgtgttttttttaataaggatccacttagcaaccgacgcgcttaacactcgaaagccaaatgaaagtggccgcagcttgggccttggtcaacatctcggctacgcaatgtgagacttgttgctttcagaaggcgacaggaccaccagctgggcctggaatgtattttggttgccacttaatggctttttgtgtttttcccgacctttcccagccgggtcgcccccgcacattaacattgcattgacgtgtgaaggatggtccttgcccttgccgagtgtaataaaaaccactgcaaattcaatttgaaacgcaacttgggcaggcttaaagtgggcgaaaatcccccgcaattgtcactaatttcgttcagtgcagctgcattggccataattcgctcgcgagcgaactgaggcgtttgtatctatttataaagacccgatccgatcggatatatccgaaagaacacactcacagatcgctcctacgcgcttgagtgtgcattttccgaaacttttcctcacacttccactagacttttccgaacaaacagaggcaatttcgaggcgactctctgccaaaacggttcgcgtgctactcgaatctctggaattcaatgaaaagttctacaaaagttgcatgatctggaaaataaataaccatatattcattttcggaattttgaataaacaactgataccatttgtgccctagttgatttttaaattgtgatttcttcgcgactttcccacgatttggtgtcgaaagtgtaggaatttctgtgtcacttctactaaaatagcatgtgagtaatttggaaatctataaattatgcatattaattgggaatatctcaacattttatttgattataattaccaatttctgtcggttgaggccggaaaaaagtcgtttatatcacattgcatgcaatttcgtgttgccagttgagaatcttctgtaccttgtttttgtctacgtaaagtaaaaaactaaaaataccacggctattttgagttttcctcagttttactgtcacacttcggtttgacaacttttcccctacccaatggtgtcgccggcaaccgcttttcttttttttccttttcatttcccagcgcttctctgctgttaattaagttaaatgcttttccgccttttttgtttatatgaaacatcaaattcctcacatatttctactgccgaaattgtaaacatttcagcacgcctgattggcaatttgtgctgaaaattacaacattatcgcaggcggatcgtaaaaaataatatcgaataaaaagtgaaaatcctttgcaatttaatggctcttgcgcagcgaaagtttgttgtggtcccatgcgaatgcatgttcatttaattttgactatacaatttattttattattataatttcctcatgcggctattaatagaccagagatgtcagagcccgcagcccaacaacagcagtcccagaacggcaaggagcgctccaagtccacggaggagaaggaagtaccacgcgaaccggcgctggtcctcaaagacatcgatgtaagtccaaagactaggaagctgtatccaagtaccaaaaaaaaaaccaacaaaaatgttttcttatatacacaattacaaactggctgatttgtttgtaaacaattagatgcacttttgaaaattgcagtaaatctgtgacttatattatctaatgccgaatcatcgctaaatgcatcatatatcttatcctttccacttccacttcccacagataaagactgagctagagagcctagtgaaactgctcgatggcaagatctacaaggaggaggaagtggccatggaggagctgcatcagtatctgatcgaggacgatggctcctgggcgctgggcgacaactttctgatcttcgtgcagcgcgtcctgcgtgacaatcaggccttctcgccggacacacggatacacctgatccgcacgctggcctatgcggcgctcaaagatgatgtgatcatcattctgcaccaggatcgaagggatcacacactgatgaactacgcccaggacattgacaagcagacgcccgaggagcagcaggcctgggccatgtttgtaggtcccgcaatgggagaatgaatatataagtttgctatatattcaatatgtttcagatgtgcaatctctttgagaacctgggtccctccgaatggctgttgtacatttcggagtgggaatacaatggtcagaccatctccaacatacgagtgaccaccaaggtggccgtccactgcatcctctccaattgcccgcagctgaaaaatattggcagcatgatcctgtacaacattgctattaaggaagtgaagactgtggtatgtggtatgcaaagtattggaaaatatcgtagatacaagatatatatctgcaggtattcgacgatatcgccgtggagctggccatggccattcttcagttcttccagagcagtcccaacgaagaccaaatcttccgcaccctgagggccctcgttcgattcctcgaggtagtgacctatattcggggtagcccaaattgacagctgtcaaatattcgaatattttgctatttttcaggtctcgcaagacgtaccgatgatcattcaaatgattggaccgcatccaaaacaattcgccggcaagagcgagcgcgtggatgagctgataaagatcattagtcgcaaggtgcccgcctaaagggagatttccacataagagaataaccataaccatagttaccctttttctaatatatattataatatattctagaccctcacttttgtaaagcattttagcggctcaataaacatttgtaccccctgacgaggtcatctacatgccaatatcgccgcagcaaagtttcaggaacggaaatccattgcctccactggctctcagttgcagccagtgtttctgattggagacgaacatctccgaaggcagctgtgtgtcctgggcagaggcatcctctacaaggagaccagaaaaacataggatccacatagatattcaaacacaacttacgcgcctttttgtcgtatttcggcgactgggtgatggagatcacatcctctggctttcgaagcaatatcttgcccacacccttgcacatgcgcagcacctcgtggttgctcagcttatccagctgctcctcatccaacagactgcaggccagaatccactcacgcacatcgtcgaaatcgttgagcaaccgaaccgctccgtttacactgaagcgaatgcgcttctggtagataaagtccagccaggcctcacaaatcagcttcaggatcagcttgagtatgacaatgtccttggtggcacgtatggtgggcagatagatctcgtccagcacatagcccacatagaggctcttctcatcgttgttgtaaacctcgcgttgccagaaactggcggccggaaaacagagcgtaaagttggccaggctgaggactcggcaaactgcggaaagtatctgaacacactcgtcggtggttttctggaggattaggaattagtatcgtctcactactagcatgcgaataagtcacctttagcttgtctatattggcgttgacctcggcgatgagtttggtgcgcagggcaacgcaaactagcatcagtatatcgctcaggtcggcagtgagtttgggcagttggaaggtaatgaagacattcaggcacagcttgacat

SEQ ID NO: 15323 - DNA, 1120 bp, DROSOPHILA
aaacggttcgcgtgctactcgaatctctggaattcaatgaaaagttctacaaaagttgcatgatctggaaaataaataaccatatattcattttcggaattttgaataaacaactgataccatttgtgccctagttgatttttaaattgtgatttcttcgcgactttcccacgatttggtgtcgaaagtgtaggaatttctgtgtcacttctactaaaatagcataccagagatgtcagagcccgcagcccaacaacagcagtcccagaacggcaaggagcgctccaagtccacggaggagaaggaagtaccacgcgaaccggcgctggtcctcaaagacatcgatataaagactgagctagagagcctagtgaaactgctcgatggcaagatctacaaggaggaggaagtggccatggaggagctgcatcagtatctgatcgaggacgatggctcctgggcgctgggcgacaactttctgatcttcgtgcagcgcgtcctgcgtgacaatcaggccttctcgccggacacacggatacacctgatccgcacgctggcctatgcggcgctcaaagatgatgtgatcatcattctgcaccaggatcgaagggatcacacactgatgaactacgcccaggacattgacaagcagacgcccgaggagcagcaggcctgggccatgtttatgtgcaatctctttgagaacctgggtccctccgaatggctgttgtacatttcggagtgggaatacaatggtcagaccatctccaacatacgagtgaccaccaaggtggccgtccactgcatcctctccaattgcccgcagctgaaaaatattggcagcatgatcctgtacaacattgctattaaggaagtgaagactgtggtattcgacgatatcgccgtggagctggccatggccattcttcagttcttccagagcagtcccaacgaagaccaaatcttccgcaccctgagggccctcgttcgattcctcgaggtctcgcaagacgtaccgatgatcattcaaatgattggaccgcatccaaaacaattcgccggcaagagcgagcgcgtggatgagctgataaagatcattagtcgcaaggtgcccgcctaa

SEQ ID NO: 15324 - protein, 295 aa, DROSOPHILA
MSEPAAQQQQSQNGKERSKSTEEKEVPREPALVLKDIDIKTELESLVKLLDGKIYKEEEVAMEELHQYLIEDDGSWALGDNFLIFVQRVLRDNQAFSPDTRIHLIRTLAYAALKDDVIIILHQDRRDHTLMNYAQDIDKQTPEEQQAWAMFMCNLFENLGPSEWLLYISEWEYNGQTISNIRVTTKVAVHCILSNCPQLKNIGSMILYNIAIKEVKTVVFDDIAVELAMAILQFFQSSPNEDQIFRTLRALVRFLEVSQDVPMIIQMIGPHPKQFAGKSERVDELIKIISRKVPA

SEQ ID NO: 15325 - DNA, 6820 bp, DROSOPHILA
gccttattttggaaataatgaataaaatatattcaatttgttgagaggaaaatttaacgttaaagtacaattgtcttagttttgacatttgttttcaaatttaaatttgccgcttacttatcgctatcgaaatttgatctctcttgacaattatttaagtatcgcgttcataagtgtaagaaatagtgttatttattcagaggtataaacttttgactaaaaatacgcatatagaacaaaaataattaaaatgtgtgtttttcttgtttcgatagttccaaaaatatcgatactagataccgaggactagcagcttgtgtagtgctgtgtaatttagaaaattatgtattgttctcgtatttcaaatttcctgtttatacagtagcttatactgattaaggaacttacaaaattttctttaacaaaattaaatatttcgatgaatatggttattgcgtttcgaataaaaataatagagtcctagctaaaaaaaatactgtgagaaattacattttatatatattataaattttaatataaaatatacaaaaatgataatactatcttgtagaatgtattgtagtaatttgcttgtgcatcggtacgatgaaacgtccaattattattaccgagtaaaattcgtgaattcgtgtacatgtatcggcaacaggacgacgctctccaacactgccaaaaaaaagacggcatctgctggcttcgtttccacgttgtcctgaattacgcattgagatgaaaccattaaaaagtgcacttgaatatttggataattacgtacggcgagctcatgaaacacacctgcgaataaagcacatatttcagctgattagatagtatttaattcagaaaggaaaacaaagagcgacgagtcctgcaccacatcatgaaaagtgagaaatcacgatgtgcgattaacggcatctgcgcaccgcatgaacgcaatattcatccgacgaagctcttaatcggtactgctcctgcccgaaatacaaaaagtatatataaacagtgcacatattacaaagataatatgtttggacccgctcaggtgtgcagtgcgttagtaacttgccgcggcacatcgaaattgcccgtgtagagcgttccttcttggaagaaatacacaatttttggtaggtctttcggtttttggtcatttgttcgtttgggtcgggagtggtgaagaggcaaggggggcgctccgactttcactgcaacaacaacgagttatttcggccctgttcgatttcatcaatttgcatgaatacctttcttcaactgtttttcccctttggctggtagcaccatgagctgcttggtcgggaaccgaaagcggaacagcggcagcacggcggacgaattcgacaaggtcagcactttggccaatgccgatgataccgagtgcgtatcgccggatccggggcgggagccggaaagcaacaaaccggattcgcagacggagcctgagtttggccatttgaatgagacgcggaggaagattctcgatgccattgctgctttaaatgatgatagcttcgataagcgcatggcccggttgctcatgcagtacgaggggtaagcacaaatatacatgcacatagaagcaactaataccaaacgtaattaatcttttagcgccattcgggaagagtttcagcgggcacagtatttgccccagaagtgccgcaagctggcgcgaatcctaaccggcctcactgatgtcatccacactatggttcagggtcgagcgctgcagcgggacgagagctacaggcaacgcatgtgcaatattgttggtttctacatatcctgcgaactctgttccgctcaggagccggtggagaaggaggagaccatcatcaacaggattaacagctgcctgaagctctacgtggagtacggagatggtggcgccggcgtccaccgggagcacgtgctgcgcactctcctcgctgcacccaagctcttcaacagagctagcattttgtccatgctgtacaggtgggtggctttgttcaactcaagtgaaaaagatatatggcaactatttactattcaatttacacttgtatggcatctacgcattcaatgagtcggatacatacatatgtagtatacaattaaatagtttacaacttcttatcgacagatctctctttgctttgtttataagagctaattaaagaaccgataagccattagtttaaagtgaaatgctgaaacgcggggcatgataattatgccatgtgttctttaaaaaagtataattggtttttttttcttaaagtacagttaacaattaaacattaaaatggttgtatttggcttaagtggtgccaaaacgtttcatatatcgcgcttcaataatcttttccttattttgcagccgcctctttccccactggtccgttcccagcgttatgatacaagcagaactgccagataaactctacattgaatacatactcatattttactactggcagcgtctggagtcggatgagtcagtcaaggagcgcatcgtgcagttcgccgaaaagttcatgaggccctcaagatcactggccataaaaagtgtctatgctcattacttgccaaagtttacggaccagaatgccgccacgcggaccatattgaatcatctgcgaatgagcagttgcacaagtttgcatgtggtcagcaaggtggacaatcgaccgccccagtccaacgaagtggttagtttgctactttcactttcatgcaaatcttcttttgaaagattaacttaagttagcaacaccgtgaagaagttaacatatttggtcttatagtacatacttgctgttgggttgtcgaatttagtttttaaaccattactattaccccaaaaatctaatattacacaaatgtagcctcactgtgttgctcgtattggcttaactatgatgtcttagtaaaaggtctgattcggacaagcgagtggggcaaaagccaccgccggcgcagttagtcgcgtgacgagcagtcgctggcttcacttcgctgtcccaaaatgactacaacctcaactgagtgcctaagaacacttttttatatgggcattgatttcgaacgaatattctaataattcttgatgatcttcttttgcacaggttctcagttctgatgatgaggacagctgcccgatgtgggacatatcgggtacgccgacatcatcaatttacaatcatccgcccgttttcctccagaatctctgtcagaatgctcgccagttggagccgtgcaagcgtgccaacgttttgtttagcggcattgacaactccatggagattgtagagctacgcgactctgacgatgacgtagagatgttttcggtgaactttaatgtgcctgccaacgtagatggcatcaactcgaactccaactcaaacgactcagctaatcagacatcgacaacgatcctctgcgatgacgactccgtgcccgtcactcgaatctatccgagcaatctgcggacttatgaaaggactgtgcttccacccactacctacacagttccgcggattgtgaacagctatagttgtcgccgggatagtctccatttggtgtctaccacggcgccacatcttgtcgatcagtgtgtgcaaacgttggacgacgaggagcaggatctggtagaggaggaccaatactcaggcgcccacagccacggcttcttcccacgaagcagtaatgccagctatgccagcggacaacgaaccccactttaccactgccgtcaaacttctagtcaaaacagcaactgcagcgagtcttcgctgctaaagaaacaggttaccttcagtccccggcacttgggcgcggcaactccgaacgccaagacaggcacatccaagaagccatccattaagcagtacaagccatcttcgtccaatgccacagaatcacaacgatggaaagagggtaaagaaaaataaatatacacatatacaattacagtattattaatctgcatttcttatcctttcagagcaccgaaaggcgagtgcgaaaatgtttgccaaactggacgccaagatcaaagccagaagtgaagctgaaaatgtgtccaccagccagttaacgcccaccactagcaacgcctccagtagtacacccacaaagatctcgggcacacccacccgcatccggagtacgcaacgaggacaaagagtggcgttgcccacgccgccagcttccacgcacagttcgagtagtccctgccagatacgaagcgcatcaactgataaccataactacaacgtcgattcggattacagtcgccgctgtttctccaaggcagctggcgatgaagtgagctactacaatcacctgctaaccctgcagcgcgagaatatccgacgacgtaggttgaataatcagaaaaagaaaaagaatcgaaaagtcagccaaaaggtgcaaaagaaggacgataagcttaatatgctgaagcaggccacaaagcgatgtcggaagcttcgcgccttaaatgcgaaacggaaaaacgaggtacagaaactggagcaggatctcgacactattcggaaatctgcaccgcataaattgcctataataagactgaaacgttgtaatctcaagacccagaaacggtcactcaaagctgaagaagcacccagtgtccaagaggatatactttctatgaactctgatcgagaattacaggaacaaaaaaaagcgcagaagcctaaaagaaagcgatacaaaaaagtgcaaaaggagcaagaaaacgaaaaatatttgcgggaacaagaaattataatatcgcaaagccaaatggttgaggaagataaagtggaggaacaccacgctcacgaagcgccaagtgagcagcaacgagagctcgatctggagcatcaacaatttctggaagagcagctgctacaggaggaacatcaattggcgatgcacgaggaagagcatcaccaaatggatgatgaacaagagtcacacgaagtagctcgtctgctagaagatcagcagccggcggagggaacacatcttcatgttgagaatgaaatgttggcagagaaagagcaacctctaatagaagatgatgaccaggaagcggatgatcaaaatcaaaatgagcacttatcggatgatcagcaacaggaagcggatcaacagctgtctatagagcagcctcaggagcacgaagagaatcagtcactcagccaagatccgttagacgaacaatgtacgcccacaccgaacggcaaaaggcgcaagcgaagacggcgattcaagcgacgttgttggacgcacgtaaagaataagaaaaagaagcagtggctaatagattacccattggagtttgaggcagatcccgcgttagatacccctcctattcaaccagagccagctccagatgaacaacaagccgagctagttaccgggccagtttccgagtcagttgctgagccagttgctgagccagttgccgagccagtttctgagccatttgcagagcaaattgccgagccaattgcccagccgacaccagaacccgcctacgatttcgatcaggacttggtgcccgaggtgggcaatgaattggagattgctgctcccattcgcgtcgccgaggacgaagacagcactgcgatactctcgccgtcccacaacctggaactggtgaccagccacgtgccggtttacttgctcaatggagaaagtcgcgatgtcagcacacccctgtccagcagctcttacagtgccggggggtcagagatatatgcgtcgtcgaaggatttagtttaggatctccccacacagaccagttgtagttccagttgccgatccaatcccattgatcttggcctgcaatagtatttgtattatttttttgaagaaacgtctgtaaaactgttaaatcactgtaatacttaggtttattgtagttaattaggagttgttgaacgttatgatttttagcttacatatattttgcaatacccttatcccattcaagtcaacccgaaccaaatccatgtcaattttaagaaataacacgaaattattagtgtaaattgtgcgtaaaataataatctaaacaacatctttttatctgtctgttttggggagtggtttgtttcatttcttcagaaatcgttggcaattcacgttattcgttttgatctcgtcttagaaaacaattgcatttgtataacattaaatcaaaaggcacagccttaaacatcaaagaaaaataccgatgaaatcaaaacgaatatattttctgtgttcattgattgcgagcacgccgaataaagtctatggagaacaagaccggtgaatgtaggcaaactatttaaaagttgtcgaaaagtattgtatatatttcacaggttccagttacttactgaaacgacaggagcgagtctcggtcgaggaacaccaacggatctacataaagaacactcaggtaacgcaggtaagggaactcttccgccgtccggtggttagagtttccggttccaccttgataaaaccaaaagcgacgggttcattttcctctgggaaaatccaacaaactctccagaaggtggaagtcctaaacgtgaggatcggcaatgagttaaataggttagagcgctttcgtaatcattttctggaagtcaaagaagctatgagccgatctccgcgtccagaggaggcgaaggaaaaaaacatgacttggagccagagcttgaaggcgaatcaagcgaaagagagtcctctgtccgtcaataggagtcctgcatccggttctcagcagaaa

SEQ ID NO: 15326 - DNA, 3722 bp, DROSOPHILA
cgaaatacaaaaagtatatataaacagtgcacatattacaaagataatatgtttggacccgctcaggtgtgcagtgcgttagtaacttgccgcggcacatcgaaattgcccgtgtagagcgttccttcttggaagaaatacacaatttttgcaccatgagctgcttggtcgggaaccgaaagcggaacagcggcagcacggcggacgaattcgacaaggtcagcactttggccaatgccgatgataccgagtgcgtatcgccggatccggggcgggagccggaaagcaacaaaccggattcgcagacggagcctgagtttggccatttgaatgagacgcggaggaagattctcgatgccattgctgctttaaatgatgatagcttcgataagcgcatggcccggttgctcatgcagtacgagggcgccattcgggaagagtttcagcgggcacagtatttgccccagaagtgccgcaagctggcgcgaatcctaaccggcctcactgatgtcatccacactatggttcagggtcgagcgctgcagcgggacgagagctacaggcaacgcatgtgcaatattgttggtttctacatatcctgcgaactctgttccgctcaggagccggtggagaaggaggagaccatcatcaacaggattaacagctgcctgaagctctacgtggagtacggagatggtggcgccggcgtccaccgggagcacgtgctgcgcactctcctcgctgcacccaagctcttcaacagagctagcattttgtccatgctgtacagccgcctctttccccactggtccgttcccagcgttatgatacaagcagaactgccagataaactctacattgaatacatactcatattttactactggcagcgtctggagtcggatgagtcagtcaaggagcgcatcgtgcagttcgccgaaaagttcatgaggccctcaagatcactggccataaaaagtgtctatgctcattacttgccaaagtttacggaccagaatgccgccacgcggaccatattgaatcatctgcgaatgagcagttgcacaagtttgcatgtggtcagcaaggtggacaatcgaccgccccagtccaacgaagtggttctcagttctgatgatgaggacagctgcccgatgtgggacatatcgggtacgccgacatcatcaatttacaatcatccgcccgttttcctccagaatctctgtcagaatgctcgccagttggagccgtgcaagcgtgccaacgttttgtttagcggcattgacaactccatggagattgtagagctacgcgactctgacgatgacgtagagatgttttcggtgaactttaatgtgcctgccaacgtagatggcatcaactcgaactccaactcaaacgactcagctaatcagacatcgacaacgatcctctgcgatgacgactccgtgcccgtcactcgaatctatccgagcaatctgcggacttatgaaaggactgtgcttccacccactacctacacagttccgcggattgtgaacagctatagttgtcgccgggatagtctccatttggtgtctaccacggcgccacatcttgtcgatcagtgtgtgcaaacgttggacgacgaggagcaggatctggtagaggaggaccaatactcaggcgcccacagccacggcttcttcccacgaagcagtaatgccagctatgccagcggacaacgaaccccactttaccactgccgtcaaacttctagtcaaaacagcaactgcagcgagtcttcgctgctaaagaaacaggttaccttcagtccccggcacttgggcgcggcaactccgaacgccaagacaggcacatccaagaagccatccattaagcagtacaagccatcttcgtccaatgccacagaatcacaacgatggaaagaggagcaccgaaaggcgagtgcgaaaatgtttgccaaactggacgccaagatcaaagccagaagtgaagctgaaaatgtgtccaccagccagttaacgcccaccactagcaacgcctccagtagtacacccacaaagatctcgggcacacccacccgcatccggagtacgcaacgaggacaaagagtggcgttgcccacgccgccagcttccacgcacagttcgagtagtccctgccagatacgaagcgcatcaactgataaccataactacaacgtcgattcggattacagtcgccgctgtttctccaaggcagctggcgatgaagtgagctactacaatcacctgctaaccctgcagcgcgagaatatccgacgacgtaggttgaataatcagaaaaagaaaaagaatcgaaaagtcagccaaaaggtgcaaaagaaggacgataagcttaatatgctgaagcaggccacaaagcgatgtcggaagcttcgcgccttaaatgcgaaacggaaaaacgaggtacagaaactggagcaggatctcgacactattcggaaatctgcaccgcataaattgcctataataagactgaaacgttgtaatctcaagacccagaaacggtcactcaaagctgaagaagcacccagtgtccaagaggatatactttctatgaactctgatcgagaattacaggaacaaaaaaaagcgcagaagcctaaaagaaagcgatacaaaaaagtgcaaaaggagcaagaaaacgaaaaatatttgcgggaacaagaaattataatatcgcaaagccaaatggttgaggaagataaagtggaggaacaccacgctcacgaagcgccaagtgagcagcaacgagagctcgatctggagcatcaacaatttctggaagagcagctgctacaggaggaacatcaattggcgatgcacgaggaagagcatcaccaaatggatgatgaacaagagtcacacgaagtagctcgtctgctagaagatcagcagccggcggagggaacacatcttcatgttgagaatgaaatgttggcagagaaagagcaacctctaatagaagatgatgaccaggaagcggatgatcaaaatcaaaatgagcacttatcggatgatcagcaacaggaagcggatcaacagctgtctatagagcagcctcaggagcacgaagagaatcagtcactcagccaagatccgttagacgaacaatgtacgcccacaccgaacggcaaaaggcgcaagcgaagacggcgattcaagcgacgttgttggacgcacgtaaagaataagaaaaagaagcagtggctaatagattacccattggagtttgaggcagatcccgcgttagatacccctcctattcaaccagagccagctccagatgaacaacaagccgagctagttaccgggccagtttccgagtcagttgctgagccagttgctgagccagttgccgagccagtttctgagccatttgcagagcaaattgccgagccaattgcccagccgacaccagaacccgcctacgatttcgatcaggacttggtgcccgaggtgggcaatgaattggagattgctgctcccattcgcgtcgccgaggacgaagacagcactgcgatactctcgccgtcccacaacctggaactggtgaccagccacgtgccggtttacttgctcaatggagaaagtcgcgatgtcagcacacccctgtccagcagctcttacagtgccggggggtcagagatatatgcgtcgtcgaaggatttagtttag

SEQ ID NO: 15327 - protein, 1188 aa, DROSOPHILA
MSCLVGNRKRNSGSTADEFDKVSTLANADDTECVSPDPGREPESNKPDSQTEPEFGHLNETRRKILDAIAALNDDSFDKRMARLLMQYEGAIREEFQRAQYLPQKCRKLARILTGLTDVIHTMVQGRALQRDESYRQRMCNIVGFYISCELCSAQEPVEKEETIINRINSCLKLYVEYGDGGAGVHREHVLRTLLAAPKLFNRASILSMLYSRLFPHWSVPSVMIQAELPDKLYIEYILIFYYWQRLESDESVKERIVQFAEKFMRPSRSLAIKSVYAHYLPKFTDQNAATRTILNHLRMSSCTSLHVVSKVDNRPPQSNEVVLSSDDEDSCPMWDISGTPTSSIYNHPPVFLQNLCQNARQLEPCKRANVLFSGIDNSMEIVELRDSDDDVEMFSVNFNVPANVDGINSNSNSNDSANQTSTTILCDDDSVPVTRIYPSNLRTYERTVLPPTTYTVPRIVNSYSCRRDSLHLVSTTAPHLVDQCVQTLDDEEQDLVEEDQYSGAHSHGFFPRSSNASYASGQRTPLYHCRQTSSQNSNCSESSLLKKQVTFSPRHLGAATPNAKTGTSKKPSIKQYKPSSSNATESQRWKEEHRKASAKMFAKLDAKIKARSEAENVSTSQLTPTTSNASSSTPTKISGTPTRIRSTQRGQRVALPTPPASTHSSSSPCQIRSASTDNHNYNVDSDYSRRCFSKAAGDEVSYYNHLLTLQRENIRRRRLNNQKKKKNRKVSQKVQKKDDKLNMLKQATKRCRKLRALNAKRKNEVQKLEQDLDTIRKSAPHKLPIIRLKRCNLKTQKRSLKAEEAPSVQEDILSMNSDRELQEQKKAQKPKRKRYKKVQKEQENEKYLREQEIIISQSQMVEEDKVEEHHAHEAPSEQQRELDLEHQQFLEEQLLQEEHQLAMHEEEHHQMDDEQESHEVARLLEDQQPAEGTHLHVENEMLAEKEQPLIEDDDQEADDQNQNEHLSDDQQQEADQQLSIEQPQEHEENQSLSQDPLDEQCTPTPNGKRRKRRRRFKRRCWTHVKNKKKKQWLIDYPLEFEADPALDTPPIQPEPAPDEQQAELVTGPVSESVAEPVAEPVAEPVSEPFAEQIAEPIAQPTPEPAYDFDQDLVPEVGNELEIAAPIRVAEDEDSTAILSPSHNLELVTSHVPVYLLNGESRDVSTPLSSSSYSAGGSEIYASSKDLV

SEQ ID NO: 15328 - DNA, 2918 bp, DROSOPHILA
actgtattattcattagtaatttgccacagcctacctatgatcctgctgagaagcggcaatgccgacgacaaaaccagcatgaagccacagttcagcattagctgtggcagcgaagtctggcgccgcttgggacaaaccttgcgcatgaacggcatgctgtagaagcccaccaccgaggtggcgccgagatagaagatgagacacacctccaggccggcaccaaagggacccaacttcgagagcgaagagatgcccaatgcgaattgctaaataagggaaacaaactcaataagcattcgtcttacgatccctgcagttagacctacccttgtgcttagtggcagcgccttaatgccaataaggagctctagtgtattctgcacaaccagcagaatggtgacagctgtgcagaagagcagcagcagcatggccagcggatagacgaatgtgcgttggaaggtgctcgatgtgcgcagcttgtctagttccttgcgctcggagtccagttctcttagtctatcgttgagctcgtccacgtcactggccatcgccttgcgctggtatagatgagcctgggagtgttgcagcagtggctggggatagaaggtgcgcccacgtcccagaccaatccgattgccaaggcgacctccgttggcggcatccgcaatgctcacgttgtgcagctcaatgtgcgctagcttccgcttcacgctcgcctcctccatgtagaaggcgctaaactcctcgttgacgtcgcgcagtagcataggtcgcaccagcacctggttaacaacgccaaagaggcgcacaaagccatacggggtgcaaactgtaagaaaacaaaacggttgtcctggttaccaaacttgtacatgccttaatattagtatgtaagatctagaacttatttctcgttgtgtacgaaacgtaaacaaaggtctctttgacatcccactcaacttaaaagacattctgttctgagcagtcgaaccagtcggtatcttaactaaatttctattccttacatctttaaaatggcaaacgaagaggttaaagacaatgcccaacttaaggcaactatgttaaactgcaatttgaaccccagtgtcgcggatgattttgctgagttcgaggcaacccttgcgaagatcgattgtatactgcagaacaaggcaccctgtgacgatgaagattcaaaggcaggtggcgatgccaaggagaagatcaactttgacaacttggatgtggataaggtgcggcttaaagtgaaagaaaatcgaacagtcatcaacagaaagtctctagaagaagacaatgagaagcaagtcaaggatatgaaccagaagagtttcatggagcaggtggagaaggatgccaatgatcgtgcagaggcacgtgccaaagccgaatacgaagcagaactacagagaaggtaaacttaatggtctccctaaaattataatatattgtatataaggataattttttagtcagggaaacgaagcatttcgcagccagaagtacgagaaggcaatcctacattatgacaaggctatcatcaaagttaaggacagcgctattacatattgcaatcgcgccttgtgctacatcaagtgagttacaatcttcaagccttatgagctatcctaacaagccttcttcatcattttatttccatctaccaggctacagaactataagcgcgccctcaaggactgccagtacgtgttggagaagctgcaggagagtaatctccgcgcctggctctaccaggcccacgcctacaagggtttgaaacaagacgacaagttcgaggaaagcgtggtcaaggcacgtgaacacaatcccaagcaactggcgtacattgacaagtacattaagcaactggaagccgatcttaaagcactagaaatataacttatttaattttgcattatatactcactcagcataagcatgacacccaaaaacgagacacacgaataaagaaacggcaggtgaacactgcccaaatctgtgaagcatgaaaagcggaaattagaaatgcattgtgcatcagaatccaatcccaatttggggatgggcttgtcaggggcgcggaaagacaattgacattggaattgatctcttccgcacccgtgcatcattacattatatactcacttagaaaccagaagaattgaagcttttcaatgccaaagactgcacttaggacggcagttagtacgaggacaataatggccatcagcataaatactgtaaaggtttcgtagactcgcggcaggatgcccttcttgttgccgacgaatcccgtggattccgagaacaaatagacaaatggcaggaagatgaacagtgacagattggagaacagaaatacatggttccacaagcctgaaattggcatattaaacgggttagtcagtgttcctcggtggataatgtagtacttaccctgtatgagtgaactgtttagccatttcacatagtaactgttgggatagaggagtagcacctcattgctggcaatggaaacgggcagcagcatggcagccccttcggcaacggccagtgtgaatgtgcacagccaaaagctatggggttggttgggtggaaaaggcaaaagcaaagaaaaccattcattattgcgagtgcaagtcaagtgacgcggcaattagcgacacaggttgttgaccactggatgcctcaccttatgcgatagaccagcacctcgtcctcgtcattcgaatagagatcgtcacggtcgcgccgcctaaaacgtgagacgaccacataggagctggagtacagcaagattatcagtagcaagaatatctgaaaagaacaatgcaacatggcaagttagtaagctttatggttttatcagctaagtaatattttactataatataatcaa

SEQ ID NO: 15329 - DNA, 788 bp, DROSOPHILA
atcttaactaaatttctattccttacatctttaaaatggcaaacgaagaggttaaagacaatgcccaacttaaggcaactatgttaaactgcaatttgaaccccagtgtcgcggatgattttgctgagttcgaggcaacccttgcgaagatcgattgtatactgcagaacaaggcaccctgtgacgatgaagattcaaaggcaggtggcgatgccaaggagaagatcaactttgacaacttggatgtggataaggtgcggcttaaagtgaaagaaaatcgaacagtcatcaacagaaagtctctagaagaagacaatgagaagcaagtcaaggatatgaaccagaagagtttcatggagcaggtggagaaggatgccaatgatcgtgcagaggcacgtgccaaagccgaatacgaagcagaactacagagaagtcagggaaacgaagcatttcgcagccagaagtacgagaaggcaatcctacattatgacaaggctatcatcaaagttaaggacagcgctattacatattgcaatcgcgccttgtgctacatcaagctacagaactataagcgcgccctcaaggactgccagtacgtgttggagaagctgcaggagagtaatctccgcgcctggctctaccaggcccacgcctacaagggtttgaaacaagacgacaagttcgaggaaagcgtggtcaaggcacgtgaacacaatcccaagcaactggcgtacattgacaagtacattaagcaactggaagccgatcttaaagcactagaaatataa

SEQ ID NO: 15330 - protein, 250 aa, DROSOPHILA
MANEEVKDNAQLKATMLNCNLNPSVADDFAEFEATLAKIDCILQNKAPCDDEDSKAGGDAKEKINFDNLDVDKVRLKVKENRTVINRKSLEEDNEKQVKDMNQKSFMEQVEKDANDRAEARAKAEYEAELQRSQGNEAFRSQKYEKAILHYDKAIIKVKDSAITYCNRALCYIKLQNYKRALKDCQYVLEKLQESNLRAWLYQAHAYKGLKQDDKFEESVVKAREHNPKQLAYIDKYIKQLEADLKALEI

SEQ ID NO: 15331 - DNA, 9922 bp, DROSOPHILA
atatatttttaatttatatttgtgtaattcaggaattcagcaggtttgtttgttcaccgcttttgatgattagaaaatcagaaatgcctgtggtaagaaaattccaggggttgtgagtttgttattctccctgcgccttctagcaaccatgcgcaactcggcaacggcttctgtttttgtttgcaaacttgcaaatatcaacaggtgtataagtacgcagttcaataggaccacaacattcaaataaaaccacaattatcatatgtatgtgtatatgtttaatgtaaatgcaaacataaatgagtttctggctctgcccgtgaggagtcggacagcggtcaaaagtaacttagttcgttgcacatttccaattcactccaacttaaattctgaacttataagtatgagcaagtttggctaattaaactagaatctaagtaactaattgttaacacacaactaaacgtgttacggaattggaagagcaaataatttagtctttttagtggtacaacttaagctgtagacgatttggatcgccattaaaactaatatcgcggaagttttcgagtaaagactgcattgtgtagatgccattgtagatgtacattagtaactcttacatattcatatcgtttcattacggctagacattgtcaatatataatagtacatatatattattgtcattaattatgcgggagaatttcctctatgggttcttgtagttctgtttctgctcctggctctctatcctgattacttgagttctagataaacgctggcttaccagttacaactacgctatgtatataagtatttatatgtgctatgtacggtacgtgtctagaatattgttgatgaaaacgcaacgacgaactcaaaggtgcaacagaacagattcggttgaacttaaccacggcgagggcttgtctacaacacagatacacagctactacataatttacacatctttttgggcaacagttcccatcgacccttagatcagctcggccacggcgtcgtctccgtcccggatgggagcctggaatgtggatcctgtgaactcgtacaactgaagagggaggagtgtaaatataaattatattctttacttaatgattggtggattcttaccgatggcgctctattgtttcgcaacgtggcataatccgcaaattcattcatgtgcggatcaacgcgggccaggagtagaccagcacctcccactcctccggcgctggcacctcccccgcttcgcatcgacccaccgccggcaccaccgccgccagtaagacgattttgattattgcgcggctgaatggtggcatacgtgttgtccaccgtctggcccacatgatgaacctgctcaagagagctacgatggtcgaggtggcccggtgcctcagagttggatatgtgatcgggctccgagaaaacctgcattgtcagttcctgttcctcatacagtttcaattttctgacggaaaataaagaaaatcaggaactatttaaaaccagcttaaatcaggactcactgttctatccacagcggattttcggtagtgtttaggtcctctataatctgtttcttaattagggcctccttgcgacgagtctccacgggcaccgacagattccaatgctttaggcagcagcacaggacaataaagctaataacgccaacgaaaaggacgatgaccagcgccaccaatccagccactgctagatcaaactcatcttgcacaatagctatgtaggcgggcacaacgttctctatggcaaaaccagcgtagtagtcctgaaagaaagcaatgtttgttgaaatacatatgagcaaaaggaagtttaaaggatttacctttagataatcgtagttcctgtcgatatccttgagtatctcatcaactggtgcaatttgctgggtctgaggatcaactgcatggaagtacaggtcacaccagtccatacgtatgcgtccaatcgagtccaaatggaatcttatttcatcaacgatgatgcgatgctgggtggcattgcgcaactcagcaatgatctcctcctgttcctggtaaacctcttccggcggacgggacaaaattacgcgcaccagctgcgtgccatcaaagacccagatctgcatgaaataaaataatatctattggattgttatataaaatattattatcacttacattcactttagtactggctgagctctggggttgctccaattctcttgccacgatctccagttcgaaacgatcctggttgtactcagccatgatagtgtttgctgagatgcgaccatcctgcgaaatggcaaacggactgggaacgatcgatcctgtggatttggtggctccaaacttatacagattcgacgcgacgatcataaactcgatctttgcgttcttgccttgatctgcatccgttgcatttactagcgtaatagctgcgcccatcttggcattggcgtttactccggcatagtaaatgggcttttcaaacacgggaggattgtcgttaacatccaagacagtgatggcaacttttgcgactgtgttatcccggttgagggtcttaatcgagaatgaggcgcgttcctcttcggatatatgcagatccgccttgatgctggctaggatgtataaagtgtacacatccgtttcttcgcgatctaggctcttgtttgtgtaaatatccccagtcagtttgtccacataaaacgcaccatcctcattgcccaacagcatgtaatagaatatatcccggttgtgcttgcttcttgaggccgcttgaatgtgtccaatcttcacatcccgaccgctattctcattgatcgacaccttataaggattggaggcatcgggaaactccggccggttctcgttggcatccacaatgctgacgctgaggagacgcagggattcaaatggaggattgcctgcatctcgggcaactagtattatatcgtagctaacggatttgagaattacacattagaaaagctcttcgcaaaagtaaagtacacttacttggcgcggtttttacggtttagctgcgtcttggctcgcaattctcctgtcacttcatcgatcttgaattccccggtctgctgctcgttccgattgttcacctgcaggtggtaactaactttgccgttttcctccgtatcattatccattgccctgacggttagcagtagataatcgggctggacaatatcaccaggtatctcaatggtggcattggacagcgcgggtatgacgaactccggcttatggcggttaacccttagtacagttataatcgctttcgttgtgctttccatggtgcccgatccttgagtgtcgcgtgccgaaatggttagctcgtaggctccatgttttccggacaaactttgcgctgggtacacaatgccagactgcgcatcgagcttgaagagtcccatttcattgccggctgtaatgatataccgcacatctccatatagaccctcatcctggtcaatggcctgaacttggagcaatgctgcaggcggctgataggcggcattttccgccaccgtagagttgtatacatctcgtgtaaaaacgggagcattatcattgacatccaaaatgtttatgtggatctgttggttataaagtaactaaggtaaagcaaaaaggaaatcgggaatcattctacttaccgttgccgtagccgatttttggactgcagctggagccttatcctgagccaccacggagagcgtgagctccttaatttgctctcgatcgagaatcgaggaattggccaccattacgttgcccgtataggcatcaatgctaaagtacttgttattttcgccgatcagcgtgtaagtgatttcgccaaagacgcccacatcgccatcgtgggcctcaacttttcccgccaccgtgccgcggggtgagttttccgtaacattgaagtaataatcagattgagagaactttgggtcattatcgttcaggttaataatgtccacaaccacatcagcggtggctgttaaagcaggcacacccgtatcactgacggtgacttggaacttgacctcctttacgacttcgtagtcgagtcgggcaatggtgtagatcattccgctggtctggttaatggcgaaatagtcgttgtcactgatattaaactcgccaatgctggagtcctcatcgttggcctgaagagtggtcagtacggtgcccacaggctgctcctccaccatttgcagcttgatttgcggctgctccacactccatggtgcattgaaacgctgaaaaaattatttattcttattatctgtgactttgagaacataatcaaaattattagctaaaatttcacgtgaactttctctctaagccatcaaaccccaaattggaagaatgatcaatgagctatccgctcctaagcttaagcttgtattcattaatgtattttcgattttgcacagtaccacttatttgaatgtgtaccgcttatatgcagacttaaaaaatgttaaagctggcgtggatgggtctaatgaggagctttggatcagggaaatctttacattcctcatcagtgctctcatagtgattcgcttttgtctatgcttcgtaggattggcttctaacattgtggccatgtgagtgaatctatcaagcgattgctctatttaacaattcaaaaaatgtatatatgcagatacccaattctaacaaattcgcaagctgagatgcttatgcctaccattatagtgcaggccattgacaaagtcattctaaatctatacgagattattttgggctacggcagcttgtgctatctctatcctgaaagtacggctgttttcatcttcttccttatacagatgggagccaagattgtctgcagcatctctgtcttgtaaggcttaataatatgaatatacaaaaaaaaaaggtttataaaattttacacgtcttaggaatatttattcggaccatcacaatcacttggcaactctagtttccttcaacgaggaatcacatagcttgggaccagacagtgtagaagaaatcgaattggggaaccaaaacttggatttttcctaactaattatatatatatatatatatatttcaaaatagaatgaataatatactatcaaatctgcagatatttaacttaccggtggattcttgttgacatcaatgatctgtatgatgagcaaaccacgaccctgctgaacattgggagctgtgctgtccgtaaccagaacgttgatcctcatcacagcaaacaaattgcgatccaactgcttgttaaccgaaacctttccgtttctggaaatcttaaagtactccttgaactgatcataatgcggcaactccttgccttccttatcgattgcggtgatgtcgtcggtgccggcaaattccaaagcattatggttggccacatcgggatccagggcgattagagtgtagaccaattgcccgggaggagcgtctgcacgcacctcagcatgctgtgtagctggcacaaaatacggatccttatcattactgttctgaacatttatcgtcagggtggcggttcccgttagacttggggttccctgatcggaagcctgaatctgcagctgataggtgttgcgtcgatcgaagtccagttttcgagaaacaaacacctcgccggtggtctcaacaatgccaaaatcgtcaaagctgccctgttgtatgcggtagcgtagctcggcattcttgcccgtatccaagtcggttgcatgcacccgctccacgctcgttccaatctccgagttctcctcgacgacggcactgtagctctgctgctcgaaattgggtacgtggttatttacatcccgaacggtgatgtttacgccgcagtgagcagtaaatagtccatcgttggcttccacagcgaagataagttgatcgctatttaaattggtcacatctagtgtggcattcggcctgatgatgatctgcccggtctcacgatcaatatcgaaaatgctctcgacctgctctgagccccggattctgtagctaattctggacatggtgtccgcatcccttgccttgactatcagcggggaatcaaagaccacggctccctcatccacgctcgccctatacaggggactttcgcagacaggcggggaatcgttggcatcagttacagaaatccgtagggatactacagatgcggatccacgtccgttatcgtcggtggcctaaagaggaagatggaaaaatttagttaaaaactaataatcattaaaatccaagaagcccacttatagacttttcaattcagaattatgatcttggattaatgtcaaaatttgtgattaaatacttttgcatagtacttttaaatagttgtttagtttcatctagttttcataataggactacgcaatgtatgtacaaattaattattaacgcttttaatttattcagcttattgtcataatttatgaccatttgaaatatacatttgaaaagttaaaaaataaaagtgatttcttagctaaaaacaaatgataaaacgggatgaatttgtttaaatcagatttaggcgttaggaaggtatcaaatgtatcaagacgcaggcctgaatttcaatcctctttcgttatttatattcttcatgttatggagggatctgcccacgcgatgcacatcccacatggttcccccaccagcgtacgcacataaaaaccttgccacccgcacacgaagattgagacagtcactcaccttgtatgacaagaagtacgtggtctccgattcgtagtccagacacgtctgcggtgccttgtcgtcattagcagtcgctgcgggaactccagatggagctgcgtgtggaacaggagctggtagtggaaccgacgatgcctgctcctctggcgcctgggtgattaacgtgtactggacggtgggctctgtgccaatttctcgagttgctgcctccatggagagcatttccaggtgaccctcgccatcgtcctcctcgacatgctcatcctcgttcagatcacgtcgctcgcgtctattgctctccccattgtcatggcaattggctaggcttataacacctgtctgctcattgacatggaaaagttcagcaccggttccggataagctgtaccgaatgccagagtcaccataacttccggagtccacatcccgagccgtaatggtggcgatatactgacccggaagcgccgcctccgaaacagatgcagaatagctctcctgctcgaaaactggcttattgtcgttggcatccaaaacactaacggtaatcgttgccgtggaggatagccgtggattggtgtctgtctcttcggccaccaccagaacgatgaactttcgctggtttggattctcgtagtctagagtgccgtttgcgacgcgaatattgacctgcgagtacccggtgaccaacttaggttcaacatcgaatacaccggaaacgtcatccaggcgcagggcaaatttggaattaatgcccacgtcagcatcactgacgctcatgtccagtgcgagcggtgtgccaggtagagtgttctccaaaagggacacggagtactccttgtgattaaaaaccggtggagagtcgtttacatccctaatggtcaccgttgccttggccgtagcacttgtcaggggatcatcgctgggcactccgttcacaagctcacgagcgcgaatcaccagtgagataataccagtggaatcttccaaagcttcccgatctaatggtttagctgtacgcagttctcctgtctgagcatccagcaggaagtaatcattgggatctgttaaatacgtaaacatttaagtacaaattaaaacatggtaatattgactagacttacttgtccgcagatcatagacaattttccttggttcgcccgtatcgccatccctagcgtggacagtaagcaccaaggtgttaatgggactgtcctcatcaataaccgtagatagggagccctgaaatacgggcggcttatcctgaacatccttcaccctcgcctcaaacgttgtttgcgtcttgtgcgggccatcggtggcttcgatttggaagtggtaaaccatccgctgattgtagttcagggtatcattgagcacaactgctgcttccagaattgtggcatctcgctttataatatgcaagcggaatctggtttggaaataaaataattagttcggtatttctcttaatttttcagagagctactcactttctgcaagcttcgggactttgctgttgcggcaagcatttcaagtcgagactttcgccaactatatccctatccttgactgtaatcttatcaaatatagttgttcccaccgcagcatcctcgtttacatccgcttcgtagggagtctgtattttagtaaaccagtattaaatgtatattcaattttataaggtaataagtgtactaacattttgaaattctggtggattgtcgttcagatcaagaataataaatgtaatcggcacttcgaccacattatccctttccgactctccctcgggatctacgcgatcccttatcgacaccaggaacttcaaggtgtccttctcctcgcgatctagtggttttatcagcgttatgtttcccgaaaccggatccacgctaaagtgatccgcaccgatggctccataggtaacaggacttccttcgggatcgtacgcttctagacgaaaaactaccgtacccacagttacattctcgtagagaataatattgttcagggtctgcgtgaatacaggtggcagatttgtctctcctgatttacaaagtcaaaaattattaagattatacaattcttataggcttatttggtggtactaacctttagcgagggtcaagcccaaacagatcatcaacagccccaaggggagcttcattttagggtctgcaaagagtaaacaaattaaacgttaagtgtttgttcgattttatactcggcaaacattgaaagcaatgagcttaaaccaacagatttgcggcacaaaacggagatacagaaaaaaaaacaagaaaaaaattcgatgctgtgaatgctctaaaaaaatttacattttctttacaattgcaggtgaataacgtttacaggtaaatacctttatgcataccttataattgttatttaaaagggagcttaaaaaaggaattgcaaacaaatacatatgaactccgaaagagcgcataaaaatcctcttatctaattttagggtgttatatattgttatttgatttttttcggctttgccgtgtttttgttttcatcatttggtggcataaacaaacaataaagataaattaaatttcatttcatgctgaaaattcaattagctgacaatgcacacaggccagtaagagcgtgacaaccatgatgcggatgatgatggtggtggtgggaaggcagggggcagctactgatgatgatggctataacaacataacgttgttgatgacaaccagcaacaaaaagaggcaacaggcaacattgtggcaaattgtacactttgtctgcgggctggaggggcaggtcgaaaaacgaagcagggttttggccagggaatcgccgaaggcgccaacattcctgatgcgtccgttcatttgtccggcacgcaccacctaaccgagaaccagcatcgcaggcccgtggaccagtggcgcacatatttggcaaccagcagacgggacaaccgggcgatgaccacacaaacaggcgaagggacacgagtacactttcagaaaaaacgtggtgttttaactagctggacactgtttgtgaagtaaaacaacaaacacattaactaaaatactaaaatacttctaatatatagatagcttatgccaatatatgtttggaattat

SEQ ID NO: 15332 - DNA, 5855 bp, DROSOPHILA
atgatctgtttgggcttgaccctcgctaaaggagagacaaatctgccacctgtattcacgcagaccctgaacaatattattctctacgagaatgtaactgtgggtacggtagtttttcgtctagaagcgtacgatcccgaaggaagtcctgttacctatggagccatcggtgcggatcactttagcgtggatccggtttcgggaaacataacgctgataaaaccactagatcgcgaggagaaggacaccttgaagttcctggtgtcgataagggatcgcgtagatcccgagggagagtcggaaagggataatgtggtcgaagtgccgattacatttattattcttgatctgaacgacaatccaccagaatttcaaaatactccctacgaagcggatgtaaacgaggatgctgcggtgggaacaactatatttgataagattacagtcaaggatagggatatagttggcgaaagtctcgacttgaaatgcttgccgcaacagcaaagtcccgaagcttgcagaaaattccgcttgcatattataaagcgagatgccacaattctggaagcagcagttgtgctcaatgataccctgaactacaatcagcggatggtttaccacttccaaatcgaagccaccgatggcccgcacaagacgcaaacaacgtttgaggcgagggtgaaggatgttcaggataagccgcccgtatttcagggctccctatctacggttattgatgaggacagtcccattaacaccttggtgcttactgtccacgctagggatggcgatacgggcgaaccaaggaaaattgtctatgatctgcggacaaatcccaatgattacttcctgctggatgctcagacaggagaactgcgtacagctaaaccattagatcgggaagctttggaagattccactggtattatctcactggtgattcgcgctcgtgagcttgtgaacggagtgcccagcgatgatcccctgacaagtgctacggccaaggcaacggtgaccattagggatgtaaacgactctccaccggtttttaatcacaaggagtactccgtgtcccttttggagaacactctacctggcacaccgctcgcactggacatgagcgtcagtgatgctgacgtgggcattaattccaaatttgccctgcgcctggatgacgtttccggtgtattcgatgttgaacctaagttggtcaccgggtactcgcaggtcaatattcgcgtcgcaaacggcactctagactacgagaatccaaaccagcgaaagttcatcgttctggtggtggccgaagagacagacaccaatccacggctatcctccacggcaacgattaccgttagtgttttggatgccaacgacaataagccagttttcgagcaggagagctattctgcatctgtttcggaggcggcgcttccgggtcagtatatcgccaccattacggctcgggatgtggactccggaagttatggtgactctggcattcggtacagcttatccggaaccggtgctgaacttttccatgtcaatgagcagacaggtgttataagcctagccaattgccatgacaatggggagagcaatagacgcgagcgacgtgatctgaacgaggatgagcatgtcgaggaggacgatggcgagggtcacctggaaatgctctccatggaggcagcaactcgagaaattggcacagagcccaccgtccagtacacgttaatcacccaggcgccagaggagcaggcatcgtcggttccactaccagctcctgttccacacgcagctccatctggagttcccgcagcgactgctaatgacgacaaggcaccgcagacgtgtctggactacgaatcggagaccacgtacttcttgtcatacaaggccaccgacgataacggacgtggatccgcatctgtagtatccctacggatttctgtaactgatgccaacgattccccgcctgtctgcgaaagtcccctgtatagggcgagcgtggatgagggagccgtggtctttgattccccgctgatagtcaaggcaagggatgcggacaccatgtccagaattagctacagaatccggggctcagagcaggtcgagagcattttcgatattgatcgtgagaccgggcagatcatcatcaggccgaatgccacactagatgtgaccaatttaaatagcgatcaacttatcttcgctgtggaagccaacgatggactatttactgctcactgcggcgtaaacatcaccgttcgggatgtaaataaccacgtacccaatttcgagcagcagagctacagtgccgtcgtcgaggagaactcggagattggaacgagcgtggagcgggtgcatgcaaccgacttggatacgggcaagaatgccgagctacgctaccgcatacaacagggcagctttgacgattttggcattgttgagaccaccggcgaggtgtttgtttctcgaaaactggacttcgatcgacgcaacacctatcagctgcagattcaggcttccgatcagggaaccccaagtctaacgggaaccgccaccctgacgataaatgttcagaacagtaatgataaggatccgtattttgtgccagctacacagcatgctgaggtgcgtgcagacgctcctcccgggcaattggtctacactctaatcgccctggatcccgatgtggccaaccataatgctttggaatttgccggcaccgacgacatcaccgcaatcgataaggaaggcaaggagttgccgcattatgatcagttcaaggagtactttaagatttccagaaacggaaaggtttcggttaacaagcagttggatcgcaatttgtttgctgtgatgaggatcaacgttctggttacggacagcacagctcccaatgttcagcagggtcgtggtttgctcatcatacagatcattgatgtcaacaagaatccaccgatggtggaggagcagcctgtgggcaccgtactgaccactcttcaggccaacgatgaggactccagcattggcgagtttaatatcagtgacaacgactatttcgccattaaccagaccagcggaatgatctacaccattgcccgactcgactacgaagtcgtaaaggaggtcaagttccaagtcaccgtcagtgatacgggtgtgcctgctttaacagccaccgctgatgtggttgtggacattattaacctgaacgataatgacccaaagttctctcaatctgattattacttcaatgttacggaaaactcaccccgcggcacggtggcgggaaaagttgaggcccacgatggcgatgtgggcgtctttggcgaaatcacttacacgctgatcggcgaaaataacaagtactttagcattgatgcctatacgggcaacgtaatggtggccaattcctcgattctcgatcgagagcaaattaaggagctcacgctctccgtggtggctcaggataaggctccagctgcagtccaaaaatcggctacggcaacgatccacataaacattttggatgtcaatgataatgctcccgtttttacacgagatgtatacaactctacggtggcggaaaatgccgcctatcagccgcctgcagcattgctccaagttcaggccattgaccaggatgagggtctatatggagatgtgcggtatatcattacagccggcaatgaaatgggactcttcaagctcgatgcgcagtctggcattgtgtacccagcgcaaagtttgtccggaaaacatggagcctacgagctaaccatttcggcacgcgacactcaaggatcgggcaccatggaaagcacaacgaaagcgattataactgtactaagggttaaccgccataagccggagttcgtcatacccgcgctgtccaatgccaccattgagatacctggtgatattgtccagcccgattatctactgctaaccgtcagggcaatggataatgatacggaggaaaacggcaaagttagttaccacctgcaggtgaacaatcggaacgagcagcagaccggggaattcaagatcgatgaagtgacaggagaattgcgagccaagacgcagctaaaccgtaaaaaccgcgccactacgatataatactagttgcccgagatgcaggcaatcctccatttgaatccctgcgtctcctcagcgtcagcattgtggatgccaacgagaaccggccggagtttcccgatgcctccaatccttataaggtgtcgatcaatgagaatagcggtcgggatgtgaagattggacacattcaagcggcctcaagaagcaagcacaaccgggatatattctattacatgctgttgggcaatgaggatggtgcgttttatgtggacaaactgactggggatatttacacaaacaagagcctagatcgcgaagaaacggatgtgtacactttatacatcctagccagcatcaaggcggatctgcatatatccgaagaggaacgcgcctcattctcgattaagaccctcaaccgggataacacagtcgcaaaagttgccatcactgtcttggatgttaacgacaatcctcccgtgtttgaaaagcccatttactatgccggagtaaacgccaatgccaagatgggcgcagctattacgctagtaaatgcaacggatgcagatcaaggcaagaacgcaaagatcgagtttatgatcgtcgcgtcgaatctgtataagtttggagccaccaaatccacaggatcgatcgttcccagtccgtttgccatttcgcaggatggtcgcatctcagcaaacactatcatggctgagtacaaccaggatcgtttcgaactggagatcgtggcaagagaattggagcaaccccagagctcagccagtactaaagtgaatatctgggtctttgatggcacgcagctggtgcgcgtaattttgtcccgtccgccggaagaggtttaccaggaacaggaggagatcattgctgagttgcgcaatgccacccagcatcgcatcatcgttgatgaaataagattccatttggactcgattggacgcatacgtatggactggtgtgacctgtacttccatgcagttgatcctcagacccagcaaattgcaccagttgatgagatactcaaggatatcgacaggaactacgattatctaaaggactactacgctggttttgccatagagaacgttgtgcccgcctacatagctattgtgcaagatgagtttgatctagcagtggctggattggtggcgctggtcatcgtccttttcgttggcgttattagctttattgtcctgtgctgctgcctaaagcattggaatctgtcggtgcccgtggagactcgtcgcaaggaggccctaattaagaaacagattatagaggacctaaacactaccgaaaatccgctgtggatagaacaaaaattgaaactgtatgaggaacaggaactgacaatgcaggttttctcggagcccgatcacatatccaactctgaggcaccgggccacctcgaccatcgtagctctcttgagcaggttcatcatgtgggccagacggtggacaacacgtatgccaccattcagccgcgcaataatcaaaatcgtcttactggcggcggtggtgccggcggtgggtcgatgcgaagcgggggaggtgccagcgccggaggagtgggaggtgctggtctactcctggcccgcgttgatccgcacatgaatgaatttgcggattatgccacgttgcgaaacaatagagcgccatcgttgtacgagttcacaggatccacattccaggctcccatccgggacggagacgacgccgtggccgagctgatctaa

SEQ ID NO: 15333 - protein, 1374 aa, DROSOPHILA
MICLGLTLAKGETNLPPVFTQTLNNIILYENVTVGTVVFRLEAYDPEGSPVTYGAIGADHFSVDPVSGNITLIKPLDREEKDTLKFLVSIRDRVDPEGESERDNVVEVPITFIILDLNDNPPEFQNTPYEADVNEDAAVGTTIFDKITVKDRDIVGESLDLKCLPQQQSPEACRKFRLHIIKRDATILEAAVVLNDTLNYNQRMVYHFQIEATDGPHKTQTTFEARVKDVQDKPPVFQGSLSTVIDEDSPINTLVLTVHARDGDTGEPRKIVYDLRTNPNDYFLLDAQTGELRTAKPLDREALEDSTGIISLVIRARELVNGVPSDDPLTSATAKATVTIRDVNDSPPVFNHKEYSVSLLENTLPGTPLALDMSVSDADVGINSKFALRLDDVSGVFDVEPKLVTGYSQVNIRVANGTLDYENPNQRKFIVLVVAEETDTNPRLSSTATITVSVLDANDNKPVFEQESYSASVSEAALPGQYIATITARDVDSGSYGDSGIRYSLSGTGAELFHVNEQTGVISLANCHDNGESNRRERRDLNEDEHVEEDDGEGHLEMLSMEAATREIGTEPTVQYTLITQAPEEQASSVPLPAPVPHAAPSGVPAATANDDKAPQTCLDYESETTYFLSYKATDDNGRGSASVVSLRISVTDANDSPPVCESPLYRASVDEGAVVFDSPLIVKARDADTMSRISYRIRGSEQVESIFDIDRETGQIIIRPNATLDVTNLNSDQLIFAVEANDGLFTAHCGVNITVRDVNNHVPNFEQQSYSAVVEENSEIGTSVERVHATDLDTGKNAELRYRIQQGSFDDFGIVETTGEVFVSRKLDFDRRNTYQLQIQASDQGTPSLTGTATLTINVQNSNDKDPYFVPATQHAEVRADAPPGQLVYTLIALDPDVANHNALEFAGTDDITAIDKEGKELPHYDQFKEYFKISRNGKVSVNKQLDRNLFAVMRINVLVTDSTAPNVQQGRGLLIIQIIDVNKNPPMVEEQPVGTVLTTLQANDEDSSIGEFNISDNDYFAINQTSGMIYTIARLDYEVVKEVKFQVTVSDTGVPALTATADVVVDIINLNDNDPKFSQSDYYFNVTENSPRGTVAGKVEAHDGDVGVFGEITYTLIGENNKYFSIDAYTGNVMVANSSILDREQIKELTLSVVAQDKAPAAVQKSATATIHINILDVNDNAPVFTRDVYNSTVAENAAYQPPAALLQVQAIDQDEGLYGDVRYIITAGNEMGLFKLDAQSGIVYPAQSLSGKHGAYELTISARDTQGSGTMESTTKAIITVLRVNRHKPEFVIPALSNATIEIPGDIVQPDYLLLTVRAMDNDTEENGKVSYHLQVNNRNEQQTGEFKIDEVTGELRAKTQLNRKNRATTI

SEQ ID NO: 15334 - DNA, 2918 bp, DROSOPHILA
gattttcgcacggggtcataaacgcgtaggagtttagcacgtatcactatggataaatcgtatttgttcttaatttcttggttataattctctttgcatggcgctatatacatatttctattggggtccggcagcggatcgccgttcgttagcttcttctgaaatgatgaaagataatacttattgcacagtttataatattttggcttacttttagaacatacatttagcgcacctatgcagacatttgctgtacctatatatatatatatatgcataaaatacaaaagctacgagtggttcatcttataggcgtattctattgcaatttattcaatgcggagggctcaataaatatttaaaacaacaccagctaaggctgagaaacaattacaaattcttattttgttttttatacaacacgccatcgcggccccaggaattttcttcgtctcatccagttcccttttaagtagccattaaaaaaagactcacatcaatagaaccggtttctccaaaaaaaaaaaaaacagactcttactgccaaatttcaaatgcacataatcacattattatatacatattatttattcaaatttgtaattgtattttttgaatattttcacaaaacactttttaataaacataacacctaaaaaggaatgagcactttttaaaagcacgacaactggttttatttaatttttgtacgatgtattggaataatttattaattgttgacatatttaagaaatttaaagaaagtgtttatttacattattaatttttatttttattatcctttcaatttgcatttccaaagccgacccgacagacataaataaatgcatggagttgtgttcaacattgttttataaacgtttaaaaaaataacatttcaaattaacattcttttaagtcactttggacaattcaagcttaaaagtataaatgcacaattggtcagttttgattcattatttcatattgtatgttgcggttactggtgcttccagttgggtgggcgcttctcgaagaagctagcaatgccctctttggtgtcgcccagctggaaattttcgcacatcttctcctgcgcagccgaaaaggcttccgcttgggacatggccagttgcttgtagtagaactcttttcccagagagatgacggcacgactttttgcctttatggcattggtgatttcctcgatctccttatctagttcctctgcaggaacagctttggtgaccattcccgatatgtaggcttcttcaccagtaacgggaagaccggtcattagcatataggcggactttggacgcgacataatccgggcaactgcgactccgggtgttgagcaaaaaactccgactccagccctaaaaatataaattataacatgattaactggtttcatagagggttttcatccttaccctggagtagagaacttgctgttcttggtgcagactaccatgtcacatgacaccaccagttggcagcctgcagcagccgcatagccattgacttttcctagtacgggcaccggcagtctttggatgtcgtttataacatcggttagcttctggaacacacaagcctgtatcttggggtcattgtgcaactccttgagattgtgacctgccgaccagatctttccttgggccgtcaggaccacgcatctcagatccaagttgtctttatcttttagcagggcgtcctgaagggcacacatcatgtccagtgatagggaattcagagtttttggatgattcagcgttatctctcgcactccgttatgctccttgaccaggaccaaatcactgggtccattgctggtaaagcgaatgacctgttgcacgcaacctgttgcatattttgatatttttaaggagttgtttaaaatacgcaacatttttattttgatttggcagcaagtgttggtaaattcgccgcccaaacagctggttatctatcgaaacagctgcaagtcgatagcaaggcgcaacagttgtcaaacggtcactctaagccgcaatgagtttgtacgattaaaagtttatgtctattcgcgtttttcgaagctttcccgattcccgtagctgtcccactgtacaggtgagtaaccgctcaggtgcgtcaacaaccgctgccgttctttgtccatcagctgagcggtcagacagaacaacaacaaagccagaagctcgcgcgccagcctgtgtacgtagtaaatctatgtgactactacaaaagcagaactttatcagccaccaaagccatttgttatttgtcgccccacattcgcggccccgccaatcagttaacaaatcgaaccacgcgagtgcggatcccccgacttgagctccactaaaacgtacaccattaaattaccacattccagcttgccacacgatgcgtccgttctccggcagcgattgccttaagcccgtcaccgagggcatcaaccgggcgttcggcgccaaggagccctggcaggtggccaccatcacggccaccacggtgctgggaggcgtctggctctggactgtgatctgccaggatgaaagtgagttggtggtgtctatgtgtgtgatagatctcctggaattagttctaaacaacaatgcctttgctggattttcttcttgcacagtttatatgcaatctgcaagaaaatatgacaaaattcgacttaaacgaaagttggacttatataaaacagtgtcaagtcatcacagtcagccgatttcatttatttcgtgcttgcagggcagggcacgtcaattacctaaatccatcaaactatcttatctgatgggtgcgttgcttataaacatagctagacttcttctcttacaattttcctaaaaaacgctaatataaaacgtatcgtacaaagagaattcacctaagaa

SEQ ID NO: 15335 - DNA, 861 bp, DROSOPHILA
aaaatgttgcgtattttaaacaactccttaaaaatatcaaaatatgcaacaggttgcgtgcaacaggtcattcgctttaccagcaatggacccagtgatttggtcctggtcaaggagcataacggagtgcgagagataacgctgaatcatccaaaaactctgaattccctatcactggacatgatgtgtgcccttcaggacgccctgctaaaagataaagacaacttggatctgagatgcgtggtcctgacggcccaaggaaagatctggtcggcaggtcacaatctcaaggagttgcacaatgaccccaagatacaggcttgtgtgttccagaagctaaccgatgttataaacgacatccaaagactgccggtgcccgtactaggaaaagtcaatggctatgcggctgctgcaggctgccaactggtggtgtcatgtgacatggtagtctgcaccaagaacagcaagttctctactccaggggctggagtcggagttttttgctcaacacccggagtcgcagttgcccggattatgtcgcgtccaaagtccgcctatatgctaatgaccggtcttcccgttactggtgaagaagcctacatatcgggaatggtcaccaaagctgttcctgcagaggaactagataaggagatcgaggaaatcaccaatgccataaaggcaaaaagtcgtgccgtcatctctctgggaaaagagttctactacaagcaactggccatgtcccaagcggaagccttttcggctgcgcaggagaagatgtgcgaaaatttccagctgggcgacaccaaagagggcattgctagcttcttcgagaagcgcccacccaactggaagcaccagtaa

SEQ ID NO: 15336 - protein, 285 aa, DROSOPHILA
MLRILNNSLKISKYATGCVQQVIRFTSNGPSDLVLVKEHNGVREITLNHPKTLNSLSLDMMCALQDALLKDKDNLDLRCVVLTAQGKIWSAGHNLKELHNDPKIQACVFQKLTDVINDIQRLPVPVLGKVNGYAAAAGCQLVVSCDMVVCTKNSKFSTPGAGVGVFCSTPGVAVARIMSRPKSAYMLMTGLPVTGEEAYISGMVTKAVPAEELDKEIEEITNAIKAKSRAVISLGKEFYYKQLAMSQAEAFSAAQEKMCENFQLGDTKEGIASFFEKRPPNWKHQ

SEQ ID NO: 15337 - DNA, 3090 bp, DROSOPHILA
gaagactctgttttataatatttgttcaaaatttcatttcaagatgctgatattttttttacaaacgtacataaattgtcacaagtctgacctattctattgtactctcagttagggtataacaatggaatgcgaatggataattagcatgtcggtatttccagcattcaaaatgcttagttgcagtccgccttgcagcataatttatgtggggactgcacctcatcaccccagcttccgtcttttgtcattgagccaaaatacgccccccaatgatgactgaaatattccgtcgcgtttttgtctggcacaatagagcgatttcaatttaaacaatcccaaactcattcaactgtaccaacgcattgttttgtaaattgcgtcagttaatacaaaacatacatactacattgatgtctacaattctggtcaaaatagtatagctaaagtttattctgctctcaaccaaattctgatcctattttttttgcatatcaatgctaaatctaaagttcaatagttgttgttcattacacatgataatagaatgataatagttaaaaacctaaaaatttgagcactaccgtagttttaattgtcgcgttgatgcagttcgattggaataaaccccataatagttagccattgtctttgtcgatattgttgctcgagttgtttttgcatgttgctgctgcttacttaactgtcttgatgtaaacaatcatgttgtacaaaccatgtgcgccagtcggtctaatcgaatgtcaccaatttctctatttcccgtcccgctaacaaacaaatcccccctctttgacaatacagatgttgaacgggctgcttccgccagcaatttgaaattgaaaacgcattggataaaccttagcgcgcaaaccaaaagcaataaaacgccaattgaagcatttatattagattgttaaagccaaccggcgtagcatttacttgcctgccccaaaaaagtaaaaaaaaacaaaaagaaaagaaaagaaacccttccaacatcccactaagcaaaactaaccaagaaacgcattgaaacgcattccaattagtagctgcgggcagcacattgcctgcatatacatagtcgataaggtgagtttggctggcctaataagccggtaaaaatacccctacccccgcaattaatcacaattatcatgcgcgcagtgttctacgtccaccagcggagaaaatggcgccgaccacgacgattgagaccatcacaatcacgaggccgctgaaggtatgcatttggcctaaagtttcggaaacgtttacagattgcaccgactgatttctctgccctcacaggtgattgcatttatctgcggcgtcatcgtggtggccctcatgattatggctctggcgtccacagattggttaatggcctcagactggcggcaaggtctctttgtgcactgcatcgaggatgattcggtgccgccgctgccattcaatatccaggatccgccaggatgctactggacccgcgatgtcggtatgtattgcatgaagaaacagcaatcttaagctcgaatttaacatataattcgtataatgtcccttaggctacattaaggccacagccgctctgtgcatcatcacgctgataacggacgtcattgccacagtactgacaggtctgggcctccggacgcagaatcataatctaaagtataagttctatcgtatagcagtattggtgatgcttgtatcctgtgagtaactagctgaacttatgtcagaatcacatgttaaatataactttttcgcagtgctggccgtattgtccgccttgatcgtatatccagtatgctttgccggcgaactaaccatgggtatggtagcctgaaaccttgatgttgaacttctttccactgacttgtattccatttaatgttatagccaatcgacgagtctgggaatttggctgggcctatggcgtcggctggggtgcggccatctttctatttggggccgttgtcctgctgctctgcgacaaggagtcggaggagatctactataaggaaaggaaaatcgtacatgaaaaccaaatgcgcgcctaggcaaggccgcacgacctgcctgacgtcgttctgtagaataagtatatagcaaccaaccaacaacacacacagacacacatagatttcgatttaaatcagactcaagaacagaagcaatttgcagctaagcgaatgtgttacaattatgattgtgtatatcatgaccatttcaaaccaaaaatccgtagccatcttataaaccaccccccacccaccatcttatagtactcggcatttgtttagatgacgttacacccaatgagttgattttgtgttcgttcgtttcgaaaggtaatcgtagacaagccacaaacacacgacccacatctatcatgtagtcagtcagtcagtcagtcacatgtatgtacgtctaggaattctgaaagttaatcgcattaaccaaaaacccctacatatatacaactgcatgccacatgagttccccagcattgtaggcaacttttagagcttgcttttccgtagaaaactgagagcaggtgccagttgaaattagacctcttacaatattgtactcatactcgtactcagctacattatacatagcaatgtactccccatgtatctcaatcctaatcgtgagcagaatccaaattagaatttgtatatgaacgtaatcgagggaataggtgtaaccacgacatataaagccacaatgtcagccacatcgtcattgtcaacgtttcatgccgattacgctttcaaaatatttgttctccatttgtgctccatatgtatatccgtttcgaatattataaattatgtgtttgtcccagtgttttgcgcgatacacaacaccaaatgtactcgaatatatgtgttgctcttttaccttttgtaaaatagttttaccaaaccagtccagtactcagcttgtacttgtactaatgtccccgagccgttcagttatatgttttaagccaagccgacttttaagtataatcactcgtttgtaaactcctattttgtaataatttattga

SEQ ID NO: 15338 - DNA, 728 bp, DROSOPHILA
aagaaaagaaacccttccaacatcccactaagcaaaactaaccaagaaacgcattgaaacgcattccaattagtagctgcgggcagcacattgcctgcatatacatagtcgataagatggcgccgaccacgacgattgagaccatcacaatcacgaggccgctgaaggtgattgcatttatctgcggcgtcatcgtggtggccctcatgattatggctctggcgtccacagattggttaatggcctcagactggcggcaaggtctctttgtgcactgcatcgaggatgattcggtgccgccgctgccattcaatatccaggatccgccaggatgctactggacccgcgatgtcggctacattaaggccacagccgctctgtgcatcatcacgctgataacggacgtcattgccacagtactgacaggtctgggcctccggacgcagaatcataatctaaagtataagttctatcgtatagcagtattggtgatgcttgtatccttgctggccgtattgtccgccttgatcgtatatccagtatgctttgccggcgaactaaccatggccaatcgacgagtctgggaatttggctgggcctatggcgtcggctggggtgcggccatctttctatttggggccgttgtcctgctgctctgcgacaaggagtcggaggagatctactataaggaaaggaaaatcgtacatgaaaaccaaatgcgcgcctag

SEQ ID NO: 15339 - protein, 203 aa, DROSOPHILA
MAPTTTIETITITRPLKVIAFICGVIVVALMIMALASTDWLMASDWRQGLFVHCIEDDSVPPLPFNIQDPPGCYWTRDVGYIKATAALCIITLITDVIATVLTGLGLRTQNHNLKYKFYRIAVLVMLVSLLAVLSALIVYPVCFAGELTMANRRVWEFGWAYGVGWGAAIFLFGAVVLLLCDKESEEIYYKERKIVHENQMRA

SEQ ID NO: 15340 - DNA, 5650 bp, DROSOPHILA
gtcgggtgcccaggccgttgtaagtggttggggcaagcgggctgaagatgatgaagctctgcccgccatgctgcgcgccgttgagctgcagatcatcgagaagagcacctgcggtgcccagtatctgaccaaggactacacggtgaccgatgagatgctctgcgccggctatctggagggcggcaaggacacctgcaacggcgattccggtggacccttggccgtggacggagtcctggtgggtgtggtgtcctggggcgtgggttgcggcagggaaggattcccgggtgtctacaccagcgtcaattcccatatcgattggatcgaagagcaggcggaggcgtatctctaaaaatgtggatagcttcacaagcacaacgcgaacaaataaatcgaacaaattattattttaccacaataataaatatgaaatgagcatttagaaaacatggtttataatatatttacaaattaatatacggtgtttaactcttcatttcaactggttttcctaatcaaaaaccttttttatctgaccattacattggaatctataagccattctcgacgatttatataaaaataaaattattacccaattggcataggtgaaggcaatttatcttgaggaagggaaaaagtacaatgtaactaaccataaattttatactttacaaaatcgtttgattgcatcattttagaataactcaatgcagaaattaaaattataaaatatgtaaatgtggcttgaagtatcattattatttatttgtgacatttatatttgacttgatgcaatcaaataatatccacaatattagaaatttaccgtttgcagatagtttaacgtattcgagtaagattacatttgtttaaatcttaaaaatttaaaataattaggaagattttgtttttaaatattaacggcttctggtattttttagagctagtatatactttcgtggtagacgtcgctggtatttaagccagtaagattcagccacactgacaaagaaaatattcgtgaaaattctgcatacggaaagaagaaaattcgagcaacagaaagccaacacaatccacaaaaatgtctttattcggagcgttgatgggtgatttcgacgacgatctcggccttatgaagtaagtaccaaatggcgcaaaaaaaaactaaataaatgcggctcgccccgcagaagccccatatatttccatacgtgtgcagctaacgaagccctcttggggcgtggaaaaacagccaaataatcgcaaaacaaggtgtaaatcattaattggcccataggcacacaattaggccaattaaacatatttacgtgcccaaaaattagcaataaatagcgtgccaaaattaacagtaaccatcggagtgtgcgtgtgtgtgtgtgcgcagcatgcgtgaagtgaagacgtaataatcgataatttgaatcgagcgaccgcagggaaatggaattggggaaaatgcactagcaggcgttatttcaaaggtttcgccctgtcactgggacttttgataaggcccaaccgcaaagtgacccatgtaaaggcaggctatcagaccctattttatgtatatacgtaggctacgctgcctttatcactatactgcgatatttggccacaagtcatttagtttggctttgtttaaaacttaatttcggctcagtttaaaatgaaacaaaaacgtaaaagcaaatcaaaccgttcacaaatggagctccagtaactcgcacatcagtcaagtatcactaagttactcatctttcgtttgcagcaaccacatgaaccacactatgaacgcgatgaacatgcagatgcgctcgatgaatcgcctgatgaacagctttatgcccgatcccttcatgcaggtctcgccctttgaccagggattccagcagaacgctctcatggagcgtccgcagatgccggccatgccagccatgggcctcttcggcatgcccatgatgccaaactttaatcgcctgttgaacgctggtgagtattcaatggtctttcgccgttaagagcaccatacaaaaccattgtatttcagatattggtggcaattcaggcgcatccttctgccagagcaccgtgatgaccatgtcatcgggtcccgatgggcgtcctcagatctaccaggccagcactagtaccaaaacaggaccgggaggcgttcgtgagacccgcaggacggtgcaggactcgcgcactggggtgaagaagatggccattggtcatcacatcggcgagcgggcacacattattgagaaagagcaggacatgcgctcaggacaactggaggagcgccaggagttcattaatctggaggagggagaagccgagcagtttgacagggagtttacatcgcgcgctagtcgcggagcggtgcagtcaagacatcatgctggtggcatgcaggccatcatgcccgcccgtccagcggcacacacctcgacgttgaccattgagccagtggaggacgacgacgacgatgatgatgactgtgtaatccaggagcagcaaccggttcgctcctccgcgggccgccattattccagtgcgccaacggcaccgcagaacaggtgagtgagaagggattaacgtcacatctacacccgaatccctgttccgtgcgcgtgattgtgtaggattagccgactagcatttgctgaagcccgcccgatccgaagattcccccaactaaccacacctcctcctcacacaactgttgctaaattgaaacgtttgtatttacttgcagatataattactaaatctaaagtcaatacagtatattttactaactatccgataaaacagaaacagaattgcatactataaatttctgctaattacattcccaactgcgttcaaacgaaacgaatatcgaatcgaaatcatagaatgcacagaggtaggcggcaacttaagctctcaacatctttcgtttgttcagttttcgttttgcccacgacttatttcgttcgccatgatctctcacccactcacgacgtacaaatgcttcgcgttgaatgaactggatcgccaactagcatagtcccagacccccaaaagtattgttgtaatctttttcaacttttcttcgactcgattccatactacgacaactacctacgacatcgacgcagtggcaacattgcaacagcagcagcaccaacaccaacatcctcgccaacaacctacgatacaagcaacggaaacaacaataactacgtgagctctcgtcgttcgtacctgcgaaatgggcatgggcatagcctggccacgccgcgccgcccactaaggacacccccatcctcgccgctggctacggtgtccacttctccaaggtttgttcagttgggatcggcaggagccggcaatacgggattaacctagttacatagactatgtcagcttcgaacctcatttctatctgcttgtatagtcctaaccgaaaaacgtcttcggacagccgaagtttgatgccggggttttgtggtccgacaaatggttgacaacgcttttgtaacaacaacgttaatgatttattgaaaccaatactgcttattcttttcgaactcgacttcatgggtagcaacgatcttgatcttctaatataccatttacccaagtgtattaacgacatatcgctctctcttctcttctccatcaacattttgtactttccaaatcatgcagagattggcgtatttataattcgcggtaccaccgcaagtagagcggatacagtaccaaatacataaaatgaaacctatgctaatccagataaatatcataagtaataaagtcaacaacgagaaacactcgacattcggctgtcttcgacgtaactacatgcactctactaaccgaaggcgccaccaacgctacgatccgctcagctcagctccgcttcatcgccacaagtacttcgaacttcgaacagcagcaacaccacatctacgtgccgtgccggcagctcaagactatggccgcaagctacgtgtaaggccgcaccttcccatacacatctaactctctgtctgcatactcgcattttgacccgcccgaaagagcatcgcctgcctatccgtatagcatgtagaccgcaatctgcgagagccacactcgacgatataccaccacactacgcgacgcccaattggccatcgacgataatcaaaatttgaactatgttgctgctgctgttgctgcgccaccactgaacgacataatgcgcgaatcctacgaatccatcactcgcttgcccacatcatccattaatgctccctttgaccttctcttcctgttaataaattttcacttgcgttcgaattggcctgtgtacgaatgattattatgtataccttttgttttgtattgtgccttattctaattaatcgtttctgttaattaatgaacatttgtttctgctccgccagcagcatacatccacatccctatgccgccaatccgaggcgccaacaacgtgccgtaaaacattttcacacggaggacgaagcggccagctcctacaaggcggtcaagcgcggcaagaagaagtagtagaaacgtgatcatctgtatgccaacatcttccgcatcgcacactcaaaaacactaggaagcaaagcgttgggttctgttccatagcaggaaaaccaattcaaatattttttaacaaacacaattctttaccagttctgtcttatcctgcgtgagtcgaccagaatgcaacactaaaaaatgtacaacttcaagatgctattgatgtgcacgcaggatacagaacaacttgcttaaatttacttaaaacaaatgtgactattcaacgccgaaatcattacaacacacactctcagacctaatcgaaaaattcaatgaaagtaatggaatatatatgaaatcgtaattataagtttgaattatttgattaattctcaagtttttagattttgttagccactaagctttaaattatggatgccagttagcgtgcaaatgaacacaattgatttgaaggctccgaacgatagaaaacaacaattaccaattccccaaatacatgtaattcgtaaggcctaagtaaatgttaacgtgaatttaattaaatggtaattacattataatagtaaatccagtgttctacttatgcgacttatagagaattaaacgtattaactaactagtccaccatctccatttgcgtctcctcggattcccgccaaatgcgctgcaccatctctaccagctgcttccagagcgccgtcttacgcaggaagttggcaaggcagacgagaataaaggcccaagccaggcccaaatagtaatccgtctgcacaatgggtttattagacagcggctccatctctgcgcgagtgaggatgatcggatcaatggcctgcggattcacagtcttcatattggtgtgactcattatgaaactggcaaagctgctctttgtgtccttccacccgggctcgaatttgattagcggcctgccctggtggaatagcatcagtgtgggcagcgaaacgatgccgaattctgcattgaaacgaccaaactcataggcatccacataggcgatgggtagcgtgggaaagtaatggggcagcacgtt

SEQ ID NO: 15341 - DNA, 1074 bp, DROSOPHILA
ccacactgacaaagaaaatattcgtgaaaattctgcatacggaaagaagaaaattcgagcaacagaaagccaacacaatccacaaaaatgtctttattcggagcgttgatgggtgatttcgacgacgatctcggccttatgaacaaccacatgaaccacactatgaacgcgatgaacatgcagatgcgctcgatgaatcgcctgatgaacagctttatgcccgatcccttcatgcaggtctcgccctttgaccagggattccagcagaacgctctcatggagcgtccgcagatgccggccatgccagccatgggcctcttcggcatgcccatgatgccaaactttaatcgcctgttgaacgctgatattggtggcaattcaggcgcatccttctgccagagcaccgtgatgaccatgtcatcgggtcccgatgggcgtcctcagatctaccaggccagcactagtaccaaaacaggaccgggaggcgttcgtgagacccgcaggacggtgcaggactcgcgcactggggtgaagaagatggccattggtcatcacatcggcgagcgggcacacattattgagaaagagcaggacatgcgctcaggacaactggaggagcgccaggagttcattaatctggaggagggagaagccgagcagtttgacagggagtttacatcgcgcgctagtcgcggagcggtgcagtcaagacatcatgctggtggcatgcaggccatcatgcccgcccgtccagcggcacacacctcgacgttgaccattgagccagtggaggacgacgacgacgatgatgatgactgtgtaatccaggagcagcaaccggttcgctcctccgcgggccgccattattccagtgcgccaacggcaccgcagaacagcatacatccacatccctatgccgccaatccgaggcgccaacaacgtgccgtaaaacattttcacacggaggacgaagcggccagctcctacaaggcggtcaagcgcggcaagaagaagtagtagaaacgtgatcatctgtatgccaacatcttccgcatcgcacactcaaaaacacta

SEQ ID NO: 15342 - protein, 288 aa, DROSOPHILA
MNHTMNAMNMQMRSMNRLMNSFMPDPFMQVSPFDQGFQQNALMERPQMPAMPAMGLFGMPMMPNFNRLLNADIGGNSGASFCQSTVMTMSSGPDGRPQIYQASTSTKTGPGGVRETRRTVQDSRTGVKKMAIGHHIGERAHIIEKEQDMRSGQLEERQEFINLEEGEAEQFDREFTSRASRGAVQSRHHAGGMQAIMPARPAAHTSTLTIEPVEDDDDDDDDCVIQEQQPVRSSAGRHYSSAPTAPQNSIHPHPYAANPRRQQRAVKHFHTEDEAASSYKAVKRGKKK

SEQ ID NO: 15343 - DNA, 7864 bp, DROSOPHILA
cgcgtgaaactcgtcgtacgcttttttttaatgctcttcttcgtttctcttcttctttttttgcatacactttgcgcacacacacactgacagagaggcacactcgcacacacaggcacagacagagagcagcgcacacagacgtacactcgaacacacacacacacaggcacgcactttggttgcttgcttgcgttttttttattgcctgccttcgctttcagttattttcactgggttcttgtgcgattttcggttgctttttcgcggaattttcagccacacggcgcagccagcgtggttgcgaatgttttcgccagcaaattacaataattggctggccaagatgcgtgctttttgttaaaaatcgccactacgaatttctccgcgaagaagccaccattttgtaaaaatatatactttgcggggtctggcaaggctggcggtggcagagtggcagcattgctggtggtcatgtgctaaataagccagcaattgttgtgtagccaacagctttcgttggtgagcactcgtaagtttgtcttttgaaatggtaatttatttgtttaaacaagacttaaaaacttctaaagcatatgttaaaaaaataaatgatatatatttaaacattaatatatggctaacagctgtgtttcagattttctatgaaatttaatacgatgaaagttggagtttaattggttaacagtcgatctatattaacagtttgtcgcagcatattgtgggcttactttaaaaataaattgcttaattttcgtcctaataggcgaaaaattcgattccacaaacttatatttaatttttaaaaatccaactgattgtaaaatatccctattgtaaattaacatttctgttagaacagtgaacaaaagcgccatttcggcagaagcgactatcgactctgcgcctaacatcgatagccacaagaaatctaccgacgcaccaccactattgtttattttgtttttcgtcgtttttggattctgatttaaatcacctcgctgcgaaaatcgggaaattctaaagaagcgcgtcgtctgtttaaattctgagggttcgcaaaatcgctggcatttaacactaccaccaaaaaaaaaccaaaacaaatcaagagctgcgaatctacggatcctcaaaatgtgcgacgagtccattgaaaatgtggagcatcaaggtaaaaattagtaactccgattcccgatgttatttgcccaactcatttgtttggccattaagtagcgcccaatatttgcatagaaaccagctcaagtgcgttaaaatatcattaggaaaaggcggcggtggggggtgtagattctttggttgatggtaaaaaaagggtaagtgggggtaattgcgcgtggattttggcgattaattcggtttaattggaacagaaagaatgaaaagagtgagctaaatttaggcaagtcaggccactcgagggaatcgcttgttgtttgctgaccttttctgcaaatcaggacagctgcacttcttagcgcagaaaccaacatgcagctgggaatgcactgaaaaaaagtgggggaaataagtctgattatatatgtgatacattaaaagtgtaactttgagtgagtaagcgtaagagtaagtgtatgtgtgcacgagtgttttggccatttccttcccgttcacttcacacattcgatttccgccaattgttgttctttgacctcttcttcctgcttttctgtcgcaatattaaaaataatatttgttcatggccatagctaagccaatttcgaccacctaccgcccacttttgttggccaccgcaatcgatggttttccattttccatttttaccatttcgccgactttgtcgccattcgcgtgacttcaatgggtttcgcttatcgcttttcaaacggcgctcgacccgagtttttatcagcctgttgcagcctgcttaaattgtcttagattaattttaatttatgatctcctgacagaagttaatgaattgtggccagcaagcagcgtatggaaaacgaaaatagttttcatttcgcgcttcacacactttcttcatcaattagcggctatcagaattttttttttttttgtttttgagcggcagtttcaagtggcagttatattcgatccattttggtgaataataaaattattgcgaaagcaaacacgaaatgcttaaacgtgattaacagatctttagaattattatactattgtttttttattattattattttttgcttacctaatgtgcatgtttgtttgtatagtacttaataaatttgtttctccttacgcttatcgcctagaaatgcaaattgtgagttaaagctttttattgtttgcccagcgttttcatgggcaatgctaattgtaagtttatttggcgcccgccccaagaattagatatccaacaccccagagataaaaaacaacaacaacgaatggggctgattaaattgcatttaccgccagcggaggtttccattgtggtagtcactattttttttattgttatgtattctataaagtgatatgcaattgtgcaatcctcatgtggcgggctatttatagactcgttgggaaacctgcgggcacgttgtttttgttgcatgaggtagcaatgctggggatgctattgccacgcctccgctcccgggtggccatccaacgcccacaaggcgttcgttattgatatttgtcttgttggtgtttcaattgttttgattcgagagggattctgaaatacataacttacaatactgttatgcatgtttgcagttcgttctcgtttttgcatttgcattttgcatatggcattttatatattctatagtcgatttggcacgtacggcgattggtggcctttttatggcatccccccaactgggggtagcaactgcattagtattagttagggggcagacacacaagcacaccgtccagcaataaaagtatatgaacatttgaatttggcggctcgaaattatataattcatcgtgtgagggtgttgaaagctggacaaattgggcggacatgactaagaacacacttaatatggaacttttatggtttcctgtttctaaaattgttgaaaagatggtgaataaagctggttataaatagaaaaaacatataattagcaccagaccttctaaaaaccttactaaactcgaatgaatttttaaatgccatctcattatagatcgatatattcaaaactcgctagaaacattagagtatgcatggtttatggcgtatgaaaagttggtttcttggcttgtctagacccattttccatgctttaatttcgagtaaacgaaccaattgagctatatagagaaagccaacgagaattcaattggtggacaatctgtcagatatgcatcagataatttatctctatacaaaaactctgtgtgccgtaaagaaatcccgaaaaaaaaacgtgccattgctcaaatttgaatttgaatttgaatagcaatggcagttgattgtgaatttccattaatggttaatcaatggtgattggagggcacgtgagactgcttttttcagtcagccagatttttaagtgagccgcatgatcgccaagtgagaattataggaagaccgaatgacattggcattgtgaaaatgctgccttcattgttgtggcggctttaagcagattaagctggattacaataaattgcttacatactgcgaagcggccaaggagcaaccggaaaattgcttcaatttcgcattcgtctgcgtttatgacaaaaatgaaataaataaattacacataaaaatcatgtccatttcctgcacattaaagtgcaaaattgaattattacgttccgctgagcgggcgatcgggcaaataaacaaaagaattcggtcgagaagaaaacgaaaatataatatcaaccatttgcgcagacattccacattccaatcgttgcgacaccagaacaaaatgaaatatctatttgaagtcgcaaaacaaacgtacaacacgtttcaaatcgataagttagttcaaaattgaataaacaaatgtagaaatgcaaccaaatgcaatttaaaataggctaataaaggcgaaagcttctcacaattatgtaattatttgtatcagaaagaacagatacgtttatgaaacgcactgtctgaatttccaaatttttgtaggaatgaacaaactttttagccgcaatttccgatgccagtgccatgaccaactagtcaagggttttatttttagcatagtctcgacttttttttgtggccaggagatatggccaacaatatctgaggcaatcgcctatgattaactaggtgactttgtagatatcttagggcattgctcggttgagattgaaaatctaattagaagcaaacgagctgttaaattttaaaagctgtagaaacatttgtcaacgatttgttaattggaaagtaaagcaggcgatctattgaaatccatttacttaattttactatgcaataccttatgtcagtcattagcaaggcgcgctttagttagtttctagcgctaaatataaatgtgatttatatagaaagtataataattctactcaaaatacaaaaaactcgctgaacaaatcactcaatcaaatataaatcaaatatatttcaactaaagttatttgcttagtttatttgtaaatacataaaacctgtgatttatgtgtgaaaaatttcgcgtttatttatttgtattgtgcatatgtatatttttcaacaccttgtccacattttttttggcaatgcttcgcttattcatcattgttacctcacaattgccatgtgttggcaacaattaaatgctgccagcagatactttatttataaattccatccaagtgcgtttgtcagcgcgaaattcgacgtcttaaatctctaaacatcattccgtgcacttggtcccaattgacccaattttaatgtgatttaagccctcagagagtccagctgcttgactcaccattcatccatctgttcttacacagtgaacaatttaaaaatatttttttaatcaatatttatcgatcgatattaagatattgaactttatataagaactagtatgacaaattattaacaggcaatgatagttatcaatgatatataataccaattatattagttctcaaatcactgctatttttctcactgtgtaaggaagggaggaagtggtaggggcgtttaattacacgcttacacgcaatttccgctgcaaatgccgctgaagggaatgggaatttacttgaggcgggcccgagacttctgtttgcttgcttgtttgtttatctcggaatatttggaatattttacttactagggtaatttcactcgattttacctgtctacctggctgaccttaggctccgcggacacacaatttatcattatttaacaaataagattctcaattaaagtctgtgcaaatttacaatttgcaaacatgcaaacatcagggaaactgcgtaactagtaaaaggtcaggcttaaagatggcttgtgaaattccagatacgactgaaaaacatgaagtaaaggtttatataattaatttatacatagtagctagagccttactttgaaactctaaatgtaattaaaatgtattactttccaaccatgcacaactatagaaccaccagtccttagatgtatgcatagatttatatttatagatttatacttattgttttttttttaaccaaatctaacatccacttttcttttttcaagaccaccatgtgcacttcgacacgaacacggtgaaggatgacttcgaatcggacagctgtgtgacataccaaaggtctggtgacacgattgtggtgagcctgggctttctgcagatcaggcatcgctatctgatcgaactgaagctgccgacgtcgctattcggcgatgccaagacgctggccagcaaatttgagccggtgattagcgccacgccgagcttgcactgcaggatcacggagttcgagggcaccaagcatgatgagcacgactttttcgaaatgaaaatcgagttctttgcctacaaggagaagctgttgcgcgaggtcctgcacattgtcagctcatcgaacgccaaggagctgctacagctggtcatagccgctcgggtgttgggcaagggcaagggtactcctatgctgcggactggaatccattgcatcggcgtcgagagggatgacgatgagtcggaggcgtcggatttcgctggcttcgacagcaagccctaagatggcaacccaattctcgccttgccgcaacttgttttcttagttaattgcaaatatctgcatagttcttaagtgaaagagaagagaataatatgtaacattagttattacctacaagttatcgtgtacgtaaattcattgagcatttacatttagatttcggtttcacttttgcttcgtgtacttaacatttgtaaaataatcgtgtacgtgtttgtgttacacgtgagtgggcgaactgccaaatatacttgacatttttattgatattcaagaccgtgttatgtcccaaattcttgattttgccactaagattaaaatgttaaacagtttgtcttcaaatgaatattgaaatgtattaaagccatgtaagctgaggaaatttcatgcccttttaagcaatggacagttttaatagcctatagctaaacgggtttttaaaattttaaaatttcgctgtacatacataaagacgtatttatttatattccatataaactgcaccatacacaacaaatattgtcacaaaaatatatgtttgaaatatatccctagaacaacacagagaccaaactttggaccttttgcaaatgtgtatagaaatgtaacgcaatccaggcaattaaataaccctaaaatatgcaaaaccagatgcaatttaatgtgtgaccaaatcgaagtgctcgtaacgtaaaaattataaacatgatattaaatctttttaactacaattagcccgagatttatatttagcgagggcgttttgataatctattcatgttgataacattttgcactgtcgaatgtataaaaggcaccgtaaccaattaactagattttgtaaattgtaatctttaaaaatctgttcaaggataatcaatttatcagcatacatatgtattggatcccattatcatgcaaaataccatttaagttaattatggattaagcaaccaaggagctgctgaaataaaattcgttaaaagacccaggaagacgtaaaactaatgtgattttctgtgggctgctaaaaggaatctaaaaaagggattttttgtgttttatgttttatgtgacagaacttccgaaaattaagaattaaactaagtgaatacacttctgcatttttgggggaattccaattttacaaagataataacatatcttccatatttatttatcagaacaaataaaactagtttcattttttaaatcaatatattgccgcttaataaaaggcgaaaagattttggggttggcttaagttagaaatagctagcgatggttcttgtctcgaatacgtacagtttaaaattaaatatttagatgtaattttcttagtaataatccatttaattacataaattgcttttgtttattattaaaactaagaatattacataaaagtcacatacaattcatattttataatttgcagtgatagcatagaaaatgacatagatgtataaccctgcacttctactacttttagacattgcattaaagatagtccctttaactgaattaaagttaaatcgttatcttagataagttttgattatttaaa

SEQ ID NO: 15344 - DNA, 1268 bp, DROSOPHILA
gattctgatttaaatcacctcgctgcgaaaatcgggaaattctaaagaagcgcgtcgtctgtttaaattctgagggttcgcaaaatcgctggcatttaacactaccaccaaaaaaaaaccaaaacaaatcaagagctgcgaatctacggatcctcaaaatgtgcgacgagtccattgaaaatgtggagcatcaagaccaccatgtgcacttcgacacgaacacggtgaaggatgacttcgaatcggacagctgtgtgacataccaaaggtctggtgacacgattgtggtgagcctgggctttctgcagatcaggcatcgctatctgatcgaactgaagctgccgacgtcgctattcggcgatgccaagacgctggccagcaaatttgagccggtgattagcgccacgccgagcttgcactgcaggatcacggagttcgagggcaccaagcatgatgagcacgactttttcgaaatgaaaatcgagttctttgcctacaaggagaagctgttgcgcgaggtcctgcacattgtcagctcatcgaacgccaaggagctgctacagctggtcatagccgctcgggtgttgggcaagggcaagggtactcctatgctgcggactggaatccattgcatcggcgtcgagagggatgacgatgagtcggaggcgtcggatttcgctggcttcgacagcaagccctaagatggcaacccaattctcgccttgccgcaacttgttttcttagttaattgcaaatatctgcatagttcttaagtgaaagagaagagaataatatgtaacattagttattacctacaagttatcgtgtacgtaaattcattgagcatttacatttagatttcggtttcacttttgcttcgtgtacttaacatttgtaaaataatcgtgtacgtgtttgtgttacacgtgagtgggcgaactgccaaatatacttgacatttttattgatattcaagaccgtgttatgtcccaaattcttgattttgccactaagattaaaatgttaaacagtttgtcttcaaatgaatattgaaatgtattaaagccatgtaagctgaggaaatttcatgcccttttaagcaatggacagttttaatagcctatagctaaacgggtttttaaaattttaaaatttcgctgtacatacataaagacgtatttatttatattccatataaactgcaccatacacaacaaatattgtcacaaaaatatatgtttgaaatatatccctagaacaacacagag

SEQ ID NO: 15345 - protein, 180 aa, DROSOPHILA
MCDESIENVEHQDHHVHFDTNTVKDDFESDSCVTYQRSGDTIVVSLGFLQIRHRYLIELKLPTSLFGDAKTLASKFEPVISATPSLHCRITEFEGTKHDEHDFFEMKIEFFAYKEKLLREVLHIVSSSNAKELLQLVIAARVLGKGKGTPMLRTGIHCIGVERDDDESEASDFAGFDSKP

SEQ ID NO: 15346 - DNA, 2944 bp, DROSOPHILA
gggatccagtccagctgtgggaggagatggtaaccgacaacgaatgcctaagcaactgcaaactttttgtgccccacgacgtgaacctgtcgcttgtgcagcagcgcgacaagatgttcaatgccatcgatgccgtgttccataagccaacggagagcataagcggaagtttcaaggtctcctcgacggtgatatgcaacgacctgccgcccatggagcccggcgaggatcatagggacagggatctcgtcacctgcacctattacgttaacgaagcgtccaggaccgacatgttggcctgcaccatcagcgggcaggaggccatgatactcgagtttagtcgagcgggcgatgaatgcgtgcgctgcactagaattacactggagccaggattatttacaacatccgtgtccgaagatttctgttacctacgcttcgtcgacctgcagttctacaatgaatcttcgctatcgatactggcccagtccataaatgcgggacctggcatgcgaccgcatagcttctttatacaattctcactgaccgcggcgctgaattacagcacacagcaccgaatgggaccgttggtcaagctgagcgaagccaccgtgtcgcaaagcatccatgacattgccgatggtgccgccttcaagggactggacggatttagcgacatgttggccgtctcgggcagcaggaaggtggccaccgttctctccgatcgcaagcgcaagatgaccatttttgagatggaaatcgaggaggaggaggatgacacggaaatgtcccaggcctcgtttctggacatcagcaaagagtctgtgctggctggcgttcccgatgcggagaaacaggaggcgtagtcttgaatctattgaatttaaattatattgattgttgtgtgataacttaaaatgtttccaataattttatattttacaattcgtaaaggcattggtggtagaaaagaatggttaaaattcttgttacgatttgtccgttaaaatagggctgaataaataatctgttacaaagtgcttttgaaccaaccaactcatcgatagctcttcgataaaaacgtacactgacatcgcctgacaactgtcatccctaatagcgtgcactacacagagaacgaaatcaacaatgaagaatataaaaaataaatcaaagccaaagcgcaagcccactcccatggaagtagaggaggctgagctagacgaggtgcgctcggatgagccgcagccaggggaaggtgaaactgcgaatggggaggcaaatccctcggatgacgacgatgatatggatctggccaactttaaagccacctccagttcctcggcccccgcgaagaaacgcaagatggggatcatctacatatccaacatacccaagcatatgaacgtgacccgcctgcgggaaatcttgggcgagtacggcgccatcggcagagtttacctacagccagagaagctgtcaagtgagtggaccaagtggcatacatataagacccactgattacccactagtgtatatactttaatctcaattactttaggtgccaaagcgaagaagaacaagcgtaagcgttataatatccacttcaccgagggctgggtggaatttaagtcgaaacgtgtggccaaacagatcgttccactgctgaacaacaagcagatatccggtcgcaagacgtcccaattctatgactcgctatggagcatgaagtacctgccgcgctttaagtgggtccatctaaccgagcgcatgaactacgagcaggcggttcacaagcaacgcctacacactgaggtctcgcaggcccgcaaggagaccaccttcttccagaacaatctcgacaagagcgagttcatcaggaagcaggcgaagaaggccaagaatgcggaaaaggctctggctgccaagagcgacagcgatgcctgagttcgcgctagactgttgcattcaatgtttacctgactgcaaatatacttatattaagtagatcaaataaaaatctttaaataattaggcgcgcaaaattatttgaaattagggcccctgcatatcgataatttcgtcgattgtgtgtgcgtgttaatgctacttcagctactcaagctgaaggaggccactgtaacgcacagggatggttaagatttctcgattaaaatagggctgagtaaatcaaatgttctgttacaaagtgtttttaaagcgatatgcttttctaatgaaagggtaccaacacatcgatagctcttcgataaaaacgtcaactgacatcgcctgtcaactgtcatacctgattgcgtacattacaaaatatattcgatccagctaaaacgaaagctacaatgaaaaaaataattaatacatcaaagccaaagcgcaagtccacttccatgaaagtggaggagactaagctagacgaggcgcgctggggtaagccgcagacaaaggaaggtgagtctgcaaatgggatagcaaatccctcaaatgacgataaaaaggagctggccaatttcaaagccaccttcaattcctgggcccccgagaagaaacgcgagaagatgcacaaggtaggcgtcatcttaatatccaacatacccaaggacatggacggggactgcctgaaggaaatcatgaacttgcacagcgtcgtcggcagagtttacgtgcagccggaaacgctgtcaagtgagtggaccaagtggcatgcacaaatgacccactgattacccagtataaacttttatctcaattactttaggtttcaagacaaagaagaacatgcgtaagggctgggtggagttcatttcgaaaagtggggccaaaaaaatcgctctagagctgaacaataagcctataaccgatggcaagtcgtcccgattccgtggcttgctgtggaaaatgaagttcctgccacgcttcaagtggtact

SEQ ID NO: 15347 - DNA, 866 bp, DROSOPHILA
ttaaaatagggctgaataaataatctgttacaaagtgcttttgaaccaaccaactcatcgatagctcttcgataaaaacgtacactgacatcgcctgacaactgtcatccctaatagcgtgcactacacagagaacgaaatcaacaatgaagaatataaaaaataaatcaaagccaaagcgcaagcccactcccatggaagtagaggaggctgagctagacgaggtgcgctcggatgagccgcagccaggggaaggtgaaactgcgaatggggaggcaaatccctcggatgacgacgatgatatggatctggccaactttaaagccacctccagttcctcggcccccgcgaagaaacgcaagatggggatcatctacatatccaacatacccaagcatatgaacgtgacccgcctgcgggaaatcttgggcgagtacggcgccatcggcagagtttacctacagccagagaagctgtcaagtgccaaagcgaagaagaacaagcgtaagcgttataatatccacttcaccgagggctgggtggaatttaagtcgaaacgtgtggccaaacagatcgttccactgctgaacaacaagcagatatccggtcgcaagacgtcccaattctatgactcgctatggagcatgaagtacctgccgcgctttaagtgggtccatctaaccgagcgcatgaactacgagcaggcggttcacaagcaacgcctacacactgaggtctcgcaggcccgcaaggagaccaccttcttccagaacaatctcgacaagagcgagttcatcaggaagcaggcgaagaaggccaagaatgcggaaaaggctctggctgccaagagcgacagcgatgcctga

SEQ ID NO: 15348 - protein, 239 aa, DROSOPHILA
MKNIKNKSKPKRKPTPMEVEEAELDEVRSDEPQPGEGETANGEANPSDDDDDMDLANFKATSSSSAPAKKRKMGIIYISNIPKHMNVTRLREILGEYGAIGRVYLQPEKLSSAKAKKNKRKRYNIHFTEGWVEFKSKRVAKQIVPLLNNKQISGRKTSQFYDSLWSMKYLPRFKWVHLTERMNYEQAVHKQRLHTEVSQARKETTFFQNNLDKSEFIRKQAKKAKNAEKALAAKSDSDA

SEQ ID NO: 15349 - DNA, 6680 bp, DROSOPHILA
tgcgtatatcctggtaaggacggaagctgtcgtcaacaatggcgtcgtttagcttgcgcagcacctcgtgaccttccaccacttcaccgataacgcagtggttgccgtccagcgatgttaggttctcacccagcgtgaggaagaactgggatcccaccagattcttgcctgcactgaccagcgatagcattccggcactggagtggttaatcttgggcaggaactccgcctcgaagaagcgcttttgcggaccctccaccacgccccagatggaggatccgccgtctccagctccactcggatcgcctgtttgggcgatgaatccctgctgcaccgtgtgaaatagattgaagttatagtacttcagccggcacagcttgaggaagtttaggcaggcaattgggcgctcgctgatgaacaggtcgacggtcaggtcacccatcgtggtttctataaccaccgacattgtgcgaattcacagataccggcaaaatcaagggataaacaagaacaatatagaggtggagaaacatcgatgccaaatcgatatcatcgatgctttcgaaaaatcacaaacatcgatgtttttcgaggaatcatcgatgtttttccatctctactgcgcatcggaggagagaagtgtataaattgtaggtataaattaattatccaaattttctaatacaattattaatttaatgtgacttatgtcggtgttatatgaaacttgtacaaaattggtattttacataaattttgaaaaaaaaatatttttttttatgtaccctaaactgagaaaaaagtaaaaaaaatacaaactgaacaaaactgaaaaaaaataaagaaaatacaaattgatcaaagaagtccatacctgtaaatgtaaatagttatacacgatgcgtaagttcatccgatacttgacatcgattgaatattttaaaaacagaacgtaacttcgtaatcgccattttcgattgtcattcgataattgtgtgtgtatcagtgagacttgtcaaagaattttcacacgtttcgagactggaaaaaagtacagaaaatttcattccaatcttaaaaagcgacaattaatagttaagcaagtgaccagtgatctagaacaaggtaaaatgcccgaggcaggaaagaaaatagcagagttgcgcgtgtgcgatctaaagagtgagctggagaaacgcgagttggagacagtcggccccaaggcggtgctcatcgaacgccttgaaaaagtaagtccacaaatatgtatgcaacttaaatggcggttcagtgccgctggcgatagagatagtgatgcaatttccggggatttatgaatgtgtgtaagcaacgcctggttttttctaatttcaagtcactcagagctgaagggctcgacccggccacccacttgattgtgccgggcgcgaaggccaagaagccgtttgccatgcccatgaaagatctccagtcggaggtggtgatcaaggaagagcccatcgatgccaatgaggaggaggtgaaggtggaacagcaagatgattaccagaatggcaacgactactcgcatcatgccgacgacgatgggcatgagattgaccaggtgggagatgtggacgatgagtgtgtgatcctggatgacgacgatgaagaggatgaggatcatgtgtacgacgatgagccccagagcggtgatggcgatgccgaggggaaagctcaggacgatggagccgagaacaatggcgacgacaaggctattatccatggtgaggaggaaaacaccggggacaccggaaatatggacaatgacgagtcaatcaatttgacaattggggaggacgagcagaagctgctgcacgatgaggtgattttaactatttggccttaaattgatgtattctaatccaatttgttttgtcctcaggcttccgacgacaaatctattaagtctggtatgtttgcagtatcactcaaaaccatagaaaatttataattcatgactagaaatatcatggcgtttgtattcatgcaatcgattaagaaatacgaaatacaagaaataaagctaatatgttaataaaagttatcctgattcacagtcaaaccggccaataaatccgaaaagtctaactcgaaggatgccgacaagaagaatgacgacggagctcgctccaagaaaagggatgagaaatccggtgataagaaggactctaggtaagatttgaaaacgtttctgtgacatgtcttctaataacataatatattttttcttttcatttcgccacatgattgtgcataaattattatggaaaatagtgaacaaaagtcctcaggaaagtcgtcgaatcaaaaggacgataaaggtaaattaagttaaagttttagcatgaataagaatggtgtgttcggatggtcttgcgttgggaatgatcagaccaagcatgaacccagttaaggtcgaaaaaattgactaaaccattgaggaacatgtatcaaagaccgtgcaagagagtgtgaatttggttgggacacggacatgggactcttatcaacaaggatgcgagaattcggctcaggagcagcgatgcatcttaaattcagcaattcgagttaatcttagtgtttgttccagttaacttcgacggaaacttcatactaatcaaacacacatcccaatgttctccaaggagtttataacattggtcatcaataggcgtatgtgcaaatactccgttgaggggcctataatataaaatgaggctatctggagaataaatggatggcacctttcccttactgcagctgggaagtgcggatatttttaattcttctcggcagataactactggatttgtattacatcacttatttcgatcctggctaggatatgctggccttacctgtggatgacgatggaaactgacagctatttaaacagtcagctctggatatgctgctctatactctgaacgccttcagcaaaaagcgagcctgctgccgcaatggattttcatcagcaacccaatcaaattcatactctcttagcttcgttaggtgaagtttgtcggtaatcttacgattgtgctctaaactccaacatctgcagcagctacaaaatgtgtgcgttcacaaaatgcttcccttaaaaacgtatcataaacaaaaacagttaaccagttaagcccactcaaagctctgaccatatctctcttccaatattattatttacatggaacttgcagagaaatcgacagcagcacctggtggtgccacatcctccactgcatcgagtgccgctggcagtaaatcgggatccggttccagtgctggcaatggtactggggccaactcaaacaacaagcaggcgacgctgtcgcgaaatctatgggtttctgggctgtccactttaacccgtgccagcgaccttaaggcaatcttctccaagtttggcaaggtgattggggccaaggtggtcaccaatacgcgtactccgggcactcgctgctacggatacgtgaccatgtcctcctcggcagacgcctcgcgttgcatcgaaaatctgcaccgcaccgaattgcatggacgcatcatttcggtggagcgtaccaagaacgagattggcggcagcttgaattccaaagagggcaagggcaaggctccgggcgacgccggaaacaagaagaaggaagacgacagtggcaaaaagtctggtagtggcaagggctccagctccaacagtggcgatgacaagaagggcggcgatggaaacggcgacagcaagtctgttggtggcgatttaaagcgtgatggcaaggagagcaacagggcccgcagccgtcgcaacgatgaccggggcaagtcgttggcaagccaggatagaccgcgccacgatcgcgagcgatccgcaaagggtagtcaggatcatcgttcggggcgcaatccacgcgacgtcgaccgtgagattcagcagcgccagagggagcgcgagcgtcgtcaacgagagatgctgtcctaccagaagatacgtgaggagcgcgagcgccagcgccttcgggaaagggagcgtgagctgcgtgaggaggagcgtcgccgtcgggaggcccgtgagcgccagcgaatcgaagaggaacgtctgcaggaagaacggcgcaagctcgctgtggagcgggaacggctcgagcgggagaaggccgagcttttgcggatggagcgcgagcgccagaagctggagagagaaaaaatcgagctggaacgcctcgagctgaagcgacaacagatgaagtatgctaaaaaaaaaaccaaaacagaccgtaatgcgttgcactcgtgccaacgcagaggcgacaacacagatataccaatatatttattttatactctctcggaaagcatttgtccttgtgattagcgtgttaagttgcagcctccacgttgtttcttcaactcaaattgcttttaagcggaacgttgataggcaaatgcatcctagtctaaagtctgagtctgatacccccacttcactccagaactgacattactagcattactaactcaactcttttatttcttccatctctcttcctctcaatcttgtcgatttacacaaacaggatcatggagtcccgcgatgatcctggcaagcgcggggtaagcaaacgtgccgacgaccgctatggagacgttactgatcgtaagcgcacagctatttttgatgcgccaccaccaccgagattcgacacgaatctagtcagctcccgcaggtaagtattcttccacagaaaataacttgcgagttacaatcatgtctttgcagcacctatgacaaaaaacacgatgactacggatcctcgtcgagcaccaagcgcgtgcttgatgactattctagttccagcaagcgattggattactccagcaagcgtaacgactacagcagttcttctggatccaagcgtggcgctgtcgatgattatactgccgtgcccacgaagcgctccaacgattatagtgcctcctcttctagcaagcgcgacgactataagcgcgatgaagtccgtcatttgccactttcaggaactgtcggcggtggctcaagcagctcgtatttgcacaagaacaacacagccggtggcggagccggatcctacgtccacaagaacaacaccagcggcactggcgggcgctacaacgattccgatcgcagcaacacatcgagctatagacgcgacgactcccacagcctgtaaaagttttaacaatagaattaaactagttacgatggattctaactattctaattttttattatagcggtaacaagcgttatgacaactccagcggcggcggtggagcctacggcagcagttcgaacagcgttaacatctgggcgccatcatccggcggaagcagctctcacctgggcagcggtggcggcggcggcaaccaaattaagtcatacggcaacaacggcatgtcctcgaatatgcacagcaccaattcgtggcaaaagtctgctcccgttgacgacaacggttggcggcaagtgcccgcgcgcttcgatcgcggctacaacgaacgttcaaccggctatcaagggcagagtgggggcggaggagcaggcggaatgtacggcgcgagccgacccgcccaggatcgctacagcggaccggtgtcgcgctactaggaaatgtgcatttacataaaatgaggcaattcgaatttccaagcatgcatccccacatccaacacacccccctgagtgacttttccagcagcgcccaggagcgctgctcttaatataatgagctttagttgtagttctaaaacttaaaattacatttggaaaccaataaatgtattatcaaactatgttgaaaatgcgcatacatttatgttacatctgcaggatttattgaacctataggtgcgggtaatcaccttcgtatgaggatattagtggcgtggtcgtgtctaccagcaccagaacgctatgtgccaaaggataaacgtcatgcacctggacgtaatagccacggtcgcactgctccttggaagagaagagactgcaggagatgcaggtaaaaataaaatccctgttgcaaaatgaaaacatacgctaatatatccaccggttccagtatcagctccgacttgtagaccgaggccagaaagtttgtaaacgctgccgtgttatttcccaactccagctccatgttgggtgtgcagatctgcagtcccaggccacagttggtcgaaccaatccccgggaggccattacgagtaccccaaacggtgatgatgttgtcctccgaggcgacaatggtacactggtcgctacagttcgccttctacatgcgacggtttagaagggatttctcaactaacacagaataatacaaaccacaatatatcgagacttaaccgaatccaccagggtggggtgatcaaccgagttgcagtgcctgattccccgctgaccctccgcatttcgacccatggtgtaaacatagccgccctccaccaggaacaccgaatgggtggacgagaagcacgcctgggtcaccttgtgaggcagttggacttttttctgcgcatgagaactataaggtaagcataagtgggtaactcaaggttgtggacctacaaaggcagtaatcttcgccgaacgttggaaaccgagttta

SEQ ID NO: 15350 - DNA, 2845 bp, DROSOPHILA
tatcagtgagacttgtcaaagaattttcacacgtttcgagactggaaaaaagtacagaaaatttcattccaatcttaaaaagcgacaattaatagttaagcaagtgaccagtgatctagaacaaggtaaaatgcccgaggcaggaaagaaaatagcagagttgcgcgtgtgcgatctaaagagtgagctggagaaacgcgagttggagacagtcggccccaaggcggtgctcatcgaacgccttgaaaaatcactcagagctgaagggctcgacccggccacccacttgattgtgccgggcgcgaaggccaagaagccgtttgccatgcccatgaaagatctccagtcggaggtggtgatcaaggaagagcccatcgatgccaatgaggaggaggtgaaggtggaacagcaagatgattaccagaatggcaacgactactcgcatcatgccgacgacgatgggcatgagattgaccaggtgggagatgtggacgatgagtgtgtgatcctggatgacgacgatgaagaggatgaggatcatgtgtacgacgatgagccccagagcggtgatggcgatgccgaggggaaagctcaggacgatggagccgagaacaatggcgacgacaaggctattatccatggtgaggaggaaaacaccggggacaccggaaatatggacaatgacgagtcaatcaatttgacaattggggaggacgagcagaagctgctgcacgatgaggcttccgacgacaaatctattaagtctgtcaaaccggccaataaatccgaaaagtctaactcgaaggatgccgacaagaagaatgacgacggagctcgctccaagaaaagggatgagaaatccggtgataagaaggactctagtgaacaaaagtcctcaggaaagtcgtcgaatcaaaaggacgataaagagaaatcgacagcagcacctggtggtgccacatcctccactgcatcgagtgccgctggcagtaaatcgggatccggttccagtgctggcaatggtactggggccaactcaaacaacaagcaggcgacgctgtcgcgaaatctatgggtttctgggctgtccactttaacccgtgccagcgaccttaaggcaatcttctccaagtttggcaaggtgattggggccaaggtggtcaccaatacgcgtactccgggcactcgctgctacggatacgtgaccatgtcctcctcggcagacgcctcgcgttgcatcgaaaatctgcaccgcaccgaattgcatggacgcatcatttcggtggagcgtaccaagaacgagattggcggcagcttgaattccaaagagggcaagggcaaggctccgggcgacgccggaaacaagaagaaggaagacgacagtggcaaaaagtctggtagtggcaagggctccagctccaacagtggcgatgacaagaagggcggcgatggaaacggcgacagcaagtctgttggtggcgatttaaagcgtgatggcaaggagagcaacagggcccgcagccgtcgcaacgatgaccggggcaagtcgttggcaagccaggatagaccgcgccacgatcgcgagcgatccgcaaagggtagtcaggatcatcgttcggggcgcaatccacgcgacatacgtgaggagcgcgagcgccagcgccttcgggaaagggagcgtgagctgcgtgaggaggagcgtcgccgtcgggaggcccgtgagcgccagcgaatcgaagaggaacgtctgcaggaagaacggcgcaagctcgctgtggagcgggaacggctcgagcgggagaaggccgagcttttgcggatggagcgcgagcgccagaagctggagagagaaaaaatcgagctggaacgcctcgagctgaagcgacaacagatgaagatcatggagtcccgcgatgatcctggcaagcgcggggtaagcaaacgtgccgacgaccgctatggagacgttactgatcgtaagcgcacagctatttttgatgcgccaccaccaccgagattcgacacgaatctagtcagctcccgcagcacctatgacaaaaaacacgatgactacggatcctcgtcgagcaccaagcgcgtgcttgatgactattctagttccagcaagcgattggattactccagcaagcgtaacgactacagcagttcttctggatccaagcgtggcgctgtcgatgattatactgccgtgcccacgaagcgctccaacgattatagtgcctcctcttctagcaagcgcgacgactataagcgcgatgaagtccgtcatttgccactttcaggaactgtcggcggtggctcaagcagctcgtatttgcacaagaacaacacagccggtggcggagccggatcctacgtccacaagaacaacaccagcggcactggcgggcgctacaacgattccgatcgcagcaacacatcgagctatagacgcgacgactcccacagcctcggtaacaagcgttatgacaactccagcggcggcggtggagcctacggcagcagttcgaacagcgttaacatctgggcgccatcatccggcggaagcagctctcacctgggcagcggtggcggcggcggcaaccaaattaagtcatacggcaacaacggcatgtcctcgaatatgcacagcaccaattcgtggcaaaagtctgctcccgttgacgacaacggttggcggcaagtgcccgcgcgcttcgatcgcggctacaacgaacgttcaaccggctatcaagggcagagtgggggcggaggagcaggcggaatgtacggcgcgagccgacccgcccaggatcgctacagcggaccggtgtcgcgctactag

SEQ ID NO: 15351 - protein, 904 aa, DROSOPHILA
MPEAGKKIAELRVCDLKSELEKRELETVGPKAVLIERLEKSLRAEGLDPATHLIVPGAKAKKPFAMPMKDLQSEVVIKEEPIDANEEEVKVEQQDDYQNGNDYSHHADDDGHEIDQVGDVDDECVILDDDDEEDEDHVYDDEPQSGDGDAEGKAQDDGAENNGDDKAIIHGEEENTGDTGNMDNDESINLTIGEDEQKLLHDEASDDKSIKSVKPANKSEKSNSKDADKKNDDGARSKKRDEKSGDKKDSSEQKSSGKSSNQKDDKEKSTAAPGGATSSTASSAAGSKSGSGSSAGNGTGANSNNKQATLSRNLWVSGLSTLTRASDLKAIFSKFGKVIGAKVVTNTRTPGTRCYGYVTMSSSADASRCIENLHRTELHGRIISVERTKNEIGGSLNSKEGKGKAPGDAGNKKKEDDSGKKSGSGKGSSSNSGDDKKGGDGNGDSKSVGGDLKRDGKESNRARSRRNDDRGKSLASQDRPRHDRERSAKGSQDHRSGRNPRDIREERERQRLRERERELREEERRRREARERQRIEEERLQEERRKLAVERERLEREKAELLRMERERQKLEREKIELERLELKRQQMKIMESRDDPGKRGVSKRADDRYGDVTDRKRTAIFDAPPPPRFDTNLVSSRSTYDKKHDDYGSSSSTKRVLDDYSSSSKRLDYSSKRNDYSSSSGSKRGAVDDYTAVPTKRSNDYSASSSSKRDDYKRDEVRHLPLSGTVGGGSSSSYLHKNNTAGGGAGSYVHKNNTSGTGGRYNDSDRSNTSSYRRDDSHSLGNKRYDNSSGGGGAYGSSSNSVNIWAPSSGGSSSHLGSGGGGGNQIKSYGNNGMSSNMHSTNSWQKSAPVDDNGWRQVPARFDRGYNERSTGYQGQSGGGGAGGMYGASRPAQDRYSGPVSRY

SEQ ID NO: 15352 - DNA, 7713 bp, DROSOPHILA
aatttgggcctattctgagcacccctcaactgcagaattagtgagcagaagttgttaagcgtatgggtgatcctgccccatgctcatgtggcatctggcatgtggcttctaccactgggttaatcgacagcgactaagagagtgcgaactggtccagggggaatcgaaataaaaccatatgcgccctgaaagtatttttggaacacacgaacccaacgaaatgggaggattcgttggttcggttgatttcatgtcattcctgctgcatttttggtggctgtcgccacacccaagtctaaaaagtgtagttcatcgtttattgtgtattattttaaaaacactctacatccagtaaacaaatatggggagtgtttcattggaggaaggcgatttgtcagaacattacccatgcgctgaacgtcggtcccaatgcttctgtggattgataaaaaaaaaaaatgatacaatcagtcgcggcaatactgtcctacgcaatttcgattatgttcatttatttatattaaaagtagcaaggaaccagtcaattacgtgactatctgcgggaagcggcagcagtgcgatattgtaattgatgcaggcacggagctgttgaaagcagatctataaacacagaacgagatgaataagtggtggcagctgtttcttttttctgttcgtgggcgcaggcaagaaggcacacaggatgtgcgtgtcatcagacaggcgcgcccgaatccgaaccggagcctaccctcacttgacctgcgcagggtaaacacaccctgtggcacatctctcggcacgcacatacttcgccgtgttctatttgggtcacgtgtgaaaggaggacttagttccgaaatcaagggcgcaaaactaaaaagcatgtctcacttttgactttacaattgaatggtgtgctactagaacattgtccgttttggtagggaggagttaaatgaaagatatggtgtaactgtactaacctgcgtaaaaactcctacttccttcttttcgagcccccagttgattgagctttggggcgctgcgttttccgcatgctgcgcttgcggttttcgcttttcctctctgcgttctcttcgttgcgctttttaatgaactccagtcgcatgcgagacttgacaatttgctcggggcggcgcatctccttgtcgtttccggtcagtcgcttcttaagttctagctttaagttgtgccgcgcatgacgactgactgggtagcgctgggcatggctcaacggcttggcgttttcgtcatcactacctgcattttcgcgctgcagctggtcctcgatcttagacttctccttccactcagcataacgacctgttttaaaggaggcaggaatccacgcaccggactcggtccgaattttgttggctcgcggatcttgtacagagaccatttttttcttaattcggtcccacttcttaaggccgggcttgtgcttcacttcctgggataagtcgcggtccgacaccgaaaactcggcgttctgcgcctgccgctcaaagttgttaatggccagaccatcctctgtgtgcttgtctgccgactggtacggcacatagtgatcctcgtccttgctgtttatcttccgctttttcttctttggcttgtccttgtaaagggcgtccatgttctggagcctcttgggcgcaacgactttattgaaagtactactaatagcttcctcgtcggcggtgggcattctgcctgagcttgggttgagcgcctcgatcgttttcttttcctcgtctatgtcctcttctgcgcgctgctgcctaaacttgttgattacttccgcatgctgcattcgtttttccttcataacgataaactgcgtggacttttgagtggtgttgagttcaaaaacggtctgaaaagggcacaattactaatacgtgagcgagcatttatcgtaaaactgttgagaaactcacaccaccaggacggaaactacgcatcttcaccagtatatcgtgcttttcctcctgcaacttgcgctctgcggcgctcacctttgcctgcgactctgttgattgtccactagcttcagccgcctgggcgagcacaggggcagctgtgaagaaatcctccaatggcttgagagcaaagaatttaattttctttacacgcgcgttggcatccgtggaggctactggtcgggaactcaagtattttttgtaggcgttttcgctggtgcgcaatactccggcctgcagaaatacatgtacaattacgtatcattagaaaccataaaatgcagtacactccatttgaaacttacaatatggtgacttttctttatatcggtcactgtgaggtgctcttcctcgagcaaatcttgcggaatggttcccaatgccgagctgtcgtgtatattaaagggtctgttcaagaacaagtgcagatccagtagatgtgctgtgtcgtctgtggatacaatagagtatgcggttcctgtgcgaccagcgcgagcgcaacgacctacccggtggacaaacagtttcggtttacccgggaagtgcaggttcaccacaaagtctagactgggaatgtcaataccacgcgcggccacgtccgtgactattagcacggacacctttttgttcacaaatttggcggtgtttattttgcgtgcagctggatccaggctggagtagactgaggcgttggagattccagcctcagtaagtatgtacgaaatgagttcgacatggtgctgagtaccggcgaacaccacggtttgcgactgcaccggaataacgtacttaagaagaaccacaagtgctgtgtagcggtcgtctggtcgacagtacagaaactttagagccagcgcatccgggagcttggattcgacgtctaaacgaatgagcactgggtcgttcagtccggcacgggcgaactctactagcagttttggcagcgtggctgaaaacatgaccgtctgccgggacgatggcaatctgtgcaacgtttcgttcagttgctcgccgaagcccatctcgaagagtcgatcggcttcatcaaacaccacgtactctagagagcaaataaattaattcctgcttttatggtccgcaactatcaactcacctatggaatttagcttcaagtccatttctacgcacaaatgaagaaaacgacctggcgttgcaacaattacgtccggacaggtatgtatggccgagaactgtgagtccatggagtcgccacctagcaccagaatgctcttcagttccataaagcggcccagctcctttatgaacttatacgtctgcacagccagttcgcgcgtcggagacaggatcagggcacgggccccctttgtgggctcgcgcctctgtagcttttcaaagagcggaatcagaaagcaggccgtcttgccagagcccgtcttggccattgccaccacatcgcgtccctccaggatcagcggaatcgttttccgctgtatgggggtgggaaccttgtaaccccgcttggtgatgccctttatcagctcgaagcccaggcccatcgactggaatccaccactcttgttcttcttggacttggacttgagaatgtcggcgccccggtcgctggtgccggcatcgttgtccagtgatggaaagcctggtatttcatccgcctgcttcttacgctgccaatgcaaagtatgtattgaaagctaagcaacaagagacaatcctcttaccatattttttttgttttgaataaaaacaacacgtgcaaaatcgatgactattccacactatcgataactccataaattatccaacactgatttcttaaaaattgactaacgctacaatataccgcattgtaattggcgcttagattttcatttgattaactcgcgttttattattttaatatttactattttgagtagaccatcttttaaatcgaccatatatacactgccgattaaaattagaggatagcttacatatgcccaaagggaaaaaacctcataagacctcgaccaaacgggaaaataacagatataaaagactggtgcgatttaatagctatgtaaatgtattaaataaatgctacatcttgtgcagattatggattgaaaatgaattttttaaacgatatatttctatcgacatccgaattggtttaaagctctcatagcattcaagttattaaggtttcgataagaaatggtatgaaatcgtcattaaactgggtgctttacaaatgcacttatcggctgaatatcctaaatataccttatcgaacttacgctaaacttatctttgcattaactaaacgtcctctccaaaatccaagtccgcctccgactcttgaaccagcaccatctgctccaggcggtcaatgcgcctcagcatttcctccttttcccgctgaaaggagtcggcccgccgccgcaggtcttcgttttgacgccgcaactcgtgaagctggcgacagatctcagaagaagttagcagcggcatcacgttcggagatttcggcgactgcttcgtcgcattgacgattgtcttgccaggtgccgccccgttgtttactgcgccttggccggatcctgccgagagtgaaggtcgcagctgtatcgtctggacggtgcccacttgtcccctaagcgaactgcccgacgcgggatggcctgaaggcagtggggatgggaccgcggcttcgttctggctgtgtgattcttctagcgcagtgagatcctgcggcctttgcagggaggggagctttaactaattaagcggggttcaagtaaagtaaggaggtgagctcagaaactatttaatattcacctgtcgagcctgcaactggcgcatgttgactagctttgtgccatcgggaagatgccgcaccattccagagctgtcgataaggcaagatcttatatatatctcccaaatatgtgaaattaacgtaccttgccaatgaggcgggtattttctgaagggactttgccgtgctgtccgatccgtagagtttcttaaaatcagtcaacgagataatgcgtatattctgccctcaaatattaattattatacgaattagcgaaacaaaacaatgaaatgcataccttgttcttggcaactcccgccggtgacggaagatccttctgcttcaggacattcatccgaatcttgggatgagaattattaacatttgtgcggagcgctgcgaccgaaggccgggcgtttccgttcgtggattgcttgccgctgatgcccgattttgtttcgtgcagcagcatgcgtcctccttcagagaggacaagttggcgtccattctgcaacgcagtgttcagcatttctttcgagtcctcgtcatcgttgtcctgcaccatgtctgcgatttcgtgcgtctttagtatgtaaagcgcagtgttccgcaggacgtttgcatctggcagggaaaataggtttttcgttaaatattcgtttaatatctccgaatctagtaacttacggcctcgcatgttttctaggacatccattcgttcttcaaccgacatttctttgtcgtccacggttttaattacttccggttcgtccattattgagctgacagcttcattggtttccttctgcaaatcgatggggaataaatatgatatgatttttctttctgcgaatcaattgggaataaagtatttgtcacaattttttaggatcaggaatgtaggccaaagttgggaatgttcttgctattatttgtgacaacctaatacaagttgtcgaaagtacatactttggtcttatgtgcttgttgctgaagtttgataagcgcagcgtgggaaaaggcagcgatcaattgtattgttaagaataaggaacagccaagcgaaacgtaagtaaaacctcatattaagtagtaaatatggccttcagtggatttcttcaagcgcactcacctccgattcctcgtgtaacttcttactggcctgcgcctgtcgtgccgcttccaactccgccagcacatccgcttgttccgtgtacacggcaagtccgatcggcgtcttgccgaatttggagaccaaggtgacatctgcctggcacttgagtagcaggcgcacaattcccttgtgttttttctcgaccgcccagtgcagcggggtcatgcgaagctgacaggaatgttggttagtcattttaaacagtcatttatttatatattcttaccatgtcgcgggagttgacgctgcactttagcgctagcagcaagctgactatccgctcgtgaccgtagtagcaggctaggtggagcggcgttcggtctaccttggtcttgccatccatgttaatgcccccctgcaggaggatttcgcaaatctccagctgattgttcatggcggcaaagtgaagtgccgacatacctagccagtcggaagcgaagggagctccatgcgctagcgccgccttgaccccagctacatcgctgtctctggcgcactggagcagctgtttgcccaggtcaacgcatgtggccggacccaccaggatccccttcttttgctggacatccccttcggtgcgctatgaaggagtcgcctcggttagtgtgaattacaagcaaggtaccgcgagtcttacgatctcgtagtgcatcaggttggagttctccatggggtagacgtgaccatccgctcggagagtagcaacgactttgctggcgccgagactgtgcattttagcagaagaacactttcagggacgagtgaaggcctataattggcattacttcaataagtttattaagcaaaggctaagaatggctttaattatgaatgtttacgtttttagatctctgcggtgtgaccagacatagaaaagggcttatactcacctatcagataaaattgtttttgaaatagctttcgtcatatagcatcaatagcattagtttcttcaatcgtctaaaatcatgttaaacttaaatcattttctgcgttgccgttttttacatttaaatttaaatcacagctaaatcctgtaagacattacttgatcaaagtaataatacgaaggataaggcaatcgaagctgaatttattggtatataccaaaaaggaagaataggtatcgataatctctacatgacgaaagtttctgatcgatatcaagcacggtcacactttatcttatcgtttttacagttcgcggtttcgaggtttgcaacgcgcaatgagcaaacttaaactaattttgtgactcggtaatcaagtaaatgtgcagcggtctaattgaaatcaatgttgcacgtgcaaattacagcttgcgagagcagcaatcatttttgttcagttttttaaagcttacgaggtatgaaaagaagaggaagtaacggcaatgccagaagcttgttgctttctccactcctctttcatcctcgtcatgtgtgtgagtgtgcaagtgtatgtgtttgctaggcttagaattcccagtgaatattggggaaatgttaatttaaaatgcaaaatatgtgatggatagcaaatggatacgtacaaacaatagtaagtacatgtgtgtagtctttccgatttttttcattactggtgttaaaaagaagagactaacaatattcttcatgctcttgagcggccattatattctaggtgaccattgttgatctaaaacaaaatagagagcataattttatgtttcaatttctttcttccgccgccat

SEQ ID NO: 15353 - DNA, 4173 bp, DROSOPHILA
atgcacagtctcggcgccagcaaagtcgttgctactctccgagcggatggtcacgtctaccccatggagaactccaacctgatgcactacgagatccgcaccgaaggggatgtccagcaaaagaaggggatcctggtgggtccggccacatgcgttgacctgggcaaacagctgctccagtgcgccagagacagcgatgtagctggggtcaaggcggcgctagcgcatggagctcccttcgcttccgactggctaggtatgtcggcacttcactttgccgccatgaacaatcagctggagatttgcgaaatcctcctgcaggggggcattaacatggatggcaagaccaaggtagaccgaacgccgctccacctagcctgctactacggtcacgagcggatagtcagcttgctgctagcgctaaagtgcagcgtcaactcccgcgacatgcttcgcatgaccccgctgcactgggcggtcgagaaaaaacacaagggaattgtgcgcctgctactcaagtgccaggcagatgtcaccttggtctccaaattcggcaagacgccgatcggacttgccgtgtacacggaacaagcggatgtgctggcggagttggaagcggcacgacaggcgcaggccagtaagaagttacacgaggaatcggagaaggaaaccaatgaagctgtcagctcaataatggacgaaccggaagtaattaaaaccgtggacgacaaagaaatgtcggttgaagaacgaatggatgtcctagaaaacatgcgaggccatgcaaacgtcctgcggaacactgcgctttacatactaaagacgcacgaaatcgcagacatggtgcaggacaacgatgacgaggactcgaaagaaatgctgaacactgcgttgcagaatggacgccaacttgtcctctctgaaggaggacgcatgctgctgcacgaaacaaaatcgggcatcagcggcaagcaatccacgaacggaaacgcccggccttcggtcgcagcgctccgcacaaatgttaataattctcatcccaagattcggatgaatgtcctgaagcagaaggatcttccgtcaccggcgggagttgccaagaacaagaaactctacggatcggacagcacggcaaagtcccttcagaaaatacccgcctcattggcaagctctggaatggtgcggcatcttcccgatggcacaaagctagtcaacatgcgccagttgcaggctcgacagttaaagctcccctccctgcaaaggccgcaggatctcactgcgctagaagaatcacacagccagaacgaagccgcggtcccatccccactgccttcaggccatcccgcgtcgggcagttcgcttaggggacaagtgggcaccgtccagacgatacagctgcgaccttcactctcggcaggatccggccaaggcgcagtaaacaacggggcggcacctggcaagacaatcgtcaatgcgacgaagcagtcgccgaaatctccgaacgtgatgccgctgctaacttcttctgagatctgtcgccagcttcacgagttgcggcgtcaaaacgaagacctgcggcggcgggccgactcctttcagcgggaaaaggaggaaatgctgaggcgcattgaccgcctggagcagatggtgctggttcaagagtcggaggcggacttggattttggagaggaccgtaagaagcaggcggatgaaataccaggctttccatcactggacaacgatgccggcaccagcgaccggggcgccgacattctcaagtccaagtccaagaagaacaagagtggtggattccagtcgatgggcctgggcttcgagctgataaagggcatcaccaagcggggttacaaggttcccacccccatacagcggaaaacgattccgctgatcctggagggacgcgatgtggtggcaatggccaagacgggctctggcaagacggcctgctttctgattccgctctttgaaaagctacagaggcgcgagcccacaaagggggcccgtgccctgatcctgtctccgacgcgcgaactggctgtgcagacgtataagttcataaaggagctgggccgctttatggaactgaagagcattctggtgctaggtggcgactccatggactcacagttctcggccatacatacctgtccggacgtaattgttgcaacgccaggtcgttttcttcatttgtgcgtagaaatggacttgaagctaaattccatagagtacgtggtgtttgatgaagccgatcgactcttcgagatgggcttcggcgagcaactgaacgaaacgttgcacagattgccatcgtcccggcagacggtcatgttttcagccacgctgccaaaactgctagtagagttcgcccgtgccggactgaacgacccagtgctcattcgtttagacgtcgaatccaagctcccggatgcgctggctctaaagtttctgtactgtcgaccagacgaccgctacacagcacttgtggttcttcttaagtacgttattccggtgcagtcgcaaaccgtggtgttcgccggtactcagcaccatgtcgaactcatttcgtacatacttactgaggctggaatctccaacgcctcagtctactccagcctggatccagctgcacgcaaaataaacaccgccaaatttgtgaacaaaaaggtgtccgtgctaatagtcacggacgtggccgcgcgtggtattgacattcccagtctagactttgtggtgaacctgcacttcccgggtaaaccgaaactgtttgtccaccgggtaggtcgttgcgctcgcgctggtcgcacaggaaccgcatactctattgtatccacagacgacacagcacatctactggatctgcacttgttcttgaacagaccctttaatatacacgacagctcggcattgggaaccattccgcaagatttgctcgaggaagagcacctcacagtgaccgatataaagaaaagtcaccatattgccggagtattgcgcaccagcgaaaacgcctacaaaaaatacttgagttcccgaccagtagcctccacggatgccaacgcgcgtgtaaagaaaattaaattctttgctctcaagccattggaggatttcttcacagctgcccctgtgctcgcccaggcggctgaagctagtggacaatcaacagagtcgcaggcaaaggtgagcgccgcagagcgcaagttgcaggaggaaaagcacgatatactggtgaagatgcgtagtttccgtcctggtggtaccgtttttgaactcaacaccactcaaaagtccacgcagtttatcgttatgaaggaaaaacgaatgcagcatgcggaagtaatcaacaagtttaggcagcagcgcgcagaagaggacatagacgaggaaaagaaaacgatcgaggcgctcaacccaagctcaggcagaatgcccaccgccgacgaggaagctattagtagtactttcaataaagtcgttgcgcccaagaggctccagaacatggacgccctttacaaggacaagccaaagaagaaaaagcggaagataaacagcaaggacgaggatcactatgtgccgtaccagtcggcagacaagcacacagaggatggtctggccattaacaactttgagcggcaggcgcagaacgccgagttttcggtgtcggaccgcgacttatcccaggaagtgaagcacaagcccggccttaagaagtgggaccgaattaagaaaaaaatggtctctgtacaagatccgcgagccaacaaaattcggaccgagtccggtgcgtggattcctgcctcctttaaaacaggtcgttatgctgagtggaaggagaagtctaagatcgaggaccagctgcagcgcgaaaatgcaggtagtgatgacgaaaacgccaagccgttgagccatgcccagcgctacccagtcagtcgtcatgcgcggcacaacttaaagctagaacttaagaagcgactgaccggaaacgacaaggagatgcgccgccccgagcaaattgtcaagtctcgcatgcgactggagttcattaaaaagcgcaacgaagagaacgcagagaggaaaagcgaaaaccgcaagcgcagcatgcggaaaacgcagcgccccaaagctcaatcaactgggggctcgaaaagaaggaagtag

SEQ ID NO: 15354 - protein, 1390 aa, DROSOPHILA
MHSLGASKVVATLRADGHVYPMENSNLMHYEIRTEGDVQQKKGILVGPATCVDLGKQLLQCARDSDVAGVKAALAHGAPFASDWLGMSALHFAAMNNQLEICEILLQGGINMDGKTKVDRTPLHLACYYGHERIVSLLLALKCSVNSRDMLRMTPLHWAVEKKHKGIVRLLLKCQADVTLVSKFGKTPIGLAVYTEQADVLAELEAARQAQASKKLHEESEKETNEAVSSIMDEPEVIKTVDDKEMSVEERMDVLENMRGHANVLRNTALYILKTHEIADMVQDNDDEDSKEMLNTALQNGRQLVLSEGGRMLLHETKSGISGKQSTNGNARPSVAALRTNVNNSHPKIRMNVLKQKDLPSPAGVAKNKKLYGSDSTAKSLQKIPASLASSGMVRHLPDGTKLVNMRQLQARQLKLPSLQRPQDLTALEESHSQNEAAVPSPLPSGHPASGSSLRGQVGTVQTIQLRPSLSAGSGQGAVNNGAAPGKTIVNATKQSPKSPNVMPLLTSSEICRQLHELRRQNEDLRRRADSFQREKEEMLRRIDRLEQMVLVQESEADLDFGEDRKKQADEIPGFPSLDNDAGTSDRGADILKSKSKKNKSGGFQSMGLGFELIKGITKRGYKVPTPIQRKTIPLILEGRDVVAMAKTGSGKTACFLIPLFEKLQRREPTKGARALILSPTRELAVQTYKFIKELGRFMELKSILVLGGDSMDSQFSAIHTCPDVIVATPGRFLHLCVEMDLKLNSIEYVVFDEADRLFEMGFGEQLNETLHRLPSSRQTVMFSATLPKLLVEFARAGLNDPVLIRLDVESKLPDALALKFLYCRPDDRYTALVVLLKYVIPVQSQTVVFAGTQHHVELISYILTEAGISNASVYSSLDPAARKINTAKFVNKKVSVLIVTDVAARGIDIPSLDFVVNLHFPGKPKLFVHRVGRCARAGRTGTAYSIVSTDDTAHLLDLHLFLNRPFNIHDSSALGTIPQDLLEEEHLTVTDIKKSHHIAGVLRTSENAYKKYLSSRPVASTDANARVKKIKFFALKPLEDFFTAAPVLAQAAEASGQSTESQAKVSAAERKLQEEKHDILVKMRSFRPGGTVFELNTTQKSTQFIVMKEKRMQHAEVINKFRQQRAEEDIDEEKKTIEALNPSSGRMPTADEEAISSTFNKVVAPKRLQNMDALYKDKPKKKKRKINSKDEDHYVPYQSADKHTEDGLAINNFERQAQNAEFSVSDRDLSQEVKHKPGLKKWDRIKKKMVSVQDPRANKIRTESGAWIPASFKTGRYAEWKEKSKIEDQLQRENAGSDDENAKPLSHAQRYPVSRHARHNLKLELKKRLTGNDKEMRRPEQIVKSRMRLEFIKKRNEENAERKSENRKRSMRKTQRPKAQSTGGSKRRK

SEQ ID NO: 15355 - DNA, 6901 bp, DROSOPHILA
cgagctgataattgtgataaaaaactggccaacggcacttgcgaactacccaacaatggacatgcaaatgtcttgaagaccgaattagatgtggataagattgtggcggttgtaaatgagaattgcgccgattgtgtgggacccacacaacagccgacacataatgataatctcaaatccctgagcgccacaaaggcatccaaaaatgtgggtgactttctctgcggctatatctatctgaaatcgctcgatatggacagaaaacgaagcctgtttgtccatgtacctcctgtagataggccatttagtagtgttaagacttcggaaatactttttagcatagtcgaacaatgcattcaacaggtggtcgcttttgactcctgaattccgcaaaatattcttccaatatctgtctttttaagaattatttacatgtgtgctgttaagttgtttaagaaatgagttttattctttttaagatacaatattttatatttactttttattacaatgaaacagagaagcaatacaactgcattaataattacacagtcttttttgcgtttacacaacaccagtctttattttaaaaagggtaaatgacataaagagaatgacgtaagttatttaaaataaaatttaataaaaaaaatgaattaaaaagaagaattataaggcctttacaaattgccttatgttaaatacaagttaacttatatacaatacaatacgatactatttatatcacaatattttaaaattatggtattcgaaaaaaccgtaatatttaaaaaaaaaatagtacattactgaattagttaaatataaaaataaaacttcaaatatataaacgagatcctaaactaaaaaaatttaccttcgacgattgccaacctttgggcacccaagcgccacctacagttcaatgctcattcattgacaaatatcgatattagtaaaatttatcggaaacttgtagagaaataccaaaaatccctcacctaattcagctttatatgtatatatctctgcgtttcactgtcacttgaattcatttgaatttctacttgcaaccgggcaagttcagcgcagttcgaatcccagttttggttggcgagtgtgctgcacccacatagggcaatagattcaataaatatcaaacgacgacgagtgcccgcaatgaaattcctgatctgtgcacttttcttggcggcgtcctacgtggccgcttccgccgaggcggaggtcaaagttgaggagggtgttctggtggcgacggtggacaacttcaagcagctgattgccgacaacgagttcgtgctggtcgagttctgtaagtacatgcttagatcgaaaataaggcacgaaaatctcaacaaaatgtggcaaaaatcgaatatcaaaatgcgaaatgcgccggccgctagcgcgctctcactcgcacccgctgattcatgcggcttagcggctacgtggtctttcaaagcgtcggagaaaatctgtctgcgtggcagttgttgttgacttgaaatctggactatcatgttgcacggcaaatcctagttgatcaatgggccaactgacagactagttccaatcggcggcctggaaaatttgtttagttgattttccagcaaatttatcgtttgtttaactgtttttatctctctcgcgtcatcttgtgttttttttgtgacgggcagggaggagcgcgctctctcaaacgcaagtgccatctcttttccgcacctgtgcacgcaagcgagaaggccttatagccttatactgcagtactacttgttattgttgtcgccataaacctgctataattttgtattcttgcaaatactaaatgccaaaggaaacaataagttgtgcgcagcatatgctttgcgttttatcgacatttctagttattgttctaacactgcgcccgtggggcgtggccacagcatatcacacatccgcttcaataatctccgactgagaatatctaatggaaacaaaaggcaacaaaaagttgtcgggcaactcatctcttctcctcccacgaatctaggttagcctgagcaaaccaaaccactttttattcgccatttgctttctctggttcgttctgtttggattttttggttctaattctcacttacaatctggtttctgtccctttttccacggcggcgcaacggccatacattggaaagttcattcaactctttctctgcgtctttgcgcgtgcctaacggtgttgcgtcgccagtgatgctcggcacgagcaacagattagtgtgcatggtaattagctagaaaatagccagaactgggaaagaggtgtaattatatactgctgtaaaatgatttaaaatgttcatttgaaaagagatctgacctttagaaaatttttgttttatattatgagcaaaattgtctattgcatgtgttaaaagcctacaaacggcctgcaaaatattcgtaacggttatttgtataacatttttatatataatatatacagcttaggaatagacagtgaacacgctgaaaaactaattacacaaaccttaaacttaatttgttatttgttcatgtatttccaagccgtttctcaacattgacgagttagataagacaacagtttttaaatactttgtaactgtaagttatgttttttttttaataacgaaatccttaggtaagccgccccactattcttcaatgaagttttatgttcttctaatgacaactcgaaaaaatcaatcttgttatctagcaagagataaacgtaaatcagagatactaaaaagtcccccattcggcgttaaaccgccagaaatgctagcctggcatctttggttgccagcaatatggcggacttgtgagtttgtttatgccagcgtttctctcggtgtttgcttaattaactttttcacattttgcaccttaatttttttttttttttgggagttggtgacaacgtcacccaggtcggtaatggtctgctcctccaaggctgggctcttatcttctgtagagaatgcaaagatgttcgtggaagcggaaccaatgccagggccacgtcagccgcagctataggcaaatcgcaagaagccggcgataaggcggcattcaatatgtataatacgacaatcccgattgtgaacgttgtcaagccgggcattatgtcatcttcaactgctggtgccccccagttctcattcaaattcgagtgcgtggatgcgtacctaattgcagtcgtggctccgaggagctgcacttgggcaatgggaattcaacacgtggaatttgcataatgacagcatctgctgattgttatagcgggctcattcctaggggcgctgctccagattcgtggcaaatctagcgcataattgtcgctaatagtttggaactttacactcggtttaatattcaacaaaagggtatagaatatataatcaataactgcgaaaggaattttaatgtaaataattccgattaattcacatgccatagaaactgatgaagatagtcatccgtatgctaatgaaaccaattagaaccaacgttcagattacaattttgaaaccatttatgccaggcagtcaagcttttaattcaatttaccaaccaactttggtattttacagttgacatggtacaaataattaagtttatctagatcttcatttaatttatgtataataataataaaaaggtcaacataatattacatttacactgtttataaatttaaaaatcagaaataaaagtacattaaacaataaacctatttttctaacaagtcaagctcttacaatttataaggcaagctaaatagttcacaattcaattaaaagctaataaattctatattgttgggatctataaaaaggtatatcatacgtgtaggtcgcatcatgatgacctcgacaaaatataaatctgagagcaaatgatgctgtttgttattcacttctagaactaataacaggtatgcagttttaccttcttttaagtggtctaattgcaaaccagtttataagctctcccaagtttgatcaatagtctttcgtttgctaactgtagtttcttttctgaatctttacagacgccccatggtgcggacactgcaaagctctggctcccgagtacgccaaggctgcccagcaactggccgagaaggagtcgcccatcaagctggccaaggtcgatgccaccgtcgagggtgagctggccgagcagtacgccgtccgtggctaccccactctgaagttcttccgcagcggctctccagtggagtacagcggtggccgccaggccgctgacatcattgcctgggtgaccaagaagaccggcccaccagccaaggatctgaccagcgtcgctgatgccgagcaattccttaaggacaacgagatcgccatcattggattcttcaaggacctggaatcggaggaggccaagaccttcaccaaagtcgccaacgccctggactcgttcgtctttggtgtgagcagcaatgccgatgtgattgccaagtacgaggctaaggacaatggagtggttctgttcaagcccttcgacgacaagaagtccgtgttcgagggtgagctgaacgaggaaaacctgaagaagttcgcccaggtgcagtctctgcccctgatcgttgacttcaaccacgaatctgcttccaagatcttcggtggctcgatcaagtcgcatctgctgttcttcgtgtccagggagggcggccacatcgagaagtacgtcgatcccctgaaggagatcgccaagaagtaccgcgacgacatcctgttcgtgaccatctcgtccgacgaggaggaccatacccgcatcttcgagttcttcggcatgaacaaggaggaggtgcccaccatccgtctgatcaagctggaagaggacatggccaagtacaagcccgaatcggacgatctgtccgccgagaccatcgaggcgttccttaagaagttcctggacggcaagctgaagcaacacctcctttcccaggagctgcccgaggattgggacaagaaccccgtcaaggtgctggtatccagcaacttcgagagcgttgccctggacaagagcaagagcgtgctggttgagttctacgccccatggtgcggacactgcaagcagctggcccccatctacgaccagctggctgagaagtacaaggacaatgaggatattgtcattgccaagatggactccactgccaacgagctggagagcattaagatctcgtccttccccacaatcaaatacttccgcaaggaggacaacaaggtcatcgacttcaacctggacaggactctcgatgatttcgtcaagttcctcgatgccaacggtgaggtggccgattccgagcccgtcgaggagaccgaggaggaggaggaggcgcccaagaaggacgagttgtaaatccaacaattaccacacacccacacaaacatctgcacacacaaaaatccaacaactatgaacagaaacaaaaagccacaactagcaacgtacattctgtagtttacttcttaagtttcggcgcatgtgggccaccggagtttccccattcgccggctgagtttttatcagtcggaggatggggtcagctggtcgccagtgtagccatcgaagctttttgcccgcccacggtttttattcgcatacttccgttgtatgtagtacatttgcgacgcagataacgatgattacacgtccgctgtttgcatgaacttaaaattcagttttaatgaagaattaaagaaaacgataaaattttaaatgtaatactataagttttctattttggaatttttagaatcattgaaagaactgattaagaacgtaacaaataaagttggtaacaacattaaaacaataacattggtttttaagggggacggatttgtaattgttttgagggattttttaaattttattggtgcacttactaattgggcgtgtacactttatgtgtgcatagcgccttattttggaaataatgaataaaatatattcaatttgttgagaggaaaatttaacgttaaagtacaattgtcttagttttgacatttgttttcaaatttaaatttgccgcttacttatcgctatcgaaatttgatctctcttgacaattatttaagtatcgcgttcataagtgtaagaaatagtgttatttattcagaggtataaacttttgactaaaaatacgcatatagaacaaaaataattaaaatgtgtgtttttcttgtttcgatagttccaaaaatatcgatactagataccgaggactagcagcttgtgtagtgctgtgtaatttagaaaattatgtattgttctcgtatttcaaatttcctgtttatacagtagcttatactgattaaggaacttacaaaattttctttaacaaaattaaatatttcgatgaatatggttattgcgtttcgaataaaaataatagagtcctagctaaaaaaaatactgtgagaaattacattttatatatattataaattttaatataaaatatacaaaaatgataatactatcttgtagaatgtattgtagtaatttgcttgtgcatcggtacgatgaaacgtccaattattattaccgagtaaaattcgtgaattcgtgtacatgtatcggcaacaggacgacgctctccaacactgccaaaaaaaagacggcatctgctggcttcgtttccacgttgtcctgaattacgcattgagatgaaaccattaaaaagtgcacttgaatatttggataattacgtacggcgagctcatgaaacacacctgcgaataaagcacatatttcagctgattagatagtatttaattcagaaaggaaaacaaagagcgacgagtcctgc

SEQ ID NO: 15356 - DNA, 2126 bp, DROSOPHILA
cctaattcagctttatatgtatatatctctgcgtttcactgtcacttgaattcatttgaatttctacttgcaaccgggcaagttcagcgcagttcgaatcccagttttggttggcgagtgtgctgcacccacatagggcaatagattcaataaatatcaaacgacgacgagtgcccgcaatgaaattcctgatctgtgcacttttcttggcggcgtcctacgtggccgcttccgccgaggcggaggtcaaagttgaggagggtgttctggtggcgacggtggacaacttcaagcagctgattgccgacaacgagttcgtgctggtcgagttctacgccccatggtgcggacactgcaaagctctggctcccgagtacgccaaggctgcccagcaactggccgagaaggagtcgcccatcaagctggccaaggtcgatgccaccgtcgagggtgagctggccgagcagtacgccgtccgtggctaccccactctgaagttcttccgcagcggctctccagtggagtacagcggtggccgccaggccgctgacatcattgcctgggtgaccaagaagaccggcccaccagccaaggatctgaccagcgtcgctgatgccgagcaattccttaaggacaacgagatcgccatcattggattcttcaaggacctggaatcggaggaggccaagaccttcaccaaagtcgccaacgccctggactcgttcgtctttggtgtgagcagcaatgccgatgtgattgccaagtacgaggctaaggacaatggagtggttctgttcaagcccttcgacgacaagaagtccgtgttcgagggtgagctgaacgaggaaaacctgaagaagttcgcccaggtgcagtctctgcccctgatcgttgacttcaaccacgaatctgcttccaagatcttcggtggctcgatcaagtcgcatctgctgttcttcgtgtccagggagggcggccacatcgagaagtacgtcgatcccctgaaggagatcgccaagaagtaccgcgacgacatcctgttcgtgaccatctcgtccgacgaggaggaccatacccgcatcttcgagttcttcggcatgaacaaggaggaggtgcccaccatccgtctgatcaagctggaagaggacatggccaagtacaagcccgaatcggacgatctgtccgccgagaccatcgaggcgttccttaagaagttcctggacggcaagctgaagcaacacctcctttcccaggagctgcccgaggattgggacaagaaccccgtcaaggtgctggtatccagcaacttcgagagcgttgccctggacaagagcaagagcgtgctggttgagttctacgccccatggtgcggacactgcaagcagctggcccccatctacgaccagctggctgagaagtacaaggacaatgaggatattgtcattgccaagatggactccactgccaacgagctggagagcattaagatctcgtccttccccacaatcaaatacttccgcaaggaggacaacaaggtcatcgacttcaacctggacaggactctcgatgatttcgtcaagttcctcgatgccaacggtgaggtggccgattccgagcccgtcgaggagaccgaggaggaggaggaggcgcccaagaaggacgagttgtaaatccaacaattaccacacacccacacaaacatctgcacacacaaaaatccaacaactatgaacagaaacaaaaagccacaactagcaacgtacattctgtagtttacttcttaagtttcggcgcatgtgggccaccggagtttccccattcgccggctgagtttttatcagtcggaggatggggtcagctggtcgccagtgtagccatcgaagctttttgcccgcccacggtttttattcgcatacttccgttgtatgtagtacatttgcgacgcagataacgatgattacacgtccgctgtttgcatgaacttaaaattcagttttaatgaagaattaaagaaaacgataaaattttaaatgtaatactataagttttctattttggaatttttagaatcattgaaagaactgattaagaacgtaacaaataaagttggtaacaacattaaaaca

SEQ ID NO: 15357 - protein, 496 aa, DROSOPHILA
MKFLICALFLAASYVAASAEAEVKVEEGVLVATVDNFKQLIADNEFVLVEFYAPWCGHCKALAPEYAKAAQQLAEKESPIKLAKVDATVEGELAEQYAVRGYPTLKFFRSGSPVEYSGGRQAADIIAWVTKKTGPPAKDLTSVADAEQFLKDNEIAIIGFFKDLESEEAKTFTKVANALDSFVFGVSSNADVIAKYEAKDNGVVLFKPFDDKKSVFEGELNEENLKKFAQVQSLPLIVDFNHESASKIFGGSIKSHLLFFVSREGGHIEKYVDPLKEIAKKYRDDILFVTISSDEEDHTRIFEFFGMNKEEVPTIRLIKLEEDMAKYKPESDDLSAETIEAFLKKFLDGKLKQHLLSQELPEDWDKNPVKVLVSSNFESVALDKSKSVLVEFYAPWCGHCKQLAPIYDQLAEKYKDNEDIVIAKMDSTANELESIKISSFPTIKYFRKEDNKVIDFNLDRTLDDFVKFLDANGEVADSEPVEETEEEEEAPKKDEL

SEQ ID NO: 15358 - DNA, 3618 bp, DROSOPHILA
aaacatcaagtacacagttgtcatttgcatttattcggtttcagtgtcttccatacattcccttgcactgcggaaagaacataaatgtagtggtaatggacaacacattcatccagtgcggctttatctactgcacctccatagatctggcttacgaagtcaccaaaatgcagcgagacatacaggagtatggtgaaaagattgccaagtgcgcaacctacgcaccgccgtaaagttactcgccgttttcttttgtccatttaactaaagcgctctttcatttaggataaatgagctttgcatagctaagtacgaaggcaaatggcgtcgaggtctctctgtggagttagtaggagatggttatcccagcattttgttcattgactacggaaacatagtgccaacacatgtcaccgacatacgtccctatccgccgcagtttatcttccctataatgaccacacagttggatttaattggtaattaggctctccaaagataattatattatttatatgactcgattttcgtaggagtgcctgagaagcccaccgatgagcagatcaaatggctggataaaaattatcccattgggtccgttatcacctgcagcgaaatcactttcgacgaggaaacaaatagctactccactcgcattgaaaaactgcaggagttcttaagtttggactaagttctcaaaaggttgattccgcgaaatagttcagaactaattatggccaaaaaaaagcacaaatcttccaggttaactcaactgctaagcatttagttcaacaaaataattttgtttacatttatattcttgaagttaacgttttgtttgtttaagtttttactctcacttttcttgaataaaccagttgaatacaatccagactatccgatatagcagtttcctgtaaggtcacattgatttacgcaatttaagttagtaaaatgtaatacaaatctcacctcaaagaaaacacggtcaaaaggtggctcacttttggtccagtccgctagattctataggttatcaatgcaataggtgatttattaatatgataagaattcgaagtactcacattagatgcggtcggtataagctggctgcggcaattctgaagatcttctatagaatcatcacccatatgcccatagaactgcaactcctccggagaacctccggctgtgatgagagtatatattttggtatccattgctccaacggccagcagttggttggcttgctgcctggaattgtgattataaataattaggtgtttgcagcgaagagctcgaagcgccgacaagtcactggtcaaaatcaagccaatcattggttctccatcggcaagagaattaaataagttcactttttggggaccatctagctgcgcatggtccaaactataactctgacagtatcccctgaccagggtgaggcaatcctcactgtttgccaagatgcagcacttctcgcctcgctccgccactaagtgatccagcattacgtgtagaaactcgaacttggcggagtcgtaaagtcccatgcttggccaaggcggcagtatggcgtccagtacctccattatttccttaaacactggattcgtacccaaagtttttaggagcacaggatgatcacatacaatttggaagatttccttcaacgtagacgattcctgaaatacaagttttttgatttgtttatgcatgtaaattggtctaaatctatcttactgttttagatgtttgtgcatattcagaaacaaagagtaatatttttttctgcagttcagctggagttaatagacacagatattccgattgggtgaactccttggtagggttttctatcttcaaagtgttttgttcatagattttctttcccatcgaagtgctggaatcggcggctgcataggagacatgtttatcttctctatgttggctaatttccaaatgcggtggagcaaaggcatctgcctcgcgcttgatcttcttgagcagatgagacctaacgggtgcactgtcagcaggtggtggcgatgtgtctgtacaaccattctgggcatctattttttggcaccagttggctatttccaactggcgctgaataaggcactcctcgacggttttaatctcctcctgaatctcgacatccttgctgcctacttccagctgatcgttctcctgaagttgccgctgcttaaagtatgtcatggtgtccacaaccttgccggtgtcatccttcaatgttactatggatcccgtgaccaccagcgttccgttgccagtccacgttttgtgctttttggtggtctgattacgccagagcacatggaagatgcggctatctttgaggggattctcgcccgccctgaattctcgaggtcccaggctttgggtgccccctgaggtgccccattcgctgggtagattgtttttgggccaggagcagggtgactgtggttcctctttgggaggcgccgcttcgctctctcgctttgcagcgcggcgcatggaaggagctttggaacgccgctttatggtgctaaagaagaggattaccgggtatagttcaccgtaaatacataagttaatttaaaaacttttgctatcaacaaaatataaatatacaaggcgcaatctattttcaagccacttgtaagtgtggccaatgaagtgaacctcgaaaggtattccgaaccctggtcacactggcattctgctggtagccggctctggatgattttctgatagaaatctcgcagaggcagtggtgtttttgtgaatcccctcagccacgatggcgttccactggtgcgacaacaatctgcacaccaccgtgttcacgccgcgcgactttcaggtggagctactggccaccgcctacgagcggaacacgattatttgcctgggccatcgaagttccaaggagtttatagccctcaagctgctccaggagctgtcgcgtcgagcacgccgacatggtcgtgtcagtgtctatctcagttgcgaggttggcaccagcacggaaccatgctccatctacacgatgctcacccacttgactgacctgcgggtgtggcaggagcagccggatatgcaaattccctttgatcattgctggacggactatcacgtttccatcctacggccagagggatttctttatctgctcgaaactcgcgagctgctgctgagcagcgtcgaactgatcgtgctggaagattgtcatgacagcgccgtttatcagaggataaggcctctgttcgagaatcacattatgccagcgccaccggcggacaggccacggattctcggactcgctggaccgctgcacagcgccggatgtgagctgcagcaactgagcgccatgctggccaccctggagcagagtgtgctttgccagatcgagacggccagtgatattgtcaccgtgttgcgttactgttcccgaccgcacgaatacatcgtacagtgcgcccccttcgagatggacgaactgtccctggtgcttgccgatgtgctcaacacacacaagtcctttttattggaccaccgctacgatccctacgaaatctacggcacagaccagtttatggacgaactgaa

SEQ ID NO: 15359 - DNA, 1286 bp, DROSOPHILA
gcaaaagtttttaaattaacttatgtatttacggtgaactatacccggtaatcctcttctttagcaccataaagcggcgttccaaagctccttccatgcgccgcgctgcaaagcgagagagcgaagcggcgcctcccaaagaggaaccacagtcaccctgctcctggcccaaaaacaatctacccagcgaatggggcacctcagggggcacccaaagcctgggacctcgagaattcagggcgggcgagaatcccctcaaagatagccgcatcttccatgtgctctggcgtaatcagaccaccaaaaagcacaaaacgtggactggcaacggaacgctggtggtcacgggatccatagtaacattgaaggatgacaccggcaaggttgtggacaccatgacatactttaagcagcggcaacttcaggagaacgatcagctggaagtaggcagcaaggatgtcgagattcaggaggagattaaaaccgtcgaggagtgccttattcagcgccagttggaaatagccaactggtgccaaaaaatagatgcccagaatggttgtacagacacatcgccaccacctgctgacagtgcacccgttaggtctcatctgctcaagaagatcaagcgcgaggcagatgcctttgctccaccgcatttggaaattagccaacatagagaagataaacatgtctcctatgcagccgccgattccagcacttcgatgggaaagaaaatctatgaacaaaacactttgaagatagaaaaccctaccaaggagttcacccaatcggaatatctgttgtttaaggaaataatggaggtactggacgccatactgccgccttggccaagcatgggactttacgactccgccaagttcgagtttctacacgtaatgctggatcacttagtggcggagcgaggcgagaagtgctgcatcttggcaaacagtgaggattgcctcaccctggtcaggggatactgtcagagttatagtttggaccatgcgcagctagatggtccccaaaaagtgaacttatttaattctcttgccgatggagaaccaatgattggcttgattttgaccagtgacttgtcggcgcttcgagctcttcgctgcaaacacctaattatttataatcacaattccaggcagcaagccaaccaactgctggccgttggagcaatggataccaaaatatatactctcatcacagccggaggttctccggaggagttgcagttctatgggcatatggaatctagcggactggaccaaaagtga

SEQ ID NO: 15360 - protein, 396 aa, DROSOPHILA
MRRAAKRESEAAPPKEEPQSPCSWPKNNLPSEWGTSGGTQSLGPREFRAGENPLKDSRIFHVLWRNQTTKKHKTWTGNGTLVVTGSIVTLKDDTGKVVDTMTYFKQRQLQENDQLEVGSKDVEIQEEIKTVEECLIQRQLEIANWCQKIDAQNGCTDTSPPPADSAPVRSHLLKKIKREADAFAPPHLEISQHREDKHVSYAAADSSTSMGKKIYEQNTLKIENPTKEFTQSEYLLFKEIMEVLDAILPPWPSMGLYDSAKFEFLHVMLDHLVAERGEKCCILANSEDCLTLVRGYCQSYSLDHAQLDGPQKVNLFNSLADGEPMIGLILTSDLSALRALRCKHLIIYNHNSRQQANQLLAVGAMDTKIYTLITAGGSPEELQFYGHMESSGLDQK

SEQ ID NO: 15361 - DNA, 5299 bp, DROSOPHILA
gctgttcgcacggcatttttgggccagcaaacaggatgcggaaaaccggaagctgggaactggaaatgggcaagaatctggtttttggctgccattcaattaggtatcggtcagcccaattcaactgctgctaactggcaactggagatttggcgattgcagctgcccattgtcaacacttcaattaacgcaatagcaggtaaaaaggggacatcttttcatcgagatctcgaccttgttttgctatccttgcaaacaattgatggtatgtcgtaagtttgtgcgaataaaatggttttggaaatatatatatatattgtttattagtttatggccccaaaaaatgctacaacacaatattgaaaccgttgttatctgaagggaatgcaacgattcgagcttcatattgagaaggtcctgttttctctctgttcctgcatagttcctctttcatttcgcatctttttccactggccgcagtctcgcaggatatgctaactaaggactatgccaccatattcgacaatttgttgggcaccaagttaatatgcattgatgcgttattcatacgccccgtgggacgggcgaatagcaaaactctcaatgggcctttgttaatttgtatgtgtgtgtatgtgtattttgcgtgtatttgatttgatgcgtttagtacttaggataacaattacgtttaggttaactagcataaatctataatcatcacattatggcacaatgtatgttatgtagtatatatatatcgtatatatagagagactgatatacatagatatcgattgatataacaaattaaattttcagctaaccgcacgcttcaactgaatcacttttgattcaatcatctcacttgtgattccgcgtgatttgctggcaaatttaaagccctcttctcgtgtttcatgagaagtttcatgatatcatctatcactcctctcatggagtttaaaaccataaatattttattataaatattcactattcacgctatcaggcgacccgtattacgatttcgacgacttccggctccgccataattactaccataatgatcgccatttatttgggtcagtgtagtcgttgtatgcggcacatagagactcgtattgttacgcgcatgtcgacgtctatagcgatatcccgttatcagttctcgaaccgtctttcggtacttatcggaaagtacacagtatagaaaaaaattggatgccgcatgtagggaggccaataggttacacacatttcccgccaccacctgagtgccaatttgaatttccatatactgattgactatcaaatagatcgcccaaggcaattggcaaactatgaacattaacaccaccgcaataagtgtgatcgtcacgcgattttcctgcgatacgctgccttttagtccagaatttgatttgcgctaaggattcagaatttatacaacatatcatcatcatcatcatcgtttcgaataactcacttttgtgcgccttatgctgctggcattggtcaggtcaccacgcagattcttggaccgatgaaccaatagaatgagaatggagttgaaggtggccaatagaagtagggggaataccacgaagaccagcagggtgaacaggttccacagatagctgtatagctcatcatagcccagttccgaaagaccatgattgtaataggtcacctaaaacatatagatagatacatagaatacatacatagatttccattaagaacaaccttttaagcaatggaatatcccaagcgactaagtaaaagcatgtcttacaaaacccaaagcactgatatcattttaagttatcaccgaatttatcatagtcatggcgcttgtacaccgctcgtgattttcactggttaacaattttctcatgtttttttctccagggaaatcgacggtatttccaacattattttactcacattttgacagtattccgttacgttaaatgcgaatgcatccgtattgttgatgttgtgattctcagcgctgcgcttgcgacgccacaattgcagcaaactctctgtgacccctgacctctgggccgcgtctgccaccttctgatcctgctcctccagcgtttttctcagtgtgggcagcgtcacaaatccagatgactgccagtgacggcgatgtcgtggaatgttctctagttgagggcaaagaaagtaatgcaactatcaactacttcacttataaagctgtctaaaagtatgcttcgtacttttcaatgcatacttctaagcatctctattaatacaacttcgatttttccaagtgtacactactgctataccctcgttactcacctggctctccatcaccactgccactgccccagtcgacgagctgattagagctgccggacgtcgtggactccatggcggagtccggcgattgccaaatggtcgccggcgtgggcagcgggggcgtggccagtgggggcgtgactgccacgggtggcggcggcatgggcgagatgttggccaccgtttggttgcacggctggtaggcgtcatcaatctgcctagtaccaatcgtaattgtatgctcgaatgccgtcgatagtgtggacagcaaacagaagatggccaccgctggcaatgtagaatataaagttgcatatggaaatggattctattgttacatacgcctatttcagccaactcacctgctatcacctttttggccagcgattccgtgcagaatgtttgcctcttgagcggatagcgtatcgcaatgaatctctcgatggtgaagcacacggctatgtaaattgagatgtaacctgtccggtaaaaacagagaaagcaattgtgaatgggggcgtggcagtacaatacgaacgcaatcaaagatgcactgcaaatattttgggaaaatccaatccaaaaaggatatatatacatatatatttattcaggttaagtgtctaatatagattggtaaattaaattcaaacttcggttagactgtgccttttttccgtgtactctggaattataaataaacgcagctccgctgttaataccccaaaccatccatttttgaccgcaccaccaatttatttgccgcgcgggctgtcaatttattcaaaacgcagcgcactctaagcgattgacgtccgtgctgtgctgatgaggttgctgcgggagggtgggatattcaaggggggtgaggggggtgaaaagtggggtgggaaagcggaaaacggttcggaaaaacgctatcgcatggcagtgagcctcagctgaccgctggcatttcgcagaaagcgctgcttactatacctcgtaaattggcagagctcaatgaaattgatgcacaacagaaacagcagcagcagcagcagcagcagcagcagcagcagcaacagccgcaggtgcaattcgaattgatgggcccatcgctggaatccggttgatacggggggaaatgggggatacattggatccggggatccagacgaggctaacccggggaactggggaatttatggaatccgcaccattccacttagtgctctccaaacgttgcattcgaactgtttttgttttttgcccccggcagcaattgttttcaccgcatgatatgtacgcttttcttattgtagttttgcgggaataatgttaaatataaaaacacccttttggtaaattttttcaaattgaaagcttatttaagcataaaatactcgtgtttcgatttaaagaacactaatcgagttactttcggtctcacaaccttatttattgcatactttgcgactgctttgaattattgaattattactccattgctacttaattctaatttggtcagtactcaccgaaactgtcgcacagccagacaaaatagccatagagctgccagtagagcttgaaatgatacttgggatagtcatagtgctggagtgacaggattaactggcacgtcaggtaggcaatatccgtaatggccagtgccgttagatatatgttcgtcgtgcatctcatgcgctttctaaaaataccgtcaagaatatcgaaaagaattgcaaatggtgttgattctgttgggcactcgacgcatttggaaatcaggccaaaccatttcggtggacaatgcaaaaacgctgccaagtgcaacaccaattgaaatagcaaattgcctgaaagccaaacgatcggtggggttgtgcgcagagggggtggaaaattccaggcggttgatgtgatgggcgcggggccttgggcattttccgaaatgcgcacaaatgtcggcacagtcataaagccaaaagatgaacaataaaaactaactgttagcatttagttttctccctggcatcgcccgcagctctgatagttaaattctcttgtattcccgtaaaacaaaataaaataacgtaatgaaaatatttaattaaaaagccattcatgccgtcaacgctcaatgttaagctagttgctttgaaaagttgtaaatatggtttaaaataataaagttcatgctataaatatcaataaattttgtttagcaaataaatgaatttgctaagatcttagcaaggaacacagtttatctttttttttcacgttttcctgggaaatggacatatggtgtcatagcagtcagcctaacgcacagagcacttgcaactgtcgcatattttccggcagacataaaaaacacacccatccacacagcatatcgcctatctgtgtgcgtttttgcatttggcacataaaatggctcttattgtttcagttactgttattgttgttgcacttgtacccaacgtagttgttgctgttgttattgttatcgttgttggctgtgtggaaatgattttaaagtgcagcggtggctacaattaaatgtcgtgtttaatgcgctgcgtacctgctcgccgcttcatccatgttccacttatttcacacacacagacacacacacacacgcacaacaggacatgcagttggatgcacagagagaaaatcgtgcaagttagctggcattttaaatggaaaattgtaacttaaaactagtttaaaacaagctcaaacgaataagttgaagtttggaataaaattaatttgaaaaggctcatatattttatatgcattgcatactttttagtacttaaccaaatgcatgaaaatccaattagtcgcttttgcatacctaataacttaacattcttaacgtggcagctaaaacttctttcaaatgccatcatcagctaaatgattcatatttaattcgaaaatcttgtgaccctgctgcatg

SEQ ID NO: 15362 - DNA, 1467 bp, DROSOPHILA
atgactgtgccgacatttgtgcgcatttcggaaaatgcccaaggccccgcgcccatcacatcaaccgcctggaattttccaccccctctgcgcacaaccccaccgatcgtttggctttcaggcaatttgctatttcaattggtgttgcacttggcagcgtttttgcattgtccaccgaaatggtttggcctgatttccaaatgcgtcgagtgcccaacagaatcaacaccatttgcaattcttttcgatattcttgacggtatttttagaaagcgcatgagatgcacgacgaacatatatctaacggcactggccattacggatattgcctacctgacgtgccagttaatcctgtcactccagcactatgactatcccaagtatcatttcaagctctactggcagctctatggctattttgtctggctgtgcgacagtttcggttacatctcaatttacatagccgtgtgcttcaccatcgagagattcattgcgatacgctatccgctcaagaggcaaacattctgcacggaatcgctggccaaaaaggtgatagcagcggtggccatcttctgtttgctgtccacactatcgacggcattcgagcatacaattacgattggtactaggcagattgatgacgcctaccagccgtgcaaccaaacggtggccaacatctcgcccatgccgccgccacccgtggcagtcacgcccccactggccacgcccccgctgcccacgccggcgaccatttggcaatcgccggactccgccatggagtccacgacgtccggcagctctaatcagctcgtcgactggggcagtggcagtggtgatggagagccagagaacattccacgacatcgccgtcactggcagtcatctggatttgtgacgctgcccacactgagaaaaacgctggaggagcaggatcagaaggtggcagacgcggcccagaggtcaggggtcacagagagtttgctgcaattgtggcgtcgcaagcgcagcgctgagaatcacaacatcaacaatacggatgcattcgcatttaacgtaacggaatactgtcaaaatgtgacctattacaatcatggtctttcggaactgggctatgatgagctatacagctatctgtggaacctgttcaccctgctggtcttcgtggtattccccctacttctattggccaccttcaactccattctcattctattggttcatcggtccaagaatctgcgtggtgacctgaccaatgccagcagcataaggcgcacaaaataccgaaagacggttcgagaactgataacgggatatcgctatagacgtcgacatgcgcgtaacaatacgagtctctatgtgccgcatacaacgactacactgacccaaataaatggcgatcattatggtagtaattatggcggagccggaagtcgtcgaaatcgtaatacgggtcgcctgatagcgtga

SEQ ID NO: 15363 - protein, 488 aa, DROSOPHILA
MTVPTFVRISENAQGPAPITSTAWNFPPPLRTTPPIVWLSGNLLFQLVLHLAAFLHCPPKWFGLISKCVECPTESTPFAILFDILDGIFRKRMRCTTNIYLTALAITDIAYLTCQLILSLQHYDYPKYHFKLYWQLYGYFVWLCDSFGYISIYIAVCFTIERFIAIRYPLKRQTFCTESLAKKVIAAVAIFCLLSTLSTAFEHTITIGTRQIDDAYQPCNQTVANISPMPPPPVAVTPPLATPPLPTPATIWQSPDSAMESTTSGSSNQLVDWGSGSGDGEPENIPRHRRHWQSSGFVTLPTLRKTLEEQDQKVADAAQRSGVTESLLQLWRRKRSAENHNINNTDAFAFNVTEYCQNVTYYNHGLSELGYDELYSYLWNLFTLLVFVVFPLLLLATFNSILILLVHRSKNLRGDLTNASSIRRTKYRKTVRELITGYRYRRRHARNNTSLYVPHTTTTLTQINGDHYGSNYGGAGSRRNRNTGRLIA

SEQ ID NO: 15364 - DNA, 3515 bp, DROSOPHILA
tgaaagcattcactcaccttcttgtgtgagtactcaaaaccatctacattgaacacgggaattatatgccaatcatagttatcggccaaacttcgcacatcggcatcctctgaggtcaaaagctgattgatgaaccatgtagcactggccgaagttatccattctctggcatgaatgttggactcgatgaaaatgccaggattgccagccttgtgggagatcttaatgcctctaatggttctcccctcgtaggacttgccaacaatgaactcctcggtcaccgagggataagcatttagaatctcgtccagccaggcctcaatctcttccagctcgtagtacttcgtccagccgaaggtggcgctatctgcagtcggcgtgacttgctcctcgtcgatacgcctgaatgggaatccaatcgttaactttatggtcttaaatgagcacgcactaatggttagctaatcgagcgatcttatcgactcgagtggcattaacccgtacgctgtgccgcattccactacttactcttggacattctcgatcataagctcactgctgatattattgaatttaagcagctcctgaaagtggttaagttctccaggactaaccataatatcaatctgcctacttcgctcgtcatactccttccaaatattgtactaaacacaaaagaattgattgggttacgtcatctgatctgtggtattaaacaactaaccttcttcgttagctcgccaattttctcgatcgcagccaattgaattttgttctggatagtgagcttgtataccctgaagttatcataacgctctttgggagagtccttaaggataccagcacttgttagagccaccagcgtggcaagcaaccaaagcagacgcattttgagcaatgactaaaattctgctgacggcctcgtgcttaagaaacataacacgttgattatctgcagttaatctttattgttttattgcacattgaatttccccagcacttacagcgcgctcttaagcccgagatagccgaggtctttacacttttctaatagggcagcaatgccgattagtgcctcctctgcgtttggaataatgtgcaccggtggcaggataaaaccatatcgaccggtgtccctaaattcaatggtatacgatatctccactccttgttcattgtatgcccaatcgatggtggctccagacgcgggatctgtgataacaatttaagtttacatacatgcaaataaaatatattgtccaaaatcttacaaagaatgcccgcagctgagccgtatctgtaaacggttccataaggtaggctctcaacagcatctccataggccttagcaacttccatcatatcatcaaaattgggaggaaactcctctttagtgtgtccatagggagagagcaaaagctgactatacgagtggaacgcgagcaaaacattgattttatccttgatgctgattacaaactcagacatggcctggatttcaggctccgaaaagggcttgggtccaccgtaatcctcagcacagggattcgaagaagccccctcgttctccatccaatgcgaatcgtagtttcgattggggtctgctccaatgcaactagaaatttcggagggttgacgggtctttcgccacatgcgatcctacaaaaaatgtgttttacaagcaaagtgtcaagtatagatgaatgcattggtaccttttcatgagtgtacacaaaaccgtcgacattcagcactggcactatataccagtcgtgattctccgcaagatcccgcactaattcatccgtagaggtaaggaactcgtttatcagccaagtggctgtcgcagaggtgatccactcccttgcatgtatattggactcaataagcacacctgggttattcgacttataggagatctttatgccccgaatggtgcgtccctcgtacgattgacccactataaaactctctgttatcgttggataagcagctagtatatcgtccaaccaagcataaatttcggccagagaattgtacttcgtccaaccaaatgttccatctctgctggctttcagattggcagcttcctccgaatcgatgagtctgcagaacactctttgaattccacgtacattcacagtcagtactaatagcttactcactcctgcacattgctgatgaacagctctgcagtgacattggttttctgaatttcagtctcaagttcgccaaaggcacctggacttagcatcaggtgtaactcatccttggcttcatgccacaacctgaactgagtgaaaaggtaaccatttgcttaaaatgttacatttagctaacttacattttctcgatcttctgcaagcttccttaggatacttctctgcgcctgagtttcaaacttgactttataaaccgagtagttgtcatagcgcagtctttcgtcctgcccaaagcttgctccttgagccaagactaccaatgccaggactataggtaaactatttagcgccatgcttattgctgagaatgcggaaagcgactaccaatttcgtttaaataaaaacccagacgtttccaatatcgatcggttcataattggattgtaaagataggagtacaggagcgcactattaaacgatctataaaaccgcttgatcgccttatcagtttcacacaactgaccgttagtatatgcataatttctaattgattcttattttaaacatcagagtagttgtgactctgcataatgaggtcacagtccggagaaaatcccctcataaatatgaatttcatttttagattgttttcagaacagctttatttaaaggcaagtgtctgtagccttattattatattactttccgtcttgagaaacacaattctctaaaccctcattcatattctactattttttattcccagtcccagctgtataaatagtcagctcaaaattacaaaatacccctttacagtttagtcaagatgcgtccacagattgcaatgttactattgataactgcttggaaaagtagcctatcagatccgataggtccccgttcctatgaaaactattcagtgtataaggttttcattaaaactcggtcggatcaacaggttatcgatggactgctgaaggacacagacaatgtgagtttcactggaatttagaggaaaaaaaagtcgaataatcccttaatattccagtataacttgtggcatcgtggcttaaatgtagttcacataatggtgagccctgtggaaaaggattctttcctagctgtaatgcaaaaggaaaatattgttgtggaagtacttataaaaaatgttcagacgtaagtatataagcattttaaaattataaaatgcgtaactgtatactctgttttcagacttattgatagatactgacgtgtcgttgtttttataaagtttaataattttcccatttaagcagtgatcttgaactatgcaatatcatgaacaaaacgtaaagctaaaatgtgaatgat

SEQ ID NO: 15365 - DNA, 1260 bp, DROSOPHILA
atggcgctaaatagtttacctatagtcctggcattggtagtcttggctcaaggagcaagctttgggcaggacgaaagactgcgctatgacaactactcggtttataaagtcaagtttgaaactcaggcgcagagaagtatcctaaggaagcttgcagaagatcgagaaaatttcaggttgtggcatgaagccaaggatgagttacacctgatgctaagtccaggtgcctttggcgaacttgagactgaaattcagaaaaccaatgtcactgcagagctgttcatcagcaatgtgcaggaactcatcgattcggaggaagctgccaatctgaaagccagcagagatggaacatttggttggacgaagtacaattctctggccgaaatttatgcttggttggacgatatactagctgcttatccaacgataacagagagttttatagtgggtcaatcgtacgagggacgcaccattcggggcataaagatctcctataagtcgaataacccaggtgtgcttattgagtccaatatacatgcaagggagtggatcacctctgcgacagccacttggctgataaacgagttccttacctctacggatgaattagtgcgggatcttgcggagaatcacgactggtatatagtgccagtgctgaatgatcgcatgtggcgaaagacccgtcaaccctccgaaatttctagttgcattggagcagaccccaatcgaaactacgattcgcattggatggagaacgagggggcttcttcgaatccctgtgctgaggattacggtggacccaagcccttttcggagcctgaaatccaggccatgtctgagtttgtaatcagcatcaaggataaaatcaatgttttgctcgcgttccactcgtatagtcagcttttgctctctccctatggacacactaaagaggagtttcctcccaattttgatgatatgatggaagttgctaaggcctatggagatgctgttgagagcctaccttatggaaccgtttacagatacggctcagctgcgggcattctttatcccgcgtctggagccaccatcgattgggcatacaatgaacaaggagtggagatatcgtataccattgaatttagggacaccggtcgatatggttttatcctgccaccggtgcacattattccaaacgcagaggaggcactaatcggcattgctgccctattagaaaagtgtaaagacctcggctatctcgggcttaagagcgcgctgtaa

SEQ ID NO: 15366 - protein, 419 aa, DROSOPHILA
MALNSLPIVLALVVLAQGASFGQDERLRYDNYSVYKVKFETQAQRSILRKLAEDRENFRLWHEAKDELHLMLSPGAFGELETEIQKTNVTAELFISNVQELIDSEEAANLKASRDGTFGWTKYNSLAEIYAWLDDILAAYPTITESFIVGQSYEGRTIRGIKISYKSNNPGVLIESNIHAREWITSATATWLINEFLTSTDELVRDLAENHDWYIVPVLNDRMWRKTRQPSEISSCIGADPNRNYDSHWMENEGASSNPCAEDYGGPKPFSEPEIQAMSEFVISIKDKINVLLAFHSYSQLLLSPYGHTKEEFPPNFDDMMEVAKAYGDAVESLPYGTVYRYGSAAGILYPASGATIDWAYNEQGVEISYTIEFRDTGRYGFILPPVHIIPNAEEALIGIAALLEKCKDLGYLGLKSAL

SEQ ID NO: 15367 - DNA, 2903 bp, DROSOPHILA
tcgctagcattacatggattccgcatcatggcagcgcagctgaatccattccgcaatgccttccggctgccgtccaagcagcgcatcaactggtttcccggccacatgaccaagggtatgcggcaaattcagcaaaaactacgaaatgtagactgcatagtcgagattcacgatgcacgcatcccattggcgggcagaaactcccagttctttgacacaatcaccggtgagtacgtttacaaccataagctgccacttaatacgggactcatattccccaggaagtggtgttaaaccgcatattctggtgctgaacaaagtcgatctgctgggcgccaaacagcagaagagcgtgctccagcagctgaggagacagcagcccgaactgcagcacatcctgttcaccaactgcaaggatcagcgcaacaacggcgtgctggacatcctgcccctggcaacgcgcctcgtgagcgagagcagtcgcttcaatcgcacccaagctgccgagcacaatctgatgatcatcggcgtgcccaatgtgggcaagagttccgtgatcaatgtgctgcgaaatgtgcatctcaagaagaagagcgccgcacgcgtgggtgccgaggcgggtataactcgatccgtcggcgaacgcatcaaaatccaagagaatccgcctgtttacatgatcgacacacccggcatcctccagccctccattaaggatgatgaaatgggcatgaaactggccctggtgggctgccttcccgatcatattgtgggcgaggatctgatagccgactatctgctgtactggctgaatagccaccgcaaatacgactacgtggagatgctaaagctcagctccggacccagtgacgacatcagcgccgtgctggcggagtacgctcatcgggaggagctattccacaaggtcaagcagtacgacggacgcgtggaggtgatgacaaatttattggcggccgcgcgaaagttcattcacttctttcgctccggccagttgggtcacatgaatctggacgaacccagtggtttcagatagctatacatatgtatgaattaaacttaggggcttagattaaagactgaacagtcgattctgctcgcgtccttattgattttccgccatgggcacatcgatggcaatgtcgccaacgccgggcacgggaatcgagtacgaaacactagccaaatcgtcggtatcattggctagatccatgggtgcatggtgctgcggcgcctggtccacctgtggcgcgattccaccaagatgtccagccaactcagcggactgatccacctccggcggcacttcgacgggcgcactgctaatgtgcggataactggtgcgcgaggccgccaaacgcagctcctccggcacgcccttcattcgcatcgcaatgtgacgggagtaaggtgccatcttctggaaatagtcaatcagcatttgcggatccttctccacgatctgtgccgatggcaccaagtcgaactcgtcgcagaactgccagcgcaccagatacttgatgtcgcccgtcacatccgttgcgcccacgatctcggccagctccaagccgcgctcgtagccgcgcagcttctggatctcttcgcacttgggtttcttctcgccgcgcttcttggacttggcgcgcgactcctcgaatttctggatgagattcgggcaatcgcagttctcctcgggctcccaggtgttgtccgccgacgtgtagccacgccacttgatgtagtactcaaccttgccttcgctggtaatgcgcttgtccatgatgcgctccaccacgaagttgggctcgtttttaaccattttttattgtgtttttacaagattgtttacaatatttaaaatcggcttggtttttttcactagtgccagtgtgaccgtttgctgacttcaacaacagttacaatagcaacatacttctgacagcatagaaaacggtcacactcgcacgcgcttgcaattcgaattcaggtgaaattttaaagctcaggtgcaatggaatccgaatcctcgcaggatgattggtccgcattcgatccaatgtccagggaatactatgaccaagtgggcaaccgttacactaacgagtctggccagaaactaatcatggaagccccgctgccgccaaaggacgaaaaggagcaacgtgccaccaggcaggcgaagtatccatacttggtggttccaaaaagcagtccctatgtgaccgaaaagatgctaatcaacttcttcggtcgggcgctcatcaaggagatggagttccgccgcttgtcacgcgtatactttgtctactttgaaaatatcgcgtgagtttcttcaagcactttcgcaggtcattcaatatttcgagcgtataatcctttttccagatccctggagacagcgcaacagcgggtgcagcgttacccgaacctgatcaagtgcatcactggtcgcccgcaaaaggagcgggaaatcaccagcgatccggtgacttccactgagccaatgccaacaccaggcccagcaatttcggccactgaacgtacgccagtgaatcacaacagagaggttccgatctcgaccggaggacaaaatcatccggagttcttccggccaccgctggtcaccaaagatgattacaaaagaggttcattgttggccaccaacgaccccattcaacgctatctcaatgtaaagtacgaattcgcactggagcgccatgatatctacaagcttaaggatgagaccagaatcccgcaggtcgttctgcactttcgttcgggcagaacgattcctttgttagtatagccacctggtcacgtgcccttgattagctaacgagtatagtttctgcatcactcaggtcaacggttgctgtcaccgaaga

SEQ ID NO: 15368 - DNA, 903 bp, DROSOPHILA
gcactagtgaaaaaaaccaagccgattttaaatattgtaaacaatcttgtaaaaacacaataaaaaatggttaaaaacgagcccaacttcgtggtggagcgcatcatggacaagcgcattaccagcgaaggcaaggttgagtactacatcaagtggcgtggctacacgtcggcggacaacacctgggagcccgaggagaactgcgattgcccgaatctcatccagaaattcgaggagtcgcgcgccaagtccaagaagcgcggcgagaagaaacccaagtgcgaagagatccagaagctgcgcggctacgagcgcggcttggagctggccgagatcgtgggcgcaacggatgtgacgggcgacatcaagtatctggtgcgctggcagttctgcgacgagttcgacttggtgccatcggcacagatcgtggagaaggatccgcaaatgctgattgactatttccagaagatggcaccttactcccgtcacattgcgatgcgaatgaagggcgtgccggaggagctgcgtttggcggcctcgcgcaccagttatccgcacattagcagtgcgcccgtcgaagtgccgccggaggtggatcagtccgctgagttggctggacatcttggtggaatcgcgccacaggtggaccaggcgccgcagcaccatgcacccatggatctagccaatgataccgacgatttggctagtgtttcgtactcgattcccgtgcccggcgttggcgacattgccatcgatgtgcccatggcggaaaatcaataaggacgcgagcagaatcgactgttcagtctttaatctaagcccctaagtttaattcatacatatgtatagctatctgaaaccactgggttcgtccagattcatgtgacccaactggccggagcg

SEQ ID NO: 15369 - protein, 237 aa, DROSOPHILA
MVKNEPNFVVERIMDKRITSEGKVEYYIKWRGYTSADNTWEPEENCDCPNLIQKFEESRAKSKKRGEKKPKCEEIQKLRGYERGLELAEIVGATDVTGDIKYLVRWQFCDEFDLVPSAQIVEKDPQMLIDYFQKMAPYSRHIAMRMKGVPEELRLAASRTSYPHISSAPVEVPPEVDQSAELAGHLGGIAPQVDQAPQHHAPMDLANDTDDLASVSYSIPVPGVGDIAIDVPMAENQ

SEQ ID NO: 15370 - DNA, 2783 bp, DROSOPHILA
gccagtggcactcaacgatctgagcggtgggaacgagggggaagtcagctagaaatcttcagacgcgtgccagtggatcgaactttgagcggatattcaaatggcgcagacggacctcttcacgttgttgattacatcaatcatttatgtttacagtgtagtcgtcggatctttgcacattcacatactgttgcttttaacgtcatcataaattctacaaaatatattcgggatttatttccgcgaaattttaacctttgctaatcttcaattgtttactgaacacaaacgaattacgtttcttattcattcattcatcattcagtattcctagatgtgtttagtcagttaagatcgtttgagttataggtttagaaatcttggaaattcaatagcgcattggttactgattaagagttattatcagtaagaatattattagtaattattattatgccaatcagaccgattagactaccacttcttgtacttttgctgcgagttctcgtgcaccaccgattaatatggtaaataaatctcagcctgcttttccaacaccacttatctgaagacacgattccatggagcacatggagattgagattacagccatcgactagacgccttcgtcattcgggacgattaaagttcagtggcaaatgaaatagagtcgatcgatgactcaacggatcgctttgctgataatccccatttgtgttctccttagctggccagttgactttttggtcagttgactttctggccagttggctttctggccatttgggtctttagaagaccaccgcccagtttataatggatataaaacgaattgagctgcaagtcgtataaactttacgatatcatagcagaagtttatgaaaatccaaaataccaatcatggatgatcgctaaattcgccattttggtgataagtgataagctggctactccagccctatataagagacctaaatcgaaccacactttaagtttaaccatgtcgctacgtttgggtttgtttcttttggctgcacttggtgtggtaattctcacggattccgcctccataagcacccacattgttggtggcgatcaggcggacatcgctgactttccgtaccaggtgtccgttcgcctggagacctacatgctgctccacatctgcggtggtagcatctatgcaccacgggtcgtcatcaccgccgcccactgcatcaagggacgctatgcctcgtacatccggatcgtggctggtcagaactcgattgccgatctggaggagcagggtgttaaggtcagcaaactgatcccccatgccggctacaataagaaaacgtatgtgaatgatatcggtttgatcatcactcgcgagccattggagtactcagccctggtgcaacccattgctgtggccctggaggcaccgccgtcgggtgcccaggccgttgtaagtggttggggcaagcgggctgaagatgatgaagctctgcccgccatgctgcgcgccgttgagctgcagatcatcgagaagagcacctgcggtgcccagtatctgaccaaggactacacggtgaccgatgagatgctctgcgccggctatctggagggcggcaaggacacctgcaacggcgattccggtggacccttggccgtggacggagtcctggtgggtgtggtgtcctggggcgtgggttgcggcagggaaggattcccgggtgtctacaccagcgtcaattcccatatcgattggatcgaagagcaggcggaggcgtatctctaaaaatgtggatagcttcacaagcacaacgcgaacaaataaatcgaacaaattattattttaccacaataataaatatgaaatgagcatttagaaaacatggtttataatatatttacaaattaatatacggtgtttaactcttcatttcaactggttttcctaatcaaaaaccttttttatctgaccattacattggaatctataagccattctcgacgatttatataaaaataaaattattacccaattggcataggtgaaggcaatttatcttgaggaagggaaaaagtacaatgtaactaaccataaattttatactttacaaaatcgtttgattgcatcattttagaataactcaatgcagaaattaaaattataaaatatgtaaatgtggcttgaagtatcattattatttatttgtgacatttatatttgacttgatgcaatcaaataatatccacaatattagaaatttaccgtttgcagatagtttaacgtattcgagtaagattacatttgtttaaatcttaaaaatttaaaataattaggaagattttgtttttaaatattaacggcttctggtattttttagagctagtatatactttcgtggtagacgtcgctggtatttaagccagtaagattcagccacactgacaaagaaaatattcgtgaaaattctgcatacggaaagaagaaaattcgagcaacagaaagccaacacaatccacaaaaatgtctttattcggagcgttgatgggtgatttcgacgacgatctcggccttatgaagtaagtaccaaatggcgcaaaaaaaaactaaataaatgcggctcgccccgcagaagccccatatatttccatacgtgtgcagctaacgaagccctcttggggcgtggaaaaacagccaaataatcgcaaaacaaggtgtaaatcattaattggcccataggcacacaattaggccaattaaacatatttacgtgcccaaaaattagcaa

SEQ ID NO: 15371 - DNA, 783 bp, DROSOPHILA
atgtcgctacgtttgggtttgtttcttttggctgcacttggtgtggtaattctcacggattccgcctccataagcacccacattgttggtggcgatcaggcggacatcgctgactttccgtaccaggtgtccgttcgcctggagacctacatgctgctccacatctgcggtggtagcatctatgcaccacgggtcgtcatcaccgccgcccactgcatcaagggacgctatgcctcgtacatccggatcgtggctggtcagaactcgattgccgatctggaggagcagggtgttaaggtcagcaaactgatcccccatgccggctacaataagaaaacgtatgtgaatgatatcggtttgatcatcactcgcgagccattggagtactcagccctggtgcaacccattgctgtggccctggaggcaccgccgtcgggtgcccaggccgttgtaagtggttggggcaagcgggctgaagatgatgaagctctgcccgccatgctgcgcgccgttgagctgcagatcatcgagaagagcacctgcggtgcccagtatctgaccaaggactacacggtgaccgatgagatgctctgcgccggctatctggagggcggcaaggacacctgcaacggcgattccggtggacccttggccgtggacggagtcctggtgggtgtggtgtcctggggcgtgggttgcggcagggaaggattcccgggtgtctacaccagcgtcaattcccatatcgattggatcgaagagcaggcggaggcgtatctctaa

SEQ ID NO: 15372 - protein, 260 aa, DROSOPHILA
MSLRLGLFLLAALGVVILTDSASISTHIVGGDQADIADFPYQVSVRLETYMLLHICGGSIYAPRVVITAAHCIKGRYASYIRIVAGQNSIADLEEQGVKVSKLIPHAGYNKKTYVNDIGLIITREPLEYSALVQPIAVALEAPPSGAQAVVSGWGKRAEDDEALPAMLRAVELQIIEKSTCGAQYLTKDYTVTDEMLCAGYLEGGKDTCNGDSGGPLAVDGVLVGVVSWGVGCGREGFPGVYTSVNSHIDWIEEQAEAYL

SEQ ID NO: 15373 - DNA, 2907 bp, DROSOPHILA
cccccgcgaagaaacgcaagatggggatcatctacatatccaacatacccaagcatatgaacgtgacccgcctgcgggaaatcttgggcgagtacggcgccatcggcagagtttacctacagccagagaagctgtcaagtgagtggaccaagtggcatacatataagacccactgattacccactagtgtatatactttaatctcaattactttaggtgccaaagcgaagaagaacaagcgtaagcgttataatatccacttcaccgagggctgggtggaatttaagtcgaaacgtgtggccaaacagatcgttccactgctgaacaacaagcagatatccggtcgcaagacgtcccaattctatgactcgctatggagcatgaagtacctgccgcgctttaagtgggtccatctaaccgagcgcatgaactacgagcaggcggttcacaagcaacgcctacacactgaggtctcgcaggcccgcaaggagaccaccttcttccagaacaatctcgacaagagcgagttcatcaggaagcaggcgaagaaggccaagaatgcggaaaaggctctggctgccaagagcgacagcgatgcctgagttcgcgctagactgttgcattcaatgtttacctgactgcaaatatacttatattaagtagatcaaataaaaatctttaaataattaggcgcgcaaaattatttgaaattagggcccctgcatatcgataatttcgtcgattgtgtgtgcgtgttaatgctacttcagctactcaagctgaaggaggccactgtaacgcacagggatggttaagatttctcgattaaaatagggctgagtaaatcaaatgttctgttacaaagtgtttttaaagcgatatgcttttctaatgaaagggtaccaacacatcgatagctcttcgataaaaacgtcaactgacatcgcctgtcaactgtcatacctgattgcgtacattacaaaatatattcgatccagctaaaacgaaagctacaatgaaaaaaataattaatacatcaaagccaaagcgcaagtccacttccatgaaagtggaggagactaagctagacgaggcgcgctggggtaagccgcagacaaaggaaggtgagtctgcaaatgggatagcaaatccctcaaatgacgataaaaaggagctggccaatttcaaagccaccttcaattcctgggcccccgagaagaaacgcgagaagatgcacaaggtaggcgtcatcttaatatccaacatacccaaggacatggacggggactgcctgaaggaaatcatgaacttgcacagcgtcgtcggcagagtttacgtgcagccggaaacgctgtcaagtgagtggaccaagtggcatgcacaaatgacccactgattacccagtataaacttttatctcaattactttaggtttcaagacaaagaagaacatgcgtaagggctgggtggagttcatttcgaaaagtggggccaaaaaaatcgctctagagctgaacaataagcctataaccgatggcaagtcgtcccgattccgtggcttgctgtggaaaatgaagttcctgccacgcttcaagtggtactatctaaccgatcgcatggactacgagctggcggtttgcaaagttcgcgtatggtcgcaggcccgcaagcgggccaccttctggtacgatcccgaccagatggagtatttcaagaagcaagtgaagaagatgaagaagatgaagaaggtcaaggaagcggagatggctaccaggaatgcggagatggctgccaagaaagcggagatggctgccaagaaattgaagaagtctgcctgagttcacgctagacctttgcttccaatgtctacctgactgcaaatatacttcaataaagtaaatcaaatcaaaatcttttaatatttaggcgcgcaaaattatttgaaataagcgcccctgcattgcatatcgataactgcaaaactttcgagtgctggtttgtgtcaacactatttttggtatttaagttcatgcaggcgttagcacctttccgttgtcggtatttctacccgatagccgcgcgttatcgataacagccatcgactgtctccattttctttgtcgctttgttgcgcccgtgtggtatttgaaaattctgtgatcacaaatcgactaattacgcagagaaaatggtaaatttaaaagtaacaactatattattcgagtagtttacggtgcgggctattggcgttgcgtgaattcgcccacttttcattgataattgtggccaattcggcgttttcatttgccgggtgtgtgtgtgaacgaagcgcaagccattttgacaggcggcttgcacgtgagccatggactccgatttcgcctgccacttccagaaccttctcctgctgtccacgggatctgggtgaattggagctatcactagattgctggccgggatcggctcgggcagctggctgagaaccttcgagatgcattccacgccgtttttgctgccgatgaatcactcggcgccgctctccctcgtccgccactttttggggttaggtcgaggcgatatggctgcacagagcgaaaaaccataacaatctgacatagaatacatatacattttgaatattttcgcatcacaaacgcatctggtttgcagtgactgcggatttggccatgccaacagacaatcctcgccagaaattgcaacatattgggcagccgcctgccattgtcaagatagcattcttgatctgtcgatgagaatatcataatggtgttttgcaatgtcatcttggcatcatatcactttttcattatgctaaattattaaatgttaaaaaaaaaattttatttcgcaaaaaaagctataatataatttcctgcatgaatagta

SEQ ID NO: 15374 - DNA, 834 bp, DROSOPHILA
aaaacgaaagctacaatgaaaaaaataattaatacatcaaagccaaagcgcaagtccacttccatgaaagtggaggagactaagctagacgaggcgcgctggggtaagccgcagacaaaggaaggtgagtctgcaaatgggatagcaaatccctcaaatgacgataaaaaggagctggccaatttcaaagccaccttcaattcctgggcccccgagaagaaacgcgagaagatgcacaaggtaggcgtcatcttaatatccaacatacccaaggacatggacggggactgcctgaaggaaatcatgaacttgcacagcgtcgtcggcagagtttacgtgcagccggaaacgctgtcaagtttcaagacaaagaagaacatgcgtaagggctgggtggagttcatttcgaaaagtggggccaaaaaaatcgctctagagctgaacaataagcctataaccgatggcaagtcgtcccgattccgtggcttgctgtggaaaatgaagttcctgccacgcttcaagtggtactatctaaccgatcgcatggactacgagctggcggtttgcaaagttcgcgtatggtcgcaggcccgcaagcgggccaccttctggtacgatcccgaccagatggagtatttcaagaagcaagtgaagaagatgaagaagatgaagaaggtcaaggaagcggagatggctaccaggaatgcggagatggctgccaagaaagcggagatggctgccaagaaattgaagaagtctgcctgagttcacgctagacctttgcttccaatgtctacctgactgcaaatatacttcaataaagtaaatcaaatc

SEQ ID NO: 15375 - protein, 233 aa, DROSOPHILA
MKVEETKLDEARWGKPQTKEGESANGIANPSNDDKKELANFKATFNSWAPEKKREKMHKVGVILISNIPKDMDGDCLKEIMNLHSVVGRVYVQPETLSSFKTKKNMRKGWVEFISKSGAKKIALELNNKPITDGKSSRFRGLLWKMKFLPRFKWYYLTDRMDYELAVCKVRVWSQARKRATFWYDPDQMEYFKKQVKKMKKMKKVKEAEMATRNAEMAAKKAEMAAKKLKKSA

SEQ ID NO: 15376 - DNA, 15811 bp, DROSOPHILA
atgcaaccctgcacttacacacacacacacacacacgcaaaccgtttgctatctggcgaaaatcgcattatgtaaccgtattttttcccttccgacttttgaattttcctgagttacaagtacttaatgctataatacgcacccgattcacttgaacggtggcctccgtggcataattgttggttttcgaaacacctgcttgggctgcattctggaataaaccgaaaaacgacgatgaatatctcccattcctgatgatatcgatgctgctgttgttgttgttgttgctaagtatccgacatccgctgatgatgatgttgttgttgttgttgttatggcaacgcttttagtgttttcattatcgaatggatttgttcaattgcatttttagtgacaacaattagaaatgttagtgggtgcaaagcgggattgggattacgtactttttgcagttgcttaacaataatgggcaattcgctaacgcgtgacagagtacgcaacattttcgctgtgttattctcgttcgactgacagaaattggatgtgaatgggggctttctatatgcggattgtccggatctagaatcgcacgctatatatctggtgtctcagtcgcaccgccgcgcgtcgttgtaagttaaacaatcggaaaaaaaggtagcgagattagtttatcaactactatattgcacaactataacaaccgtttggcgttatagcgaaaaataacgcaccacttggcctattagtgtgaccctaaataaaatactgcagctttccctgttttcaaaaaatactaaattagcttatcgaactttctttttcaatataacttgaaatataaatgtttacgtaaaatattcaataagcttttatataatgtgtcacacaatgttatatcaaaataatagtagtgtttggcggttattgaaatactcgaataaatacttactcaatcacattttatattactttgccgcccaaataaaacgagggttttcaaagaagtacttttatttcacattgaagatctcatttggtttttgtttgctttctcatttcttactcgtattgttacttgaaattgcctccataaatccacatttgcgattgcagttgcaattgcaatactgctctatatcgcactcagctcacataattcactaatctcttacaaaaacttaagtaatgtttgttccttgcacaaaaaaccagttaaatagaaataggtaaagtagaattaaacagttaaattcaaataaacgctttacaaactaagattttaaactagtttttgtatttgttggtttctcggtttgttgtttcatttttttttttttgctttagaaatggcagctaaaagatttgagtttaaaagttactaacggaaaatgaggaaatggatcgatcgtttgggaaaaactaagcgaatgaaataaattttttactttcttttatctatcttttgctctgttaccgttacacatattcaatttttcgcgcgtttttctgttacatcaaaaattggtttctcacacaaatattttgcattatgacaaaaaattatgctttgctttgttttttgttttgtttcatatgtatacatgtacatgtatatatatatatatttgtatgtataaacacttattagaagtcctgttgtgtttttgtttcctttcccgttagaaatccggcattccgattataagaaaaaaatttagtttttctcttcgtcttcttgtttttgcgagtgcttgtgtgtgtgtaagtgggggaggtgtgtgtgtgtgtgggtgagagagagagaggaggttctatcttaccgttagcataaatagttttgtgtctacgcaaaaacgtgctgagcaataatctaaaacgcaatagctaaagagagagaggtgctgtatgtgtgtgaaaagtaacggtaaatgtgtgtgatttctgcatatgtcttctgttgttttcaggaaattacgtattaagcttcttattttttttggttgtttttagtaggttttacttaggttcttgcttaatttacaccaatgtttactttattttgtatttcttgcatgaatatatatatttactttttggtttccttgtttcttattactgttcgctttcattccttgaaatttgcctttaaattgttactgttcttctgttttatataacataaatccgattcggagaaacacatagcacacacttatataaacgacaagatgataattatttattttgtctttgcttttgctttcgactttctccgcctttttgttttattactgcttgcacaccaccctcatgacctccctaacctggttttgacctagaaagtcttagttttaaaattcattagaataatcaaataaataataattactatgttatatcaactattataattctccctatcttttttaggattaaaaatctgttagtcttaagtaaccaagacacattgtaaaataaaataatttaagcagatcaaattaagttgccgcatgggtaacagtgcgttgatcaaataataaaaacatcatcgataaaaaaaaaaaaaaaaaaaaaaaaaaactgcttgcagtttctacaaaaatttttgttgcatactttgctgctgtggatggacaatacatatacacatacacataatatttgatttgcgtgtaatttgttgctgctatggttttattgcaatggtttcatgttcttgctggcttgccgttgtttggcaaaatccaggcaaaggagtaaataaaggtttagagggggcggggggatggcttggttgggaggtgggaaaaatccatgtccaaacacgcaccgatttggtttgctcgtaagcaatgaataatacattgtttaagcacacagaaagaaattagcaatcacttgtaatatcctttgcaaacaatccaacaaaatttgacaaccttattaacctgtcatccgatagtttgaatcatttataatagctatattgcaagataaattgttattttgcaatatttcatcatataatatattcagaaaacattttcggtacgaaaaacctaacaaatgcaattttaaactgcgtttttttttttgacaatttaaaaaaccgaagttatggaataccattgttttttttttttttgggaaaagcatgccaatgagatatttttctctgtgtacccattaggtgtgcagagagcgtctgtgtgtgtgagtgagtatggtgtgtatgcaaatttcacattatactatttttttttatatactttctgcttggtttccgattacaagtgttgagagttcaatacacataaataatccatccgacagaaaaatatgtgagttttccttacaattttgttaaatattaagtttttctttttattttactcgttcggttgtagtggtggttgttgcctgtgctatgtgtccgtgtgtgtgtgtgtttgtgtgtgtgtgtgtgtgtgtgtgtgtgtgtgtgtgtgtgtgtgtgtgtggttcttgcctctgctaagcgccaacgaaattggattgaaaataaaaatggaaaataatataacacatagtttttggttcttttcttgttaacaattgtttaattgcgcaggtttcatatgtaaatcaaaagtccaaacaaagctccagcacataaaacatttgcaaaagaaaatattaaaagtatatttcaacagatgtttgaatcattgggagcgaatgcaaatccaaatggtaaccaattgcttattctaaactataccatcaacatgcagaagtttaggacgggaaatggtgatttcgaaactaaacatcgttggttcgtgcttctaaacaagttcctctgtttctagtagtgtattttgtgtgttctagtagcgctttcctattgaacatcaacgcttgttcaatttaaattgctgagcatatattgtatataatctgtaccaccaaccaatcggcgttgtttgcatccgatagacaatctagaacggtgtgctcgtgtgtagcctctctctccatattgtgaaagagaatgccctatgtgacgtgttcccgatccttgtggggagatgatgatgtcggcggttgttcttgctgattatcctccagttcggctcgtcgacaactgctgcagctggtggcatcgctgtcctccacaatggtgccatcttcatcgtcctcgtcctcgtcttcgtcttcgtccccatcgtccacgtcttgatcgttggttagttgtatttgcgaatcttctgatcgtttttgctgctgttgcttctcgcttgccctatcggtcatcatttccgcatccttgagatgttctactggtggttgtagtgtttgctgttttcgttcttgttctttttgtagttgttgttgttgttgttgttgttgttgttgctgctggctctgtagttgctgtgattgttgtggttgttgctgtttctgctctagatcctcatcctctgatgctccgaaatgcgactgctgcccctgctgttgttgctgctggcggggcagctgctgcatctccatcagcctcctcaccaccacttcatccgactcgacaatactttaaccgctcttaaacagtaaaatagccacctggcccaaatagaagtaaataaagtggcgcgtctcgtgtgtgacatacgatccaaagttgcgaccgacaatgcaatgccatgtgggattgtattttttgtcgaactccttcttgatgtaggccgcaatgtcctgcaattgaatggaaagtcaaaagaatgcattagtctttcgatttttatcagtgcaattatttcaatattcaagttccttctgattgtgttatatttttaattgctttcaattgtgttaaaagttaagccgtgcacatttttcgtagccgaaaaacttcatctcataatctaatattgataactttgccgctctcggttgtaattcaatttcgcctagtggctatagattacaattcctccctcccttgtgcagctgccaattgtcgaacaagttaacgccacattccataaagctgtcagagaatgcaatggcaagaagccatgccgaaaaacgcgaaaaacatccaaaagcgatgcccatcaaatgtagaagggtaggaggagggaaaacaaatgcctaagtggctgctaactgttttgaaattagcggcaaacggcaaactcaataaaatgccaaacgaaaaactcattttccaacagtcggccaaaagccaaccccccacccccaccacctagcgaacttcgttcccatttccatcagcccaaatggggggcgggggtgtgagtaggttctgtcactggggtaaccaaaaatgtgaccccaaaaaccgggcagcaaccgaaaaggaaaactcaaagcggccgtgttgtgccgtcgaggtaaaagttcttgtgctaatgagttagttatgattttcgttgttattcgcattaagtcatttggctgaatggaatgcacagttcttgaggcaacggctaattatgcatgctaacactaactaaccacaaagtttagaaggcgaatgtgcccgataaagggttgaaataaatggggctgctaaaagggctaaaaaaaattgcaaaaaaaaaacactgcgttgtaaaccaccatgcagtttggtctggcaaatgtcaaaggtcattgtcagtcgatttggcgactaagtccagggttacgcaaacacacacgcagcagccagcacaacccgcatataaagatatatataatatatatatataaggcgaaagcacaatggaggtcacataaatatgaagctcagcctgcgaaggaaatttaaagcgcacattgatgggttgccacttaaagtggcagcagggcatctgttagtacgtatctctatctatattcctacacggctttcataattgcagttggcatcttaaaaagaaagtgcatcagctcgggatttttgtttcaattattatctgaaacgaggaaaatgcggcatggggaaccatgaagctgaacaaccgtaggaaaataaaactgttctgtttcgaaagttgggccagcagtttgaaagttttcttttgccatacttttgggcgcctcgcttggagttgatttcatttagtcagtggtcggggggtcaaaaacccgggcaggtggggcggcagcccattcttgttgcagggtagtgcgtgcaaagtcataaacttaacctggtaacctcaaaatacaaaaacggtgaaaataacgaaacgcaaataataaaacaaacaggacaggcgaagaaaagcgcgcgacacgagcaaaaagaaacaaaaggtaaaaaaaaaaacaatataaagctgatttagctgagtgccattattcgattctctgctttagttatccttcaatcaaagttgtcgtcatcatgccgtatcgtacagtaatgcctggctcaagtgaaacgcacacattcgctttgagtagttcatatactttgtatacttttagtggtataaaagtaccactgtaatggaaaattcgctggcgatcatcgctattaagtcattccagctgctcaacattttcggtggagctagcccctttggggcacatcctttggacgaacgacatgttttgtttggacgttcttgttatgttgctttcagcctattgcgtgcatattttcgtgtcgtgtcagacgacaatataaggctgattgttttatattcaatttggtttgggatgaggtgagggatggggtgaggtggcgcccgcctcttttgccatctcgccccctagcaatgccatggaattttgttttggcaacgccaaaaaaaatacaaaatgaacattccgacacacaaacacacacacacacacacacgcgagtgcgcgagtgggaggagttgtgggtgggtgtaaccatagagttggttggagtgctgttccatatatgtatttgtacatgtgtgtcatactacatgtacacaacaacgtaggcagcctaatgaaatcggcattgcaattttgttcatataatttaggtaagctaactgacacattttggcagcaacgccttcaaagcaccaaagttattcctcccacacatttgattgacattcggtgtttttactcggttctgtaataaagaagcttggccccttggccaaatagatctagttgcaagcaaagtggtgtccagaccaactgcaccgactgcaattaggctacacctggaatggcatttgagccccggaaaatatgcctggacacgttttgaggcatggcaaaaacatcaaatggcaaaaaaataaaacggaaagctctggattcgatgaatgtgtgtcaatatgagagtggatgcatgtgcatgtgtttgctttttacacacacaatctatttacatacacatattcgccgcctgcccgcatattgattaaacattttggccacgcaaaaataaaaaaaaaatcacaaacaaaacccataaaaaaaaaaaaaacaaatggtaataataaaaatgcataaagtccccgcaacgattgaatgcaaaactgtttgccgtgtttatttgtgtgcagggttcccgccttttgtgcgtcacaagaggagcaaacaaaaaactgaattgcaaggataatagcagcgcgcaaaaaaatctaattaaattcgcttttaaatgcgaaaaccgttgagtgtcaatagtaaagtactcgtttgtatctagtttttgatcatagttgtaattttcatggtttttttttttattattaccttacctacactttgcatttttcaatcaaatttaataagaatgcttcgagtgaaataaatcaagaattaactgttatatactatgctgcttgaattttccacctgcagcgctctgctaaaaactaattacatttatttaaaagcaaacataagaccagaaaataattgaattgaaaatttatattctgctgccccgctgcttttttcccctttttgcattttattttttggccctcttgttggcttatttagggctttgcctttaaatcgcggctcacacagacacacacacccataatatacacacacacagatacaaaaatacatggaaaatgatggcgagggtgggggcggggggcaacataatgcctatggatacgatttaagctgcttgaaaggttgcgcgcccctaaaaatacatacataaggtacaacgaagtgggcccaggcttaacccttgtgcgccccagggggcggtgtctctaccccccccccccctccacccattacatttggtagtattggttgcgtatctaatggataccaaaaactgttttctgaacactcccccctcccatacatttcaattgtgtcgctgtgattgcaattttgaacttataatcagctgggaaatgcggaacatcgaaagattttaccagttcaattttattgattcataactattggcgaaacaaagaacattacatattcaatgcagcatcgtctaaaggttaaaggtagtccccccctctcgactgccagccattattatctttcccacaaatttgattctatttttattgttaattttttccattagacggtggcaatttttcaattttcatctaagcaattaaatttgtgttttcgccgctcagaaacaaaaacaaaaatccatatttaattacccacacaaagcaagcacacagtgagaaataatggccaacttattattatgcaataagcgatggaaaggggaagaggcagatggagagagggagagagagagagagcgagagagcggagagaaaggaagagtaaagacaaaaaggcaatcaatcgtgtggcatatattttatttatagcaacaagaggtaggctcgcaatgggtggttctcaggtggttcaggtgtttcaatggtggttacttttcgccccaccccatcgcatacttctttccatatcgcccatcccaccgcgcccctcgggcacaatgacaacattcgggaagagtgcgaataaagagaaaatgtgtggcatactttttgggacgcaggacctgtggcacatacagtgaaaatcacttgaaattgcctaaaactagctggggaaatcgttgaaagaataactattatacgaaaatattagctaatttaaaaagataagttgcggaataaacatctctttgggaatgcgctcttgcactgtttggcttagccaatttccactgtgtacgcacatttcgcttttactgctcaattagcagaacctctcctgtgttttctccgcccacgagctaacgccccccccccccctagctttattcacttccgccgtgatttcaagtttactttgctttgctttcaagggctcgcgcttattttttttttctaaccccccgcgtaccgcagcttttccattttccgatgccattttcccagcaatcgcagaatataacagtctcggttttagtctcagtgtgttgtcgtctgccattggcattgacaaaggctcgctcgctcgctgctagttgctggcaatgcccgcagctttccaaccgagccgcttttcctccggtctttcccatttcccatttcccttccaaaccaacacccccgccaccacaaccccgacgcactttgcaggccgcattttcagtgacctccgtcagggtctgcccatctgaccatacccactgtgaccatcgcacttggggaaaacaatttccataatgttttcgaattgatgaaatactttttacacacaagtgcatgtgaagaaagccacatattcagggcttcagggctcattttatatgccatagtggaaaaactaccgacttcacactaaagctaatcataaagtaatgtgtaatttctccctgtgcacccgtgtggtgtgtgtgtgtgtatgtgtgcttggcacttttccttcaatcgccatccccacgaccccccgcacatctattgattattcaatttcttcgactttgttgacattgctggctgattttgtttttctttcttgttttcttattgttgttgttgtttcatgcgttcgactaaatcaagagcgtattgttgttgttgttgtttcacaacatgaaagccggacattgttaatgatggtcagtcctccgccgatttgccacttcctctgggaaaatctccttaggtcagggctactttaaccgaagattagtcacggttacggaaaatcctgtgcataattatgcacccttttcaatgcatccaactggtaaaataaaagctatggcctttgccattaagccgatgagaagggcaaaggttaggaatgataaaattacaaaaactttcggaaaatgcaggcaaatattgccacattgcttgtgaaaggagttcttcacccggagaaccaaaaatagagagaaaggaaaactgcaacgcagctgcatgggcgttgaatgcggggcgtgaaaatgggctgcggaaatggacgcgtgggcggaaaacccaaaggctgcaccgcaaaattgtgaaattgccaaacgcagtgcaagccacaagtttactgggatgaaagtgggtttggggtttcagtgtgtttccaccgccctgagatgcaacaatgtccgaactgggaacactaatgggaaaccacttatgtgcgtgtgtgcgagtataagtaaatccaatttaattacggttctgggccaaaataataatcccccccgctgccagtttccaattcctaattacctggctggcgaaataatcaagtgaagcctttaatatcaattgttcggtgtatttatccaaattattttacatgcataacaatggcagcccgaaaagccagtcctatttctatttcaatttggctaacaaattggtaagtttgttgatgaaattagcaacagaagttgttggaagtcttgagtaatgcaagtggtatttaaaaaaaaaaaaaaaagaaaaaaacacttacggcaatcacacaatacgtttgcgtctcccaaaagtcacccactaaaaaacacctgttgtgcctgctcattcccttattcaaaacccctttttccaacccctaatcagtaggtgtgtggaatgttagagcaattagatgctattaagatgttggggatgtgtgtaagagtatgcaatcacgggagtcacaaacgtttcaggacttttgatatgttttgatatatttatgtatgtttcttattcaatctgtaccttttcaatgttgtacttctcgagggcctgtgtcgcacaatcgacggcatcctgctgcatctcctcgctcatgtcggcatttttaatcacggccttgcgatcagacattttggctgttttttttttttttaggttccctgtgtgcttacaacttcactggaatctaaccgtttgaaaagtggccctttttagcggttctccttggtaactgtaacgagagcaaagagagaaagagatgagcgacgccactgaaaagagacgagcgcatcgtaaaacattattagtattttcttcaattaaagagcgggttttaataaagttaggccccactggacacagagacacacacacacgcacacaccgagagaaaaactgatagataaatacaatgttcatatcccttaagcgtgtttggttcacaacgattcagtgaatattattattattattattattattatttgactatgtataactttgtttcttaataaaccttggaaagtccggaattttttgctgtgtacactttattaacgcaggcgcattgcatgctttttcgggacagtttgcacagcagagcagaagccaggcaatttaattatagaaacacaagcaatatgagcggcaatattacaaatcaaatatcagagccacaggatgacatattaacacaaacaagcacgaacaagaacacactcgcacacacagggccaatgcgcacataccgatgtcaattaacaggcaatatgcatatgcaggatgcatttaaattaaatggagcgagcgagacggcagcagaagctgtgcactgcaacatggccttgagcagatgcgcgctctctctctctctctctctctctctgtctctccctccctcacacacatacgcgcgtgggtggccatgacagagaagctgcgaagcaccagcaacaacaacaactaattcaaattcaaggctcacacacacacgcataagcatagcatacatatgcatacatgcccggagatcccattgcaattgctctttttcgtagcatacttctgcgagcaatggcattgcttattagttgcgaaaagcacagcaaagcaggggagaagcaaggcaaacagcggagctcactaagtgcgcttggcattttgcaattgcaacctcaaaatcagcgggtggaaaatgtgggattggttgtgggagtgggcgaaaggggctggctaggcgatgtggctgtgtggcaaaggcaagatggccaagtggcgtggcgtagcaaagcaaagcaaccgcaaccaattttagtcgctaggatacccggacccggcgctctttgtgctgacacattcgcacgatccaatattttccgtaatttactgaaaacgcctaagcaaaggcgaccagcaaagctccacacgcagctaatcacaaagtagcaatcgaattcacaaatacagttagcacccgctaaacgccttggcatgccataatacattttagtattataatttttatctttggctttactctatttgattttaagaaagtatacagctaattatatcttctttacctgcgatatcaattggctttacattgtctactttgcataaatctgaatgataagatgtattatcttgttatatgatgagcaatatgccattctcaattcagatttcttcctgttcagaaacagattgacgagattaatttccgatatgctcggtgctgctttgcatacgtatgtatgtatttatgttcagtcttgaaacgtatttttttatcggcgtctggaatttgttgcgatttagcaggttcgttcgtgttcctgacgtttgacagtaacgtgcagggcagacaaatcataacggtaaagctggcaaaactgttggcgggcggaatcgcacacagtgagagcgagagagggagggatagggattgcggataggcgggtggggatgggaggtagacagccgagagttgacaggtggccaaaggcaatggagtgagagggacggcatgtgtgtatttgtatggatgctgcagctacctccacttcttcttcttctcgcttttctgatgaagtcaattagaaaactgcattgacagttaaaaagtgtaggggaaagagagaggggaaagaggcaagacaggaagcggaagagaacacaagttgtatatttatgaacatgaaacagtgcttgttttcagcattatttttttgttcagtgttaatcaaacacacatataaaaattcgtgtgtgtgtggctgcgtgaatgactagcaaaaagcgttccatagtaactgctgcaggtcccggtccagtcctgtctctctctctctctctttctctttttctctctgtgctatcagcctgacatttatatataaatatattaaatatattaaatatataaatatattaaatatataaatatatatatatattttaaatatatatatatataaatatgtatatgcgtaaatgcctagcaaaaggctgggacggggccctgcacctgctaatatgtaacgctttttgctagtcattcattttttatatatatttatgtatattttttatagatatattatatacatatattattatatatatatatatatactagactggacggggccctgcacctgatactatgcaacgctttttgctagtcattcacgcagccacacacacgcgccgcttgcacatacacgctgggtaattgaatttcccgtttgcaattggaaacccgcgaattttcaatgcaggactacactcggcttccctcgccgaacctctactgtactctaattagcaattttcacacagcctaagggaagaacaactgaaactttcgacagctgatcaatcattagcccgattgttctcgaaaaacgttgcgaaaactctgctgaaaccgctgacaaaaaatcacaaaatcttctactattacctgcgtttctatgcataattaaaatgacgtcaacccgaaaacttgatatcagcgtagctccaaataagagccagaagctgacaaaaaaaatgttttctgtgttctcccacacattttgcaccacgggaacttttcgcattattaaaatgcataacgttgcttttgcattcaagaacattcacacggcgttttctttttgttttttgctaggtattttctatgacttaccttttaatttttcctgattgcgcgcgattttttcactcatagttcaacagctgtcaccaaataaattctaatgcaataccaaatttgaacttaaaaaaaaaaagttgtgggcaggaaaaatgcggaatgcgtgtgtatgtgtttgcttatttctctttcggtttatttttttttttaacaattttgcacgcaatacaaatttagcacgccgcggctacttcactttgagaacagagaacgagaaaaaaaagaacagtagatagggaattgttttttcagaagatctctaggaaccgggttgaaaaaacatttgccccaatatactttattgtgcgtggatgtgtgggttttttaccgctaagcgtgtcgcctgaattttacactggaacggtaaatggaaggtagaaacaccctgacttctcgacaactgaaacacaactgaacgttttgcttgctggtgattaactgagtgacggcttctatttcggttttcgacttcggttaatcacacgacggacgacgagctccaacatacgagtcgtaggcggctctgattggccagaacacggccgcgtctggcaggccacgcttggcgggcgacgtctggcaccagtgatgcttattatcgattcgataacacttaccgatgtagggatgctaataattgactagtaacgggggaatattttgtcgagtatggaattaaaatccgcgtaaaactgttgaaagtcaaatatgttctctgaaatcctgcactcgataaccggtattcaatattcgattgaatgcaatttaaagacggacatcactgatataggagttctaaacgatacaagcagctgacttttcgggtgcattcgatttagcttatcgcaaatatcaatttattttatcgcacgcactcgatttattttatcatctatgtatacattttttttttttaattttatataaaagaattactattgctggctagcggtgtttcgataaaaaaaacatattttttgtattgcaagtaattaaaactatttacaataataatgttaaagaaatccaagccatacattgtacattcgattaaattttgtatgatgcaacatagtttcaaaagaaatcgacatgtaactgacgagaatataaaagctgagacggataatgaaacatatctttaatgttataaattacaaccagtttgtttccaaattttttttcattgacatacttattgcgtcaagtaataaactaatttaaaataagcatatgtaaaataataatgatacaattagttttttttataaatgaaaacatttataattatatgtttgtcaaaaaatgcattataaaatgatataaacgtttgaaaatatacagtacccaaaataatatttgtattcttaataatctcgttagttatccgtaacttgtggtattcatatatatcgctataaac

SEQ ID NO: 15377 - DNA, 3713 bp, DROSOPHILA
caaaacgttcagttgtgtttcagttgtcgagaagtcagggtgtttctaccttccatttaccgttccagtgtaaaattcaggcgacacgcttagcgttaccaaggagaaccgctaaaaagggccacttttcaaacggttagattccagtgaagttgtaagcacacagggaacctaaaaaaaaaaaaaacagccaaaatgtctgatcgcaaggccgtgattaaaaatgccgacatgagcgaggagatgcagcaggatgccgtcgattgtgcgacacaggccctcgagaagtacaacattgaaaaggacattgcggcctacatcaagaaggagttcgacaaaaaatacaatcccacatggcattgcattgtcggtcgcaactttggatcgtatgtcacacacgagacgcgccactttatttacttctatttgggccaggtggctattttactgtttaagagcggttaaagtattgtcgagtcggatgaagtggtggtgaggaggctgatggagatgcagcagctgccccgccagcagcaacaacagcaggggcagcagtcgcatttcggagcatcagaggatgaggatctagagcagaaacagcaacaaccacaacaatcacagcaactacagagccagcagcaacaacaacaacaacaacaacaacaacaactacaaaaagaacaagaacgaaaacagcaaacactacaaccaccagtagaacatctcaaggatgcggaaatgatgaccgatagggcaagcgagaagcaacagcagcaaaaacgatcagaagattcgcaaatacaactaaccaacgatcaagacgtggacgatggggacgaagacgaagacgaggacgaggacgatgaagatggcaccattgtggaggacagcgatgccaccagctgcagcagttgtcgacgagccgaactggaggataatcagcaagaacaaccgccgacatcatcatctccccacaaggatcgggaacacgtcacatagggcattctctttcacaatatggagagagaggctacacacgagcacaccgttctagattgtctatcggatgcaaacaacgccgattggttggtggtacagattatatacaatatatgctcagcaatttaaattgaacaagcgttgatgttcaataggaaagcgctactagaacacacaaaatacactactagaaacagaggaacttgtttagaagcacgaaccaacgatgtttagtttcgaaatcaccatttcccgtcctaaacttctgcatgttgatggtatagtttagaataagcaattggttaccatttggatttgcattcgctcccaatgattcaaacatctgttgaaatatacttttaatattttcttttgcaaatgttttatgtgctggagctttgtttggacttttgatttacatatgaaacctgcgcaattaaacaattgttaacaagaaaagaaccaaaaactatgtgttatattattttccatttttattttcaatccaatttcgttggcgcttagcagaggcaagaaccacacacacacacacacacacacacacggacacatagcacaggcaacaaccaccactacaaccgaacgagtaaaataaaaagaaaaacttaatatttaacaaaattgtaaggaaaactcacatatttttctgtcggatggattatttatgtgtattgaactctcaacacttgtaatcggaaaccaagcagaaagtatataaaaaaaaatagtataatgtgaaatttgcatacacaccatactcactcacacacacagacgctctctgcacacctaatgggtacacagagaaaaatatctcattggcatgcttttcccaaaaaaaaaaaaaacaatggtattccataacttcggttttttaaattgtcaaaaaaaaaaacgcagtttaaaattgcatttgttaggtttttcgtaccgaaaatgttttctgaatatattatatgatgaaatattgcaaaataacaatttatcttgcaatatagctattataaatgattcaaactatcggatgacaggttaataaggttgtcaaattttgttggattgtttgcaaaggatattacaagtgattgctaatttctttctgtgtgcttaaacaatgtattattcattgcttacgagcaaaccaaatcggtgcgtgtttggacatggatttttcccacctcccaaccaagccatccccccgccccctctaaacctttatttactcctttgcctggattttgccaaacaacggcaagccagcaagaacatgaaaccattgcaataaaaccatagcagcaacaaattacacgcaaatcaaatattatgtgtatgtgtatatgtattgtccatccacagcagcaaagtatgcaacaaaaatttttgtagaaactgcaagcagtaataaaacaaaaaggcggagaaagtcgaaagcaaaagcaaagacaaaataaataattatcatcttgtcgtttatataagtgtgtgctatgtgtttctccgaatcggatttatgttatataaaacagaagaacagtaacaatttaaaggcaaatttcaaggaatgaaagcgaacagtaataagaaacaaggaaaccaaaaagtaaatatatatattcatgcaagaaatacaaaataaagtaaacattggtgtaaattaagcaagaacctaagtaaaacctactaaaaacaaccaaaaaaaataagaagcttaatacgtaatttcctgaaaacaacagaagacatatgcagaaatcacacacatttaccgttacttttcacacacatacagcacctctctctctttagctattgcgttttagattattgctcagcacgtttttgcgtagacacaaaactatttatgctaacggtaagatagaacctcctctctctctctcacccacacacacacacacctcccccacttacacacacacaagcactcgcaaaaacaagaagacgaagagaaaaactaaatttttttcttataatcggaatgccggatttctaacgggaaaggaaacaaaaacacaacaggacttctaataagtgtttatacatacaaatatatatatatatacatgtacatgtatacatatgaaacaaaacaaaaaacaaagcaaagcataattttttgtcataatgcaaaatatttgtgtgagaaaccaatttttgatgtaacagaaaaacgcgcgaaaaattgaatatgtgtaacggtaacagagcaaaagatagataaaagaaagtaaaaaatttatttcattcgcttagtttttcccaaacgatcgatccatttcctcattttccgttagtaacttttaaactcaaatcttttagctgccatttctaaagcaaaaaaaaaaaaatgaaacaacaaaccgagaaaccaacaaatacaaaaactagtttaaaatcttagtttgtaaagcgtttatttgaatttaactgtttaattctactttacctatttctatttaactggttttttgtgcaaggaacaaacattacttaagtttttgtaagagattagtgaattatgtgagctgagtgcgatatagagcagtattgcaattgcaactgcaatcgcaaatgtggatttatggaggcaatttcaagtaacaatacgagtaagaaatgagaaagcaaacaaaaaccaaatgagatcttcaatgtgaaataaaagtacttctttg

SEQ ID NO: 15378 - protein, 89 aa, DROSOPHILA
MSDRKAVIKNADMSEEMQQDAVDCATQALEKYNIEKDIAAYIKKEFDKKYNPTWHCIVGRNFGSYVTHETRHFIYFYLGQVAILLFKSG

SEQ ID NO: 15379 - DNA, 4525 bp, DROSOPHILA
gcacaatgggtttattagacagcggctccatctctgcgcgagtgaggatgatcggatcaatggcctgcggattcacagtcttcatattggtgtgactcattatgaaactggcaaagctgctctttgtgtccttccacccgggctcgaatttgattagcggcctgccctggtggaatagcatcagtgtgggcagcgaaacgatgccgaattctgcattgaaacgaccaaactcataggcatccacataggcgatgggtagcgtgggaaagtaatggggcagcacgttgaccatcgaagccacacgagcgcactccaagctggatgcggtgcagaaatggacaagtacacagttgcccggctcgtggcgcttggtggcattgcccatgggcttaagcagattcactatatccttggcactgcgcattatcagcagttccggctcggatgctgtctcattctcgatatcccgctgcaggcacttcatcataataggtggctttcgaaccggaggcagctggtttaggtgcatgatgtgctcgtcatccggggcacatgtgtgtcgctccttcagcaaggtttcgaagctataatggcactggccccgcgaaactcccagggaatacaccgtcaaatttgagaagagcccgaaatactggagggcacttagtaatccggagagttccgcctggccctgcgcggcgcagagcactgtggaagtggtataatgttactgattgaagaactcgatataaataaataacgtacaaaatacaaacaagagattttggttcattatatcgttggttggacagctgttgaaatagttggctgttatatggcactcgtgaaatacctggaaacttcttaggtttggatataccgaatagcaaggtaaactgcttgaccttgtttttgtaagcagtgcccattaagttggtatttcatcgatgaaacattgacgatgtatcgaaaaacatcgatgcttatttttacatcgctacaataagtttatatttttaccttaccttattttcattttcgtctgcgctcgctggtgattcccttggtggcattacatcattggtggatccattcggatccaatttagaagcgccacgatgacggagctgggcatggagctggagagcgttcgcctggcgacatttggggaatggcccctgaatgccccagtttccgcggaggatctggtcgccaatggtttctttgccacgggaaactggctggaggccgagtgccatttctgccacgtgcgcatcgaccgctgggaatacggcgatcaagtggcggagcgccatcgccgctcctcgcccatctgctccatggttctggctcccaatcactgcggcaatgttcccaggagccaggagagcgacaacgagggaaacagcgtagtggacagcccggagtcctgctcttgtcccgatctcttgttggaggccaatcgcttggtaactttcaaggactggccggtgagtaccctgagctggtgtcgctcgcttctggtgattcaccatagcgggtcattgtaatcactatagtttcagtttcaagctcactataagtgcatatgtaagtatgattgcgtagttaaaaagtagcgtaaatgaggccaggaaaatcccggtcgaaagtatcaatgatatttttgtatacaaacaagaaatgtcttgttagctgcctcaattcagctgaatgttgattgataatcctacgaaattaagctttaattaagatatacaaaaatcattatgaacttcaaatgaagttattgtatactgtataatttcaaatatttttaatgactgaataagatagtttaactttagcccaaaacgtcttcctttgtagaatcccaacatcacgccgcaggctctggcaaaggcaggtttctactacctgaaccgtctggatcacgtgaagtgtgtttggtgcaacggagtgattgccaagtgggagaagaacgacaatgcctttgaagagcacaagcgcttttttccccaatgtcctcgtgtgcaaatgggcccccttatagagtttgccaccgggaagaacctggatgagctgggcatccagcccaccactctgccactgcgtcccaagtacgcctgcgtggacgccagattgagaaccttcaccgattggcccatttccaatattcagcccgcttcggctttggcgcaggctggcctatattatcagaaaataggcgaccaggtgcgctgtttccactgcaacattggattgcgctcctggcagaaggaggacgagccgtggttcgaacacgccaagtggtcgccaaagtgtcagttcgttttgctggccaagggtccagcctatgtaagcgaagtgctcgcgacaacagctgccaacgccagttcccagccagcaactgctccggctccaacgctccaagcagacgtactgatggatgaagctccggccaaggaggccctagccttgggtatcgatggaggagttgtgcgcaatgccatccagcgcaagctcttgagttccggctgcgctttctctacgttggacgaactattgcatgacatctttgacgatgcgggcgcaggagctgcactggaggtgcgcgagccgccggagccaagtgctccttttattgaaccatgtcaggccaccaccagcaaggcagcatctgtgccaataccggtggccgattccatcccagccaaaccacaggcagctgaagcagtggcgaatatatcgaaaatcacagacgaaatacaaaagatgtcggtggccacgccgaacggaaacctatcgctggaggaggaaaaccgccagctaaaggatgcacgcttatgcaaggtatgcttggacgaggaggttggcgtagtgttcctgccctgtggccacttgggtaagtcgctgaactataccttgattgccttgagctgtagctaacttcctgttaacccgacagccacctgcaatcagtgcgcccccagtgtagccaattgtcccatgtgccgcgcagacatcaagggattcgtgcgcacgttcctttcgtgaagtgcatatcgacatcatttagagttcaccagcctagttagcagttaagcaaatcgattgattgcacccacacaaactactacagcgaagttcaaattatccggtgattagctaatataatcgtctactaatcgtctactaagtacttggccaactgcagctattcgtttttacattagctacggttgtaagttgtcgttactaactatcgcattgtgtccgagcgcatcccttttgaaccatacattatgcacgctgaaatgaccttatatagatgagcagctctaattcgcgctgaaaagggtatcaatgcaccggcacgaccgcagatcacatggatttcttgttatagtactcttattaacacatgtatgtatttttgttgatcatgtttataggccgctgatagtatggtttacacacaactatatgcattctccaataaatgtatatgtaaatgttaaaaaatttgtcttttcaattgcaaaaattctttaaaataatttatttattttgctaagttttaaatcccaacggtcttcaagtgatgtgccccgagagattagcctattagcttgcaacagtctgattccactgctcacaactatctcgatatcatcgccatgcacggttcgatactatcgatagtagcatcgatgttttgacggctctactcaaaagtaccaaaatattggtatccaagcaatcgttttcagctctccgcgtgaagtcgtgtgcgctgctcgtaagggagctccattgagttctggtcgcgaaaaactaacaagctccaacgccaagaagtgcagaagatagtgaacaaaatttagaagaaccgaaccgaagctacggggaattttatgtgtgaaatcgaaattaccaaacgcgcgctcgtgtgagtatattctgcgagtatttcaaaggaagagttcaagtgtgtgtgtgtgtgtctggtgttgctgctgcattttacggagtgtgggcgctttatgctctttatagtgtggtgtggcaagcagtggccatatccccccgctacaccagaaaacccttacagtccgctacctttccattttggaatcttcttcgaaaaacactttttcgtacggtgagaaacaaagcgacgcacgcacacacacgttcagcgagcgttgcttatctagattgtaagagggagggaggggagagagagcgcgacacgtatctgaaaatctcaatctcacaagtacacaccgtaatttcggttgtcgagcgtgctgcgcatacgcgcttggcttgataccatttctcacattttccattcgggtcagtcgctggaaacagctgtgggctgtccccccaccccttaccattcccttctaaagagaatgaccaatccacccattaaggtattccccagcgaaccgcaaaagcccaatcagcgtttattttttattcggaatgattattcatttaaaactctggataa

SEQ ID NO: 15380 - DNA, 2083 bp, DROSOPHILA
caataagtttatatttttaccttaccttattttcattttcgtctgcgctcgctggtgattcccttggtggcattacatcattggtggatccattcggatccaatttagaagcgccacgatgacggagctgggcatggagctggagagcgttcgcctggcgacatttggggaatggcccctgaatgccccagtttccgcggaggatctggtcgccaatggtttctttgccacgggaaactggctggaggccgagtgccatttctgccacgtgcgcatcgaccgctgggaatacggcgatcaagtggcggagcgccatcgccgctcctcgcccatctgctccatggttctggctcccaatcactgcggcaatgttcccaggagccaggagagcgacaacgagggaaacagcgtagtggacagcccggagtcctgctcttgtcccgatctcttgttggaggccaatcgcttggtaactttcaaggactggccgaatcccaacatcacgccgcaggctctggcaaaggcaggtttctactacctgaaccgtctggatcacgtgaagtgtgtttggtgcaacggagtgattgccaagtgggagaagaacgacaatgcctttgaagagcacaagcgcttttttccccaatgtcctcgtgtgcaaatgggcccccttatagagtttgccaccgggaagaacctggatgagctgggcatccagcccaccactctgccactgcgtcccaagtacgcctgcgtggacgccagattgagaaccttcaccgattggcccatttccaatattcagcccgcttcggctttggcgcaggctggcctatattatcagaaaataggcgaccaggtgcgctgtttccactgcaacattggattgcgctcctggcagaaggaggacgagccgtggttcgaacacgccaagtggtcgccaaagtgtcagttcgttttgctggccaagggtccagcctatgtaagcgaagtgctcgcgacaacagctgccaacgccagttcccagccagcaactgctccggctccaacgctccaagcagacgtactgatggatgaagctccggccaaggaggccctagccttgggtatcgatggaggagttgtgcgcaatgccatccagcgcaagctcttgagttccggctgcgctttctctacgttggacgaactattgcatgacatctttgacgatgcgggcgcaggagctgcactggaggtgcgcgagccgccggagccaagtgctccttttattgaaccatgtcaggccaccaccagcaaggcagcatctgtgccaataccggtggccgattccatcccagccaaaccacaggcagctgaagcagtggcgaatatatcgaaaatcacagacgaaatacaaaagatgtcggtggccacgccgaacggaaacctatcgctggaggaggaaaaccgccagctaaaggatgcacgcttatgcaaggtatgcttggacgaggaggttggcgtagtgttcctgccctgtggccacttggccacctgcaatcagtgcgcccccagtgtagccaattgtcccatgtgccgcgcagacatcaagggattcgtgcgcacgttcctttcgtgaagtgcatatcgacatcatttagagttcaccagcctagttagcagttaagcaaatcgattgattgcacccacacaaactactacagcgaagttcaaattatccggtgattagctaatataatcgtctactaatcgtctactaagtacttggccaactgcagctattcgtttttacattagctacggttgtaagttgtcgttactaactatcgcattgtgtccgagcgcatcccttttgaaccatacattatgcacgctgaaatgaccttatatagatgagcagctctaattcgcgctgaaaagggtatcaatgcaccggcacgaccgcagatcacatggatttcttgttatagtactcttattaacacatgtatgtatttttgttgatcatgtttataggccgctgatagtatggtttacacacaactatatgcattctccaataaatgtatatgtaaatgttaaaaaa

SEQ ID NO: 15381 - protein, 498 aa, DROSOPHILA
MTELGMELESVRLATFGEWPLNAPVSAEDLVANGFFATGNWLEAECHFCHVRIDRWEYGDQVAERHRRSSPICSMVLAPNHCGNVPRSQESDNEGNSVVDSPESCSCPDLLLEANRLVTFKDWPNPNITPQALAKAGFYYLNRLDHVKCVWCNGVIAKWEKNDNAFEEHKRFFPQCPRVQMGPLIEFATGKNLDELGIQPTTLPLRPKYACVDARLRTFTDWPISNIQPASALAQAGLYYQKIGDQVRCFHCNIGLRSWQKEDEPWFEHAKWSPKCQFVLLAKGPAYVSEVLATTAANASSQPATAPAPTLQADVLMDEAPAKEALALGIDGGVVRNAIQRKLLSSGCAFSTLDELLHDIFDDAGAGAALEVREPPEPSAPFIEPCQATTSKAASVPIPVADSIPAKPQAAEAVANISKITDEIQKMSVATPNGNLSLEEENRQLKDARLCKVCLDEEVGVVFLPCGHLATCNQCAPSVANCPMCRADIKGFVRTFLS

SEQ ID NO: 15382 - DNA, 11628 bp, DROSOPHILA
ttacactaataaataacaaaaacatcgaaattgaatctctgttggataagttgtttatgttgcataaccaacgaaactgtcaatgtcagttttctcttcagcaaaagtaaatctttttatgtgaaagctttttccattatctttggccaaatagatttgtaatgcagatagacacttacaaaatttaatcagcattaatagaaaaaactaatggcactttaaaacatacctttcatataatagtaaacttttagatttttcaataattttatagcattacaaacttcttagtaaaaatatctactcattgttctagccgcattccattgccttcgatgtgtcactttcgatctaatcggttgagtaactcttctcaaaactgcagacttgatttatgctgcagatccatttgcgatttgcatatttcccactccattgaccaatattgcatatgcctcacgtgcttttcacccgacaacgtgactaagtgtgcggcgatgctgagccgccgaccccgcgatcaaccgctggtgtccaaaaggttggcatttattggtggcaaaacacctgtgtgaccggtggtcagttgccttggtggctcgcgaccctcccgaacgatttgacgtggggatttctgatgaaattcatcggccaccggttacctaagcgattagccagccagtcgcgtaagttaccagctttgagccacaatgaaaccgctttgccacgggaaatcgcacatttgtttacgtgcgcaccggcaagcccccaggtgatcatgtgggttgactgaaccgccacagagattctggccctgacagccatcaagactcactgacctagaccaatcggttgctttattgatgatcatctttattgatagctgtgtggtattttgcttggttagatagtaaaagacatacaatttttagggcattcatcttgcacaggagattgaaaactttcagcttaacttataatgggcgataacgtagtaggattaggcgcagtcccgcgactgatagaacagtatgtagccggtctccgaagacttgtgtatgtccgaggtcagaccatagaagtcctcgattgtggaagcctcgattttgtccaccatatcatcgtcgaatagtagccacagtccgtgactcttcacaatggatatataatggccacgatttggtccggaaccgcagtggataaccacagcggtcagatcgtagagacgatcaggattcactgcatcatcggaggtgttaaagagcctcagttccagtggaaacacaacgcgatgcgagaccttgatgtgcctattaaactgctccatgtacttgaagcgcttgagatgcagggccaggatcatgggcaacttctttacacgcatcctcttctgcgcctcctgataactgcagcaattgtcgcacttgaacttgttgtccgagcacagggtctccgtgttgctgaagcaccgcaggcagtgcgtaatcgaggtgttctggtccacgtccacctggagatcgaagaaattctcgtccttgctgctcaccgtctcgcagttgaggcacctggtctcggacgtaagtatgccctgaaagatctcgtgcacccaggtgggctccgagttggccccattggttcccgttccgtttcctgagattataggtgttgtggtggccgtaagactgccactggcatccagcacacttgtgttggcattcagtgatcccgtcgaattgctactgttgccatttgagtttgttgtcgaattggagttggaattcgagttggacgttgagctggacttgctagctatgctgctggccatggcacttgtgcttccgccttgattggtggccttgggattcccattgctgggccctgcattccgttcggccagtatgatctcattgatgtgattgatcagaaagttgaggaactcgtgggcatcctgctgcatatagttatcgaactcctccttctcctttcgcagcctggttatgaactttttgggcgcaatcgagcccaccttcttcttctgcgtggcaatgctgtagaacagatccgccagacacgacagcagcgtctccttgggcctcttgttcttggccttgtactcaaggaccttctcgcggaatggcttgcaaaagtagagggcctgcagcaccgagttgctgtagcaggtgttcccaaagttcaccagaccgaagtagtgctcattcggtgggaacagatcggagccaatctcccgctccagctgcgacacattggcacccatgccggcaccaggagctgcagcggcacaccggtacagaaatgaccacaccgtggttgctttgattcagtcgtcctcgttctttgtcgttcgtcgggatcgcgctgtcttttggttagagcatttaaggtcttgcctactgagtttgcttggaatactttaatttttggggggcagagtcgcaaaacacccttttttctgtttctgtctgaaaataaataattttgaagaggggatacacgtgagtttgcttcgcataacacaaacaacagaaattaaaaatatttttaatatttactttgctttcatttttagtgttgtacttcgattacttttcgattattacgttaagagtttgttataaaattgaatttggaattttgatattgcgacactaaaaatcaagcagataattgtaaaactaaaatgcgtaagaaaagcaaatgaagatcttcaaagattcaactcttatatcccctctcgaaaattatttgtaatcttgggtgttttgcattataaataatttttaacacaatttatattgggagttcaccgaggaaaaatttacatatttaaaccaattcacttattttagcataaaatcttagattatcacaccattatattataagtaattttcacatagttcaagtttaatgaagagtttcatttatttttctagaaattttcctcagtttgtgaaacacagacatgcatgttgcaaaatcggttcaaggatgtccatgaccttcaataaaaaataaaactttattggtaaatattctttattaacattcatggtcgcctgtgaactttagtgcaatattcttacgtgtctgaatgaagccaaactcacgatgatcgagcacaattcgttaaattaacaaccccaagagcgatgagtttatgagtttattgtccaaagtccgagtgtgaatcaaaagccacaaatatgctaaaaattctcatgtaattcgaagcgaaacatatgcaaacatggctgtgaatcagcgcaatcgagcagctggttttcgatttcgtatcatccaaacccgctaaccagctaaccagcttacaagctgaattggatcgatggatcgccgctgtctagacatcgagatgacggtaagggctaaatatagtgtcaattttatagaccgtaattggagagttcggtgctttttctgtgaactgctcgctcgatggggcagttgaatgtgggaaaattccgcatgccacgcaacccggcgacccggcgagtggcggtcgtgtgccatgggcggatgcacccgctccacgctcgtcgagaatcgtataaaagccgagtcgcttgacgctgcaaacttacagttacgattaccagacgccagaagacacatcaaacaaccagttagcacgagagccaatcagccagccaagcccccacccgaacttgggataagcaaatcgcagacagctatctaaaatcgatacatccgatagccaagctcttggaaaggaatcttccacgtcgtgtcaggaatcagccgagttggagtatccttatacattcctgtctaaaatcaccaatgccggcgcaggattaacaacggaaccagtcaacaatctatcagccaaagtgctgaagattttagcttaagtgtcgtttaagccaatttaataagttaaccgactgattatccttaagagatttaaactcagaatgtttggtaatacctgttacatttgtcaatagttatagagctacgttcctatacacttaagagtatactaagcaaaacgaaatccgttgctattttactcgcattattaattttgctgtaataaacaatttcaagctaaaaatctattgtatgattttaattgcattacgtgaatttattgattttgccccagtttggaggggatttttaaaccactttcagtaatactatcttcgaagcaatatagctatggataccgcctggttttgtaatagattctatggcacagtgtcatttatctgctccactaactatggtaatcaggtaacagttccttagaatttccttaatacatccatttatcgaatagaccagctaagtttctactgtttcgtatttaaattgacatacttgtgttgaatactgttgaaatttgaaaatactgttaagagagttcctgctaaaactaattattgaaccggcttaaataactttaaaacgcagttagagaaagtcccacaaataactttggattatataagataatatcacaatgtaactgcaataactactagagtatagcttttactgagaaattatctaacgaaatcgattacagtatcttgaaacgcaataaaagagagatccttccgtgacttaatgattggtttttttgatcattaatagaagccgtgtaataaaaacaataacgtgtgcattattgtttaatcccaaagtgaatattgtaattaaaatgtggtttaaataatcagagccattgattaatttgtacgctggaagttgagacactaattaacacaatttgcataatgttattgtaaataaagtggtaacgatgcttattgcaagtattattcttgggagtcccactattttgggggatataaaccgtaataatctttcaattgcaattaaatacaattgatatcaatagtttgtggaagcaaacaagttatataccccttagtcgtttcgctttaggctaaaactacaaacgaaatatggataccctttgcaagagtataaaaaacgtgcttcttttgtttacatttagaacaggctttaacactactagtagtcactactagtcatagcaaaactaatgagtcatgagaagtgtgccattcgagggtggcaattaccaagaagtgagctttgtcgcacttctcattgcaaacgattatatggtacattatcttaatcaaatttattcataattctctaagagtgaatcagctttaagaactggactactgaaataccgtgatataaatatagaacatattaatgatgcttggtctaaaatagattttcccaattcaaaaaacgcccatacaaaagtagccccactataaaaaactgtctacctgggtaatttttatgcattactgactagcgaacagcgccacgtcgatataaaactcactaccaagtggaatttcataacagaagtgaactgaacatgcaagcgattgtaagtactaaagtcatttaaccctgtaatcccacagaataataatgtctaatcctttcagtttatattgtgcgcactccttgtatgcctgctagtattattgagattaagttggagcggcggaagttcggagagccaggacgtgaccaccacgaatcccaagtttctagtacacaaggactcccattcttcatatgattggtccaacgatgaaattaggaacagagcaaaggataacgatttgaatgtcatcactggagaagaacttttgaaatcaaaagcaagatttcaaaagcttctaagcattctgaggcgacaaccaaataaggataattattctatagatttacccggtcaatttgatgacaccagtgatccatcaaatgcagaagatacaactatcttttgtaatccaattcttgacgaaaactgctacccagattctattggaccaagactaagcgccactctactaaagatccttgcataaattgactgatccatagatctacattaatcggaactaattcagaaaaaatctatttacctataattattaagctattaatattactaaacactttaatatacatatgtgtccacatctcgacttgatttcaatttgtttactcgtgatttaatcaacattctattatctgatcgatcaaatgctttcacacgccatttagcatttaacaggattagatgattggataatataatatctgaagtcaaatctatataaactgaatctcaatcaattcgagcctcagtatcaacattaaaatgctacctatagtaagtgcgaatatagtgaaatgtttagaaaccaaatagaaagatattcaatcttttctctttagaaattctttctgttccttgtgcttttgatcatccacaacacgtgcggtctaatagattatcccaactatgatagtcaatcgccagtcctaagaaaaatccgttcgggtgtagatacatccaagcagttgatttctatcacggatttgaatgccaaggaatcatcagatgacgagaaatcttattataataaccctatgaaccctttttatatacatcttagtgtacccgtattaaaaacgctcgctaaaaataaacaatagcttaacataactaatacttgccaagtaaaattataagaacttctatataattttttcttaatgttcaaaattccacatgcataaaaataaaaaaaagtcaaaatgagagcgagcttataattgatttaccaaatataatgacaatgataaacaggattgctattcttatccagaggattataattttttgtacaattttttttttagtgtcgtattctatcgtttatctgtaccagtttttattaattatctaaatgggaccgtattagcattataagttctatataaaagtcagtgccagacagttcaagttttagtatcaaatcgaaaatgcagctgagtgtaggtttccaagtaactcggattgtgaaaaagtggtaataaatttattccatatagattatagtattgctcttgtgctcggtggttgttgcaaattcacttgccccaagtcaactggcatcgaaaaccccatcacccaatgtaagcaaggatcagccgtcatccagggaggagaaacccagtttgaaaccgtgcaaacccatcgagactgtgagttcagagccaaaaggactaggcaatactcctaaagtcggttcaattactccggaatcagctaaaacgtctggcacaaccgtggataaaagtctggatgattgcgaacccattcccgagggtattggatctcgattgaatgcgagaactcttcaaacactggttataaaaaataataataaccctctttttaattgagtaaaacatgaaaatcattaaataacatttatgtaagcttacttcaataataaattagtacaaagaaaatcgtaaatcataccaagaaaacttctaagtgattgattaacaatttaaactcgttttcattcaattcctatctcaatgggaatctcactaactgggaattcgatataaaatcaactgctagcgagattgagcttcagtatcaaatcgaatatgcaactaagtgtaagtatccaattaaaccggattgcaattgataaatagcgctaataattttacctattatagattatatttgcgcttctcggctggatcgccgttgtaaatgctggtggtctaagccaactcttcttccaatgaaaactacgaacagccctcgtctaagcaggtgtcgcacattaaacaatgcaagaccgttgaaactacgagtttagagccaaatgaagtgctccaaagtaccatttcgcctgaagtttccagtaccagaaaaactgtgccgcttccaactttggctcctagctcctccttaacttccacggaaatcaacactgatattgatagtatatcgagaaaaagcgagagaagagttgttccactaccaacacttaaacccacttccactttaagcccaattcaagttggcagtgactatggtcaaaggaatgtacctcacagcggtattatgggtttaattccattggccacaagggcactggaattaattaaagaaagggttgatgaaagtgtacccaatccacagaaacttttaccccaaccaactttgaagccatcttccactttaaccacaaccgaagtcagcttggaaagggaagatcaaattcaggatgattgcgaaacccttcccgacggtattggatcacgtttagatgctaaaacacttaaaacgttagttaaaaatcaattgggataaataagtattacattttgttaatttaaaagttacaaaatatcaaataaattcttcataccgagaacaattctttctagtctctatttaaagtcaatcggcatgtgtcataacactgaacccgttttcatttgctattaatcggaatgggtaaattaatgaattactaactaacaaggggttgcaatataaatcgaaccgtcacagcgttatagcttcagtatcagctcaaaaatgcaacagagtgttagtatccattcgaaccggattttatagcgttacattaactaccaattcacatcatatatagtttctagtcctcctacttggctgtgtggcatttgccaacgcttttggcttcagcctgcgatttttaaacccatcaacggaccctgtccagcctgcagaaaatccaaaactatgcacacctatggaggaggcagcaccttcggaaagggttcactcactgatctcgccatctgaaataccaagtagtacgccgaatgatcctgtagtcgtaaatggaagacccgtggtacctctacccacacttgcaccgatttccacttcaactacaacacagctcaacagaggaacatatgagggaaatgtgcccaatcttccggtggactgcgaacccacaacattggatatcggaagtcggttaagttcgcagctcctgagaatactcacagtcttgggctaagaggatacccttagcattattttcttaaaatttatttgtcttgagatttgtatatcaataactaactaaagggtttaagataatttaaatttcttattgaataataaatctgaagatcgttaaacgcgtttaattaggaaatttctttcctaaaacattgctttaacagaagattttccagggctttttccaaagctagcgatgacacagaaaacccccagagactagacgctccaatagtttcaattactgtcaatcagcattgctggggccaattattaaatccagtcaatagtcacagttccaatagcaatggaggaaacccgtttgccggggcgtttgccgacagcacatcagaaaaatcagaaatatcatagatatatatctctctctatatctgtccaaagaataattggtgcgaatcggcagtttgagaactctcagttgcaatgttacggaccggttttactagttccgttgtatagattgcaactactgcaagaacacagaacaaataaatacgtaatctcatctgggattccattcattcagtgcctcaaagcagcttaaattagaatgatcagagttactacggtgagtcaaagtcctctaaaaacaaatatgaagagtaaacataagtttttttttaaatattttcagtgcctgttgatgttcgtattctttgttttgtacatccatcaaaatcatgccgacaccaaagtgctttacgaatttcagtgcgtagttgattgcgttttattttgatattgattttaatttcactattatattttctcttcccagcatcagggaagccaaccagcagcgcgatgaaatgggagagttcaaggatacgtccgaggaatctgacgaggaacccgaactgatcatcacgggcaaacgaacctcttcgtacgtttttcccgccaaggataacaactatgtgtacgtggaaacggccacctatgtggcggataacaatggctatcatgtcaagtacaacatcaccttggataccgtggagcttgaccgtcgcctcagcggacaagcacttaagaccaccgctggttaggcgacacatcgagtattaaactagtgactaagtcgtagctgtagtcaatactacattatttattcgaactttaaagtgacacgttctcaaagcaccattgcaaataataaaaggaactttgaaagcgagtttggggctaacattaagtggttcccaaacggatgacagtgcagtaagttatggcactttgttttggctttgttccaaagctgccactttggcattttaatttacgagtgcgaaatacatacttaaactatgatacacgatctacagatgcggtcaatttgttttagagtaagtgttagtaacaacccgcaaatataaacaggattttagtcaaattgaatttgagccaaaacagttaatacaaataacccaggaaattggactattatcttgaccgcagctgtgcgcaaatataagaatgtaaattcccttaccgtgtgtgaagtttccttgatggccgttgtctggtgatgattgctagctggcaatttctagtcaattttccgtggttaaaatgtatttagaaatctagcttgaggaaaagttcaatctgcaattagaggaagaaggaagggggcaaaaattagtaacgacgcgagcagactctgtgagcacaaacaacttttaattatacgctacaggatgatgatgagtcggtaccaaccttgggcccggaaaagccattagctcattaactaatacgtttacatacgagtatatatatacacataagacttgaagctcggataggcagctaccttgagggtcaagtgcgaatacagcccacggaacgcgattatcagatgcgagagtgggagaatgggaggaaaatgagcactcaaattagaatttaggaattttaggtcagtcgcgtaattgagaggctgagcaaattcactgcaacggttaatggaactaattaaccaatcaagcggcggtggtgacgataagcctcggttcaagtcaaaaatcgacgcatctctcgattcccgctcagtttcgtttcggcaatcattcggatcacacggaaaacgtagaagcctcatttgccgtacattatggcctctcaaccgcttggactcctgctgggagccatcctgttttcgatatgcgcaatagatgcttcagtgcctcatcctttggcggccaactattcgatagacatcctgcgactggccaaggctgctcacatcaaagcctatatgggcgatgaaaaggagcaggcttgcaataatttctacaactatgcctgcgccaattggcctcgtttgcatcccgctcgaaagtcaaagacgcggaccaactacctggaggaactccaggagctatatatccgtaagagcgcagatatgctcaagagtgcgaccagaggagctgagaacagtgccgatcgtcagttgaagtacttctatggatcgtgccgcctacaaacaaacgacacgcgatccgccctgaataccctgcaaaatgtgacggatttccgaggcggttggccggagattcgtgtggcgtcctggtatcagtacgagtatgattggctgcaggtggtggccaatctga

SEQ ID NO: 15383 - DNA, 1606 bp, DROSOPHILA
ctaattgcagattgaacttttcctcaagctagatttctaaatacattttaaccacggaaaattgactagaaattgccagctagcaatcatcaccagacaacggccatcaaggaaacttcacacacgacagaaacagaaaaaagggtgttttgcgactctgccccccaaaaattaaagtattccaagcaaactcagtaggcaagaccttaaatgctctaaccaaaagacagcgcgatcccgacgaacgacaaagaacgaggacgactgaatcaaagcaaccacggtgtggtcatttctgtaccggtgtgccgctgcagctcctggtgccggcatgggtgccaatgtgtcgcagctggagcgggagattggctccgatctgttcccaccgaatgagcactacttcggtctggtgaactttgggaacacctgctacagcaactcggtgctgcaggccctctacttttgcaagccattccgcgagaaggtccttgagtacaaggccaagaacaagaggcccaaggagacgctgctgtcgtgtctggcggatctgttctacagcattgccacgcagaagaagaaggtgggctcgattgcgcccaaaaagttcataaccaggctgcgaaaggagaaggaggagttcgataactatatgcagcaggatgcccacgagttcctcaactttctgatcaatcacatcaatgagatcatactggccgaacggaatgcagggcccagcaatgggaatcccaaggccaccaatcaaggcggaagcacaagtgccatggccagcagcatagctagcaagtccagctcaacgtccaactcgaattccaactccaattcgacaacaaactcaaatggcaacagtagcaattcgacgggatcactgaatgccaacacaagtgtgctggatgccagtggcagtcttacggccaccacaacacctataatctcaggaaacggaacgggaaccaatggggccaactcggagcccacctgggtgcacgagatctttcagggcatacttacgtccgagaccaggtgcctcaactgcgagacggtgagcagcaaggacgagaatttcttcgatctccaggtggacgtggaccagaacacctcgattacgcactgcctgcggtgcttcagcaacacggagaccctgtgctcggacaacaagttcaagtgcgacaattgctgcagttatcaggaggcgcagaagaggatgcgtgtaaagaagttgcccatgatcctggccctgcatctcaagcgcttcaagtacatggagcagtttaataggcacatcaaggtctcgcatcgcgttgtgtttccactggaactgaggctctttaacacctccgatgatgcagtgaatcctgatcgtctctacgatctgaccgctgtggttatccactgcggttccggaccaaatcgtggccattatatatccattgtgaagagtcacggactgtggctactattcgacgatgatatggtggacaaaatcgaggcttccacaatcgaggacttctatggtctgacctcggacatacacaagtcttcggagaccggctacatactgttctatcagtcgcgggactgcgcctaa

SEQ ID NO: 15384 - protein, 424 aa, DROSOPHILA
MGANVSQLEREIGSDLFPPNEHYFGLVNFGNTCYSNSVLQALYFCKPFREKVLEYKAKNKRPKETLLSCLADLFYSIATQKKKVGSIAPKKFITRLRKEKEEFDNYMQQDAHEFLNFLINHINEIILAERNAGPSNGNPKATNQGGSTSAMASSIASKSSSTSNSNSNSNSTTNSNGNSSNSTGSLNANTSVLDASGSLTATTTPIISGNGTGTNGANSEPTWVHEIFQGILTSETRCLNCETVSSKDENFFDLQVDVDQNTSITHCLRCFSNTETLCSDNKFKCDNCCSYQEAQKRMRVKKLPMILALHLKRFKYMEQFNRHIKVSHRVVFPLELRLFNTSDDAVNPDRLYDLTAVVIHCGSGPNRGHYISIVKSHGLWLLFDDDMVDKIEASTIEDFYGLTSDIHKSSETGYILFYQSRDCA

SEQ ID NO: 15385 - DNA, 5944 bp, DROSOPHILA
tattcaaacccataataaaattcaatatataaattacgtaaacccaaataaactacattactgtctaaacatttttacacttaggcaaatatttatttacaaatcgtaaattgaagtgagaatgtggcaaacttttataactagacattcactgttgtgctgaacgttatttggaggatgatattgttattttgctatttacaaatgcgtccacacacaaaatgctaacaacaattgaaaaattctagagctatttcaagtcttagcctggaaaatgtctgctttgaatttgagaaaagagcttgtccttgatacactaaaaacacttagagtttggtttagcttcgaatgccaactatttcggttccgtttcttaattgtatattagtggaaagttagtttcttaatcctagagcaacaacgattcattcacacattcactcgcgcacacataaaatatttagctgggggttggtttctattcattgtggttagggcttacgggtttatttcgctaagtacctatgaataaaatccgctgcaaattcaattgctgcctgcttttcgtttcgattttttgtttttggatcttttctggtggttctggttacaagttttgcctttttgcatttacagtaaaaacgtggcctgttcgccgctcttcatgtccagataatcgtacagagcccgctcgttggccccatagttgccagcgtgtcctggaagtccggagtgggcgggatgaccgtgatggtggtacggtggcatattttcgccagcgggcgttgcagccggcggcgaaggacctgcgcccatcgtcagcccgaacttctccaagtggcatcatttgagcagcgtcggcaggctgctgttcattagccggttgcctactaccaatgaattgagcgttgaattaccaccgcccacgcccactccgacccccacgcccacgcccattccggccacactgagcccgccaattgtcccaaatccggcactggcatgagccggtgtcgccgtcaacgtggccgtggcaatattgaggttgttgctcacactggacgacccaccgctgctggacacatgggatccgttcaggttgccattgcttccgaaaccactcatgaccgtaccaccaccgccaccgcctccgccaccagctccactgctggtggtactgctcgaggtggagcccactccggtggacaccccggatccacctccgccacctgcaccgcccactccgccgatgcccacgcccgtcgaggccgtgccgccgccaatgcccgaggcactggcgatggcgttgctctcatattagaaggcgccaccggacgatgatggtcatgcgtagtggggatagctgctcaggtggggcgctacgtgggagggggtcacgtggctcatcgagtgcggctggtagagattcgtggccggactgccccagttgccccacgaggcggccgacgggaagatcgaggctgtaaagaatacagataacacatataatttctggatcaatattttctgttttccctttaggaaaattaatctctttaaatttgcacttataaccgaattttttggttcattagcttattttatacattgcctataagtattaaatttctaattaactccaaatgaagcattatttatgatcaaatagaacggatgcacacgtattgaagcaatatttttgatttaaaagcatatgagtttccctaaatggatttaacaaaacgaaagcttacccgaggatgaggtcatgccatgatgcggactcatgaacgagctgagcttggcgctgtggtgatatggtgtcatgaacaagtcgctctggtatttgtaggtgggatcgctggccgccggctgagtagcagctgccaggccttggaaatcgaatttgtacgcataccgcttgccgtgcaccttggtcattatatttttgtcgtagtagtacctaaatgggaaagtagaaaaaacgggtttaaataaaaacgttttctataaatataaaactttagtttaattcttggaagtgcagttttcactatttccacaataatcattcataaatcaataattcaaacatgtgacggccaataagacacattgacttataattattatttaatattcttacatacttagtaataaaattaaacttcagcgtgaagtaacaaccccagtggaactacttcttctgcagctcgtttctatgatctgaatgtgggaaagtcaaacaaaactgagatgaactgggttgtgtgcctcccctcggatggacagtaaataattacagaataatgctcgctttatgcgttttaagttaatttgctgacattaagcgattttagtgccgctccccagacgcagctccctttttctgtttctgcaattaaatggcaacgccttgtgcacaaacgcaaatagaagtagaaatttttggcgaggggtgaaattatgtgggcgggcagacggccaagaaatccgagcgaaatttgtttacattcgagggttagccagcgatttcttttcattaactttggatatttgcccagtcagcaggactgtgctccgtataaaggacattcgagcggcaatttaaatattcctttcctcctggatattgtgcgtttattgttacgctttaaaatgtccacaacttccgcctgacaagtgaacaaaaaaaaaaaaaaatgttgcaaataaattacaaagagttgcaggcaaagcaaacatttcaatgcatcaatgtaaattggcataatgcgtgcagttgggttctttctctcttatttttccattttgcaccgtccataaattatgccaattacggccataaattaaaagcagcaaaaacaaaagcctgacggcaaaattcaaaagagtaaatgctgaaaaaaaaacaaagtcctgaatgccgctgctccttgcacagacaatcaaagccaatcaatgactgatgagctaaggacaaaggagcacaatcagggagccaggataactgcatggagagaaaaggattaaagtaaacccatttcgaggattggccagaccaacaaaagggcagctggctgtgaataaacatgtcaaatgaagcattaaagcacttgtccttgctctacgcttgtgtgggtgcattgggtgtcttttgtgggtatgtgtgtgtgtgtgagtgcgaaggatacccgagctgagtgttaatttacacacccacacacactcgcatttctgagcaaacatgaaagccaacggcgatgatgtctcttgtgttcaattgagttgaaatgcgcaaaaagaacagacatgttgaggcttcctgcacatcaaaaaggattcctacaccgcccccaaccgtcgtcctgccattgttgttgcgtgatttttctacactttttacattttatttacatgtgtgtgcggagcatgttgcaaattggctgtcaggacttttccacttgaattcgcatcattggcactcgcctgattgcgagtgacagtttcaaggagccggctaaaagggttcgccattcaggataaggctaactctccatgtcctggccatgtttattcaggcaattgaccgttgcacaaatagtttgtgcatatggtttgtgtttcgtcaaatattggagttccagatttcgaaatcgaattacgtttctctgcaattagattgcgaatttattggatttttgattacattccatttcggtcctgacgaacaatttatgattgagtttctgtgtcgacctgcccacgcccacacaatcaagtgagccaaagacttggtcagcaagtggattagctagtttttttgggtgattttctagctctttagccatcaaagcggctaatcagtgcagggacaaatcatttactgatgagccaaatagcaaattgcacacatgctcgcatttcgacgacggcacagatactgcctaattagggaatactccagtgcacaaggaaaacatccccatgactgggatgaaagtaatccgaaatcgaacttttttctatgtgaaattatgctcaatataaaaacgtttcttgatttctcgttttatttttcctacacacgatatcttaaatacgaaacaataatggttggttgaagaaaaagtttactaatacactaaatggaagtaacatagtattccattggcattagttcaagagtattttatacagctaagttctatatacaaccgaatatacattaatactatatattatatatataattaaatatatattaaattaaattttgaaataaataaaatgttattcagaactcacctcaaggcgcgactgagcttatcgtagttcatgttgggcttggacttcctctcgccccagcggcgggcgacctcgtcgggatcggttagcttaaactcgccgttggtgccctcccaggtgatgcagctggcgttattggagtccgagagcagctcgagaaggaactgccacagctggatttggccagagcctggaatgggggaatttgagaaatgagcccagtgattcgtaagtattgagacatttaatgtgggtatttttggggcctgcctaaatgtccatcaaaagagcatatccttttggcgttttggggcctaaattaactacggctgcggggatgtggccaaaatagtaagcattttggggcatgcaaaggacccataaagcatttcctgcccagttcgctggctagggaaccgaaacgcaatccaagaaccccccaaagtggctctccccactcccaataaataactgagaccacgggggtaatctatgacgcttgcctcaaattattgtaagagaagtgtagcgcagcggaaatggcattgcatgtaagtgtaatggaagtggcatggagcagctcctccgggaagccaaagagatattatggctagcactttcactggaaggagccatgctgtgaatttaaattggctcaagagaagaagtagttctaaaaagggttttgaaactgcatttaaagaagagtaagtttaaaaactcataagagtttgaacagtgtttttgcctcaaaaactagtggtttaacctttttttgttattgcttccttgaaatgtgactcccggcttatgtattccgccatttgaactttgactttttgtcgtagctttcaactccctcaactttccacatttcttattgtgcgtgctaaaacatttatagaattatgattgtatattgtgtgctgaatttgctacgcattcgacgcagacatcataaatcgcttaatcatttggcaattaggccgtggaagcgaaaggacgactaagggacaacaatcgctcctttctctctctctgctcgctgtcaggcggaatacaaaaaaaaggacacagggtggttgggcaaacttgagctgtgaaaaaagggaaaaggaccttttgcggggtggctcagcgctgctcatgtgtgagaacgtcatgaatattgcgttaattgcaaatcatggccaagtgaatgtgttaagtgccaacacgacgattctccgccgactgacgatgatgaatgataatccttggccgttcagaagacaccgagtccatggaaaacagggcgtggctccttgggcaattgacacgctattagcagccaacaaaagctaacgaaaaaactaattggtcaagggggagccccagtgttttaattgcccgctaaggagtgccagcgaggcgttaaagtttttgatcccgaaaaaatgttaatttaataaggagaaaatgtatgttaagccggaagcaattagttccagttctttgatctccgcacatttccacgttgttttcataattaagaaaacttcagttcgttgctggcttatttaattatgcagcaactaactaaggcaatccgtgtttccctttttttatcactcttggggtcctgcaaatactcgta

SEQ ID NO: 15386 - DNA, 899 bp, DROSOPHILA
atggctccttccagtgaaagctctggccaaatccagctgtggcagttccttctcgagctgctctcggactccaataacgccagctgcatcacctgggagggcaccaacggcgagtttaagctaaccgatcccgacgaggtcgcccgccgctggggcgagaggaagtccaagcccaacatgaactacgataagctcagtcgcgccttgaggtactactacgacaaaaatataatgaccaaggtgcacggcaagcggtatgcgtacaaattcgatttccaaggcctggcagctgctactcagccggcggccagcgatcccacctacaaataccagagcgacttgttcatgacaccatatcaccacagcgccaagctcagctcgttcatgagtccgcatcatggcatgacctcatcctcggcctcgatcttcccgtcggccgcctcgtggggcaactggggcagtccggccacgaatctctaccagccgcactcgatgagccacgtgaccccctcccacgtagcgccccacctgagcagctatccccactacgcatgaccatcatcgtccggtggcgccttctaatatgagagcaacgccatcgccagtgcctcgggcattggcggcggcacggcctcgacgggcgtgggcatcggcggagtgggcggtgcaggtggcggaggtggatccggggtgtccaccggagtgggctccacctcgagcagtaccaccagcagtggagctggtggcggaggcggtggcggtggtggtacggtcatgagtggtttcggaagcaatggcaacctgaacggatcccatgtgtccagcagcggtgggtcgtccagtgtgagcaacaacctcaatattgccacggccacgttgacggcgacaccggctcatgc

SEQ ID NO: 15387 - protein, 184 aa, DROSOPHILA
MAPSSESSGQIQLWQFLLELLSDSNNASCITWEGTNGEFKLTDPDEVARRWGERKSKPNMNYDKLSRALRYYYDKNIMTKVHGKRYAYKFDFQGLAAATQPAASDPTYKYQSDLFMTPYHHSAKLSSFMSPHHGMTSSSASIFPSAASWGNWGSPATNLYQPHSMSHVTPSHVAPHLSSYPHYA

SEQ ID NO: 15388 - DNA, 4416 bp, DROSOPHILA
tccaaggccagtaagctcgttgacttggatgtaacggacattgtaaatctcgcggatttacccaaaattacctcagccaagggattggaaagattgagttttacctacgacaacttgacttcgaatcacatggacatgttgccccatctgaaggatctcaactacttggagataagtcacgagaagggaaaggagatctttatcaaggatctggatgaggatttctttgtcgaggaagcggaactcaattgcggccagttggcggatctgttggagttcgtcgaactgcctaaggacacaaccattttggaagatagattagttggagatcctcgagggccaatgagatgtggaatggcatagaaaaataatctattaaatgggaaatagtattaaaattcctacttatttatactaatgagaaaatattatataaatgaaactgcataaattaagccaaataaataccatttatttgccccctctttgtttgattttacatttacaactacaaacacttcactttaaggggccaacagaacaagtacttataattcgtcttcattaaaattaattaaaaaagtgtaatttttgcatactgtttacaaatcattaatcaacgctatacaagttgagatattttcacttcaacttttccgcctgtctccgcaattgttttcggtttgcaaacattgcagccattgtttaaaaacgatttgtcaattcaccgactcttgtgatcgctgaactcgaacttctgaacttctgcgtttttttattttttattactgaatccacgatgatcggtgtcagtggagcgcacagatcttgtcatctgcgatcagtggtcatcgattagcgatcactccattggccagcgaccagtttcccagacgaatgtgcttagatctgtctcagttgattagctcatattggactacacaggtgcagtggactacgactatggtgcagagatcgctggagaatgccatttggggtattagtagcgctcccgatgctccattttgtgatgggtagctggattggtagcgggattcgtgccgggaatcagagtattgggcaactgaacagggtgcacagtagaagattgctttggatttgctgaaggcaagggctcctttgtgctggccacgtcgtctaccttgttgttatccttgaggatgctgtttatgtccaaactgtcggatttgtggtagaaaagataggcggaaaacatcaggcccaccagggagaaagtaatgagggaccagcgcaggactgagttgatttttaggcccctaaaaagataattaaaatatgttatataatttctcttaacaatgtagattccaacttacagaaatagtgtgtatttcactaagttcgtgtaggtcttgttcaactgcacgccctcctccacccaaaacatgggcaatatcagcttgggtagattcttcatgggttcaatgccctccactggctccatgtccagattaaactgcaaacgcttggcagcctgaaaaggtgttccagacatctgaagggagtagaaatagataatatgcatgtatattcattactcaaattgcttgcttacaagttcaaagtctatgtagaccgcatgatccttttcattcggattgagaccatcaacgtcggcaaccagctttggatcgcccagatagaaatgaggcattgatgccatcaatggaccaccaacacaggccgccagattcatagtgcccttgggcgggacacgtgtccagatcttcgggatcttcgcagaaacaatgaagcttctcatcggcacgtatatcccccaaatccagggtgtatctcatcgatggcatgccatggtaggatgacttgtgctgataataagcgcccagggatctacacaaatccggcgtgaatgcccacaggccatcctcctttttcaagcccggtgcaaagaccgtagaatcagtgcccacaaaggtgttgcactcgccatctggccaaatgtcttgctccggttcgtcggcgaatttcactacctttccaagctttttgttatttttcactccgcgacagacagtgaatctgccagaatccgagtgattggcctgtttttcgatgttaattgaaatttcagtcacttaagtagtattaattggcagtattaagaactcacctgacccataaacgagaacaaaaagtgagtttgattgacttgtttggcctgcttaatttctcccgtgtaaaacacggtgcagagcgcctttgcggagaattcttccgaggagcaatctacgttgatgccgcggaaaaataaatccataaatttagctttcaaaaaggctttggcatccggaaagacaatgcttaatcctttggaaaccagctccatcatggcagccttttccctttgaaccgaaatgccgccaggctgtaaaaattggaaagggaaaaacatataatcgccgccaataaatcgcagactaaattcagcttagaattacagaacacaaaagacgccattctgaaatccatttctatcactcttaatgggttaattttgtggctgctattttggggctgggaatgcgatttgcataattcacatggctaacaatgggccacgtggtcattagctggcgccttaagtgcagttttccatagctctgactagaatctctaattcccaacgtttgccataaagtcgctgatgcagtgagtgttgattttaaatttactaaccatttttagtaaggtatagcagggtatgggattgaattttatatgaagaaatggaagaatatgattgatttaacgaaaatgtttggaaacttgtatagtttcaaaaaatatgaactaaaccatttaataattaccagcattatgggatgcggcaaaataatctcctcctcgcccgtaagtggcagcgactccttcgggttgaaaatgaacgtgttcctcatggtgaagctgaccgtgtcctctacgacatcatcctccaaatcatacttgtccttccactcactcaaagcagggagaaacagtgttagttacttgctatcctacacaatccaatatatagaaacccactcgaaaacgaagggacccacttcctgtagccgtggcttagctccttcggatacctcatccggattggttacgttgaaaacgtagatatagaaatgcagtgggaatggagtattggaccagagttcccgaacatccgatccgggctttaaagttacttgctattgggtgggaagctattataagatttaagccgggtataactccctcatcgatcccaccttcgatatcataaacttgagaattttgggaaagataacccagccatagatgatggcaaacacgaacatggctcccgaccccatgagcagcttaacccgaggtacttgcatctctgggcaatgtttcgatctctactcgattcgtgcacggaaatcctttcaatccgattgcctccttcgagctgaagaccagaggctttcacagtcgcgacgcaactgaatcgtctccacactgaagtccggaatcccctcctcaaatcggacggaacgtgcgaatatttttcactcagccatagcagcagcatttgcggttgaggaggcggcaggccggatggcaaaacaatcagataacacggcattacttataaaatcaataattgcatgtatttgagtattataaattgtttccactttacgctctacactccacgcagtttcggccatagtcggacgcacgaatgcggtataactggcttttgttcatctggaccctcgtcatcaagtcgttttgatcgtacacctatatttcaatcagacttaattgttcgcatagcccaaatgggccaaaatgcattgaaatgcatttgatgtaccaacaagtttggactaggaatataaacaagatcgtttaattgcctttctttagggggaagtaaaggaatatcctcagtttttctataatttgcaaccacttctataaaagtgtaacccattttggttttgaaattgatattagcaaacaccatacataacccatagatacgcattagctacccaaagaacctactatcacctacctaaacgttatgcacttggacttgtagaacttatttctatacttctgtaattgaatttcgaaatgacttatgcgacacctggcctatattccactattagcacttgttacctttccttggaaacttttcttccctaattgcggcaattacgttttccaatttcaaggagaaccaatgcaagtgttgatggctaattagggaaagagtaagccagactcgcgaggtttgatattagcttgagtgagaagagcaaatatttctattatattttggaaaattgtattttctggatttattttattttaaattttcaa

SEQ ID NO: 15389 - DNA, 1533 bp, DROSOPHILA
atgcaagtacctcgggttaagctgctcatggggtcgggagccatgttcgtgtttgccatcatctatggctgggttatctttcccaaaattctcaagtttatgatatcgaagcaagtaactttaaagcccggatcggatgttcgggaactctggtccaatactccattcccactgcatttctatatctacgttttcaacgtaaccaatccggatgaggtatccgaaggagctaagccacggctacaggaagtgggtcccttcgttttcgatgagtggaaggacaagtatgatttggaggatgatgtcgtagaggacacggtcagcttcaccatgaggaacacgttcattttcaacccgaaggagtcgctgccacttacgggcgaggaggagattattttgccgcatcccataatgctgcctggcggcatttcggttcaaagggaaaaggctgccatgatggagctggtttccaaaggattaagcattgtctttccggatgccaaagcctttttgaaagctaaatttatggatttatttttccgcggcatcaacgtagattgctcctcggaagaattctccgcaaaggcgctctgcaccgtgttttacacgggagaaattaagcaggccaaacaagtcaatcaaactcactttttgttctcgtttatgggtcaggccaatcactcggattctggcagattcactgtctgtcgcggagtgaaaaataacaaaaagcttggaaaggtagtgaaattcgccgacgaaccggagcaagacatttggccagatggcgagtgcaacacctttgtgggcactgattctacggtctttgcaccgggcttgaaaaaggaggatggcctcttcattgtttctgcgaagatcccgaagatctggacacgtgtcccgcccaagggcactatgaatctggcggcctgtgttggtggtccattgatggcatcaatgcctcatttctatctgggcgatccaaagctggttgccgacgttgatggtctcaatccgaatgaaaaggatcatgcggtctacatagactttgaacttatgtctggaacaccttttcaggctgccaagcgtttgcagtttaatctggacatggagccagtggagggcattgaacccatgaagaatctacccaagctgatattgcccatgttttgggtggaggagggcgtgcagttgaacaagacctacacgaacttagtgaaatacacactatttctgggcctaaaaatcaactcagtcctgcgctggtccctcattactttctccctggtgggcctgatgttttccgcctatcttttctaccacaaatccgacagtttggacataaacagcatcctcaaggataacaacaaggtagacgacgtggccagcacaaaggagcccttgccttcagcaaatccaaagcaatcttctactgtgcaccctgttcagttgcccaatactctgattcccggcacgaatcccgctaccaatccagctacccatcacaaaatggagcatcgggagcgctactaa

SEQ ID NO: 15390 - protein, 510 aa, DROSOPHILA
MQVPRVKLLMGSGAMFVFAIIYGWVIFPKILKFMISKQVTLKPGSDVRELWSNTPFPLHFYIYVFNVTNPDEVSEGAKPRLQEVGPFVFDEWKDKYDLEDDVVEDTVSFTMRNTFIFNPKESLPLTGEEEIILPHPIMLPGGISVQREKAAMMELVSKGLSIVFPDAKAFLKAKFMDLFFRGINVDCSSEEFSAKALCTVFYTGEIKQAKQVNQTHFLFSFMGQANHSDSGRFTVCRGVKNNKKLGKVVKFADEPEQDIWPDGECNTFVGTDSTVFAPGLKKEDGLFIVSAKIPKIWTRVPPKGTMNLAACVGGPLMASMPHFYLGDPKLVADVDGLNPNEKDHAVYIDFELMSGTPFQAAKRLQFNLDMEPVEGIEPMKNLPKLILPMFWVEEGVQLNKTYTNLVKYTLFLGLKINSVLRWSLITFSLVGLMFSAYLFYHKSDSLDINSILKDNNKVDDVASTKEPLPSANPKQSSTVHPVQLPNTLIPGTNPATNPATHHKMEHRERY

SEQ ID NO: 15391 - DNA, 3706 bp, DROSOPHILA
atggagatgtcgtcgcaggcccagcgcccgaaaagcttgatttccggccactcggtgacctcctgggccggcattgtggtaacgacatcgtcagcccagtcctcctgctcctgcggtataacctggctcgcctcctggctgctggactccaccacttcctcggacatttcggggaaattaattcgagctagatctcaaaaggcgtgcgacttcgcgaagcgttcggcgcggaaagaaagaggatgaaaaagaaacggtaaaaggagctgtcactttcaaaatggccgcgacgtgcaacactgcgccgaggggctgccaactttggggcctttttttggcgggggttcaaatttcaggattgccctttgtgtttattagattacacattgttatcaaactggattcgttatggcaggtaccaaatgatctaattcttttattaacattaattttattgacatttactttttcttattgtccactccaccgatatacttttaaaaactttattcttagattaagaacattattgtttatttataactttggtaaattagttccgtaagactgccttttcagaagtcgctgaaaacgcgaatgaaccaaaagtgcccataatttaaatgcacatcaccatacatatatgcttggataaacaaatgcagcaaaagctcgggttctttttactgctgacttaacataagctgctagtattgctgctttcccattatgcactgatacactgaacgaaaagttgattcaaataagtttaattcgtaatattcatatccctcttccttgttcctgagttcgtttatttccttcctccttgttccaaagcttgtttaataatataatttttgcaccaaactgagaaccattttataaaacaaataggtgccatatatatgtatgaatgatgtgtgtaacgcactcataacattttagcgcgtgcttctgatatctgataagccatcgccgtagtcacactctcacacatattgataaacaaaacgtatatattttatttgttttaatatggaatactttctataataataataatgcgactgtgcaaccatctacaactgctgcctcaaacagtagcttgaaatatacaagtttatcgttttgcggtagtaaatataatacattttaaattagcctttgaagagccagcgtagaaacaaacataacaaactgcttaaaatcaaacacagacacacacacacgatgtctttcgtttggcaaagaaatgaaataaacaaatcacggtcgttttcacaccgtgcacactccacagtcgattgagtgatgctggtgactgcgagcgtgcgaggcgtgaaaaccaactgccaacttaaccaactatcatcttaatgagtaactaagtcctagtttaaagcgttacggctgatcggatttcggtttgtcgggcgtctcctgcaagcagtaactgcgtatagcgagtcgtaatttccaaaaaaatacacaaacactgatgtcgtgcgtgtctgcatggggatgggggaatgctctgatgtgtgttgttcttcgtgatgataatggagtggcgaaggctgcgggagaagagtgaaagtttatttcgcggcttgagtttgactgaggtcgagactatagcactcgtaaaaccgaaggattggcaatcaggagttctattgcttaggtttcataaaatgcatctcagagaagagctggtagctcctctatgtttatgcgttaaatgaacttattacttagtttatcaaacaaaaagtgcgttacaacattctcttagacgcgaatcgcgcaatgcaacctacaagttataaagattcagttgttccgtcgcgagtgctattttcttgaccttggctgtctctgcaatgattcatactcacactgcatggctggcgacggcgcctactccttgtcgcccatcttggacttggaggtcatgtagatgcccacgatgaggccgaacagaccgatggccgaaccgaagatctccacaataaggatcttgacgaacagggcggcattggcggcgtccgagagggcggcacccgaacccacaatgcccacagcaatgccgcagaacagattgaccaggccgacagccaggccagcaccgaagatgaggtagccggagaaccagttcgtgttctgaatagccgcctgcgaaagggccgtctccatcgagaactgctccagctggccggacagaacgatggcggtgatcaggccgtagatggccacggcctcgcagaagatgaccgagatcagattcttggtcttgatgcggggcgccttcacaccaccgcccacgatgctcgtgcccgtcgtatggatgcccagggcggcgcccacgacggacagcgagacggagagtccgatgcccaggcaggcccacatgtacgggtttgaggaggccaggaaccagcccacgctcacccgctcgcccttgcccgtcatcacgaagtacagggtcaggatggtggccacggcgaggaagagccacaggaacgtttgggacaccacggtgcgtatttgggccgccatcttgctatttgttcactgtctgcggaacgggggagcgttagcacgtccggatttccaaattttccagctcacactcaccgaattgcaggcgtaattgtattttcttggccgacaggtgactgctccgtgcgaaaaaagaatccacaatcacatgacgtacattttctctatcagtcgctatcgaataatcacgccactcgataagtgcgataacacaaccgtgcgcagtggtggttcgctggctattttgtagccagaacttgtgcttctgattaacaatgggaaaatggctagacagttgcttagttagcactgccaaggggaaataaaaaaatagctgttcccattattgcgatatatgaacattaaaacatatttgttgtatatttgtgtttcttatgtatctattcattttgacttccaaaactgaaaacttcgtactagcttttttagcattggcactcaccgtagcagtgaactaaaagcatggcctcacaccaatactaaaaacgatatcgacttagtatcagaaatcgatataatttagcaccttagtgcaattttgaatttaaaatttggcagttacttttcatatctgcgtacctattcaaagtttcttttaaatgcatattttttaattcaatgttaaaagtttcattttattaatactatatatattcaaaaaagagacaggaaagcatttaataaatgtgtaaacttagctttctaatacaatgttcaaaaggttgtcaaacatctattgtaaaacaaacaacttttagtttctacgatctaatcccgatttaatatgtctttatgaagccaacaacttgaacgactgcataccttttatgcattttttatgtcatttttatatttttatgggcaggggcaatttcaaatgtctgccttcttacaaatgcaattttcttgtaacttacttggcccaaaaagatttatcagtagtaaatgttagggtctcagataggtaatattttttatttacactcattaaattttgccatataaatgacgaagctctcgtttattttcattcgcctttgtttttttgtatgcatatcagcagtcggaggcctgtttgcagttcactggccaccgctcgaggaattgcgcctacgcgcgg

SEQ ID NO: 15392 - DNA, 1326 bp, DROSOPHILA
tggattcttttttcgcacggagcagtcacctgtcggccaagaaaatacaattacgcctgcaattcgacagtgaacaaatagcaagatggcggcccaaatacgcaccgtggtgtcccaaacgttcctgtggctcttcctcgccgtggccaccatcctgaccctgtacttcgtgatgacgggcaagggcgagcgggtgagcgtgggctggttcctggcctcctcaaacccgtacatgtgggcctgcctgggcatcggactctccgtctcgctgtccgtcgtgggcgccgccctgggcatccatacgacgggcacgagcatcgtgggcggtggtgtgaaggcgccccgcatcaagaccaagaatctgatctcggtcatcttctgcgaggccgtggccatctacggcctgatcaccgccatcgttctgtccggccagctggagcagttctcgatggagacggccctttcgcaggcggctattcagaacacgaactggttctccggctacctcatcttcggtgctggcctggctgtcggcctggtcaatctgttctgcggcattgctgtgggcattgtgggttcgggtgccgccctctcggacgccgccaatgccgccctgttcgtcaagatccttattgtggagatcttcggttcggccatcggtctgttcggcctcatcgtgggcatctacatgacctccaagtccaagatgggcgacaaggagtaggcgccgtcgccagccatgcagtccttcgccactccattatcatcacgaagaacaacacacatcagagcattcccccatccccatgcagacacgcacgacatcagtgtttgtgtatttttttggaaattacgactcgctatacgcagttactgcttgcaggagacgcccgacaaaccgaaatccgatcagccgtaacgctttaaactaggacttagttactcattaagatgatagttggttaagttggcagttggttttcacgcctcgcacgctcgcagtcaccagcatcactcaatcgactgtggagtgtgcacggtgtgaaaacgaccgtgatttgtttatttcatttctttgccaaacgaaagacatcgtgtgtgtgtgtctgtgtttgattttaagcagtttgttatgtttgtttctacgctggctcttcaaaggctaatttaaaatgtattatatttactaccgcaaaacgataaacttgtatatttcaagctactgtttgaggcagcagttgtagatggttgcacagtcgcattattattattatagaaagtattccatattaaaacaaataaaatatatacgttttgtttatcaat

SEQ ID NO: 15393 - protein, 212 aa, DROSOPHILA
MAAQIRTVVSQTFLWLFLAVATILTLYFVMTGKGERVSVGWFLASSNPYMWACLGIGLSVSLSVVGAALGIHTTGTSIVGGGVKAPRIKTKNLISVIFCEAVAIYGLITAIVLSGQLEQFSMETALSQAAIQNTNWFSGYLIFGAGLAVGLVNLFCGIAVGIVGSGAALSDAANAALFVKILIVEIFGSAIGLFGLIVGIYMTSKSKMGDKE

SEQ ID NO: 15394 - DNA, 9606 bp, DROSOPHILA
aatttaccatgaacccaacgaaacaccattaaatattttctttgtatattaatacgctcatttattttagtgacattatttaataatttgtagaaatattaatatacaatcttaaatagttgtagctaatttttgcgtgaaagtaaacttaaatgtacatacaagtatgtactttgaatagtgctgctcatgtttataggcttgaaattgtgcactttcagtgcctaactatttgttttagtgccctccctcctttccaatgggtttattttatatctctctcgcaatagctcagaagtatattaagttagaaaataattgggatttattttttcgtttacttagttaaatatgcaagtacaaacacagcggacagcgactcaaacatttcaattatttctctatatactcgttaaagatatctaaattttgtatttaatagattttcttaaagattatattgctgtattaaaattctatgctgcagcagtattaagcatatacccttatacttatgactatatattggaattagatgcttacatacatatacatatagttatgaattacaaaagtttaggtttagaaaagggatgaatggataatcaagttatcgaaacgtaaggctgattagtagaaatgtgcacaaatgtacatgtaaattatgaatttcaaaatggaatagcgagtgtctcgcgatctctcacaggcaaactaaaattacactcggcatttacacttttctcttaaaagctagacaacatacaccttacactaattcaacaatgaaaacacatacaactaacgatttaaactacaataacagattaaggtttggtacaatttcattctttttgttttttttttcggtgataataacatattatataatatacaataattcctttacaaaagagtcagtccattatgttggttaccagcttggcaatttctatgcgctattatgattacccatttagatcttcataaaaaaccgttctcacaatatgccattagtgtagtattgataaccgtcgtacagtttggttgacagactttttaacgagtcctgtacaagctgctcaacctttcgctccatttcttgttcggttaaattcatatgaaagcgttttcggagattctgtacggttccagagcacccattcttaaagcacggcaaatgcgcatctgttaaataaagttattattgcgggaatctttttacgtaatttgctgaggaacttactgctgcgcataatttccacgaagttaataatacgatccatatgctttcgagcagacatcattccaactaacaagagcttattaaattcacgccaatgctccgagctcgtgccacccatcacctcaacaaattccggcgttagcttaaagggcgactgttcgaatcctgcaaacggccaattgaaatgaatttataagctttaccacgatctgcaaaatacctacccaagtttttaggtgatatacttaaaataaatccaaagtcaatgtgtataatgtgcccatccgaatggaagagaatgttgccattatgcctaaagtggttggataaacgtcggtaagaaaactatgttaaccaatagaactatttagagctacctgtccttaacttgcagtaaatatgaaattagacagtaagctgcacagctttggacgaagttcttctgcgcgcgccgaaaactttctccgcttggtgagccgtattcatcgataaaatactctttcaacgatttgttggagttcttcttaatttggtgcagggatacagtgttaaggatcggctctataagaccactatcattcgagaggcagactattttgtacgggcgcacccacagatctacttgctcttcttgccaaataattttaaacatctgtaaatatatgtaaggttttaagatactatttcctcttgtataatagaatttgtttatacctgtaaaagttgggtagccattagttcttggcgtaaatcatcgccacactttacgatggcggaaagcagtcgccagtttgatagatggccgtatggcgaagactcgcggataagcttttccttttcgtgccacggttcctacacgaagcaataattacacatataatgcaatattcaaattgaacatactcacctttaaagctgccgccgaaggatcctccgggtcgttactgaaggatttagtattttcgcagctcaaattgctgcagtggcgcaagcgcacgtcgccaatattaaacacgactggtggacctgttgaagaagttatgtgcatagcttagacacacgtttaccactgaatttgatgtttggttaccttgatctcttgaatcgcaggaatctagtgatatttgtgaaattgtgtcccgctcgctcactttccgcatgttaagatactgcgctgttatttcgtcctcctcttgtgaccacacgtcatcttcctggaactgaagtccacctaacgaatgtacattgctgcagctattatgtggacccgcatccccgcagccgccatctacatctgctcctttttttcggcggcaacttgtgccttgctgactgctactgcagcttgaagttcgactgcagctcagatgttggtgggagttcaggcaggacccatccaggtgctcttcgctcttggtgtgccgcagtgaaggcatcattttgggaatcaggggagaagtatagatgtcaggaatttcaacaacttctacgtatatgatatagggggttttatccttcgagttcagtactgcggtcttctcctctgtaatacgaacgacatgatgtggaatgtctgagtacaaaggaagccagactctagcgggcaggtttttgttaatcaagttgagggacatccgcagcgctgaagtcttctccgctttggaaggccacgaggtgagatttttaccaacgttcatcaatgccttcataaactctttctggggtgacgtctttggagcaccacagctgcatagcgtcctctgcccaagcagaccatttacttggcctcgaaccgtctcgaagcaggtgcacccgttatcaaatgcgtggccggaagttaagtcaccgaggcacagcttggcgggcgtagtgggaagtgtttgtgtggtatagggtggctgctggtacatacgatgcgatatactcagtgtgtgaggcgagcgaaagtcggctaggagcacagtggcatcagattgcgagcggtggtgagtcttcttggcaagcgcgactaccgacctcggctctccaacatgcagacctccagtacctgcagacttgaggtcgttttgagtctgtttgtgctccctttttgagaatatttccttcatgagcgccagctttgatttccgagaactgttgtgtgagttccctagcgagtccacttggtagttatatgcctccaagagccacagacacttcagcgagaagtcaaccgacttgcgacaccgaatggtaagatacggatccagaacctcagctagctcatccatctgaatgtacataacaaccaattgtggtatgtacagatcaacctcttggtcgggaaaactgaagatcttgttgccgataaagctgaggactcccggttcctttgagtaaaagagataatgcacagcaaagtgtatgttgaacactggcgactcaaagaaacgcaaaaggccgctttggcctttctctggcttctggagcacatcagacacaggtgctttttcactgatgaaatacttaacgacaccaggaacaggaagctttagtttgtgtatcgagttgattgatgaacactttgtcaatgctccttcactgccttcactatctccaggtagacgcaagttgagagtacgttcctttacttttaaatcggcagatggatcggaaagcggttgaagcttcgaatttgaattcgcagctagtgcctccgtaggcgtggcaggaggagtgctagcagctgagttcgccgcagctgcagccgctgcctttatgctggaactagacgtgagcaaactaaagaattccttctttttcgaaatgtctgtgggagacttgaccaggtcttgtggcacactgcttcctccatttggcgaacccactaagctgactgtccctgagtgatcaggctgctccttctgcttagcagcgtttttcttctcatggttttcaataatgctctgggctgtgcgaaatatggcattcttggtggcgccaaagaaattcttaaacagcacttggtcgttcttggtgctctccgttggtgtcggagtggcaatcggtgttggggttaccgatggcgtggctgacgccgttgatgctacacttggggtggagagggaaggtgcatcagcgatgggatcttggtgagattctctgtagttgacatccggatcgatttcattggaagctgttccgagttcaacattgatagctgcctgcgacatgttcataacgcgatagcgtgttcgggcgtcgacgccagcatccactgagtcttcgctttcgatctggttttgggacggtagattcttccgctccaggacctgctgttgctgtcgcttttgtttccgagacggacgcagggtgcggcagtccaattcggtggaagcggcctgtggaggatagaggcagagatggtccggctgcataatgttgtactcctcgtcgatggatgtcgtatccataagatcaacgcactcctcttctgcatcggcatccgcatccatctcacccgaatcaagcgactcatgtgagtggcatatgcgattcagagatatttggtccgactctgagccacagatgatgcctgcaggaaggataagtgtaggaatgagtgatttttacatgattatacagaaaatcaaaaggcacgactgattaaagaaaaagtttcctcgcactaaccagaatcatccgatccaagactggtgagatcctctcgcttcttggtgctaccagcgctactacagctattattactgctgctactgccgttgcccgtgctgctgacaatgacgccgatcatctcttgtccattggccgcaaccgactcgctggattttgggcgcattcgtaacgttggacaggattccactgtaatcaaagggtaagtcattaggaaacagactttcagcaacaaatgtggatcttaccgacggcactggacctgcaagcagctgccaaagaaatcgattgctcatgcttcggcacgggatgttgcacgttgccctttacggctccaatcgtgggcgtgcacgccgtcgacatcagagccggtgtgggcgtgcctggtggggacagggctgacgttacagttgccgctgtcgtggcaatttttgagcacatagtcgcaccgagaatggacggtgagcagaacgtgttttcgctttcagcatttggcgatgacacttcgacctaaacgggagataagactcttttagaccagtttatgggtagcctttgtcggagaacattgaaaccctgcctttgtcatagtttaaatcggcatgctgttattgactggattcgataacttgaaacactcacaaatatttagcactagtgtatgtatgtgcaaattgaataacaatgccagcaacgcaatgataaaaatataaataaacagcttgtcgcacacacacacacacacgcttagatagacacttagaaactttccaggttttacagctttaaatgcaggtgtggatttcaaatattcgtgtgtgcactcgcggccaccaaggctaacggggtgaaggctgggtcttgggcctgggaatcatctttgggtacactactaacctccggaatgcgttgcaaggcactgtcgaggctgcgattgcggtggtgctgggtgtgattgatgtgattattggtcacctgcgagacaggcggaagaagtatgcccatggatctgcaagaaagagcgaaaattcggattatgatgtgaaaaaatcaatgcatctgttgcggtaatatagtatgcaaaaagcactcattataaactcactcagtcgcagttatgataagttacttatcacttcgctgtgagcagcgatttgtctggacgataaaagctagccagaggtcgagtgatatcttttaaattaaattagctgcattctcatgccaggaaagtacgtgcggcccagaacaacgcgcgtgaaacataaagaagcccaaaaacactgggaaatgaatataatatatatgtcgggggtgggaaagatggcaagaaacagagactaggcggccaaaagcttggagattgctcgacccacaacgactgactaatcgagtaactttcgtagcctttgttgacagctggtcgctgcttaagctcgcgggcttgagccaaagctcgtggccattctgagtacggagagccgaaacgatgacgtcgtcgaaagctccagatagtcaaaagtgtgcagaacgagggtggatccgaggaatcactatctcacgtatgtcaggtattttccaggaggtttatctcggtacaaccaggcggtactcctattacgcgaacaccagataagcgatgcgataagcgcggtaccattgctaaccgaaaggcccgccttgcccttacgggactcgttaaagatacagaccgcggccttcggtggggtttggggtgcgccttacacccgccatgccgctcttagcacaggttcaacaatccctggctgcgtgacgcaaagaaacagcaaactgccaatgggtcatcccgtatagctgctgctgaaaagcggaacactccctttatgtggccatcccggaaataaaatttgaatacgggtcagccaacgtgatcatctggctggtgtcctaccatcatttgcgctgtatgcaaacgtgctattttttccccccaacactcggcgatgggcgcattccaagcattccgagccacttaagttgcctcgctgtgtcaactatttaagcatatgcattaatttaccgagctttcgatgcccccaacgctcgcaaaggggattgccttagaaagtaagagggtatataaagtataggttcgtactgcagacaggaggtaacattaaattcgttacgaaaaataatttgctcattatttgacaacctacatagccggaggtgcacgtatgcaagatagtttagttttgtaatttaatgataataacacttcaggatactgtattcaaagacagcgtaatggatcattggccggaaaagcccccgaaccgcaaaattggcggcatgggagagcgtcctaggccaaggtgcttcggggtgggtcagccccgcatccatgcatgtagccgcacaggagcgttttgccggcgcacgcacttaacaaagacagggtgtggcacgtcatctgcaatggaactcgtgtacatacacacagcgcggccgcagaaaatacgaatacgacttcagcggttaaacagagtttagagaaacgaaattgggcattgggagtgaaaagtaattgctattactacaatacgagtaatattggcaaaagctgctatagttcaattaaaagctgataaaatactgttcctacatgcagtcaaatgacaccaaataagatgggtaataaatatctatccgagaatactacaaacactacgacagtgaggaagacacaaaacaaaacttacctaaaatccaagcttaggtttctttggtgcgtggaaatacgtttcggcggattcacacttcccggaactccagctggcgctaaactgagatttggtcggccgtgcacggagggcatagagtgattaaacacgcggctcaggctgagacgaggcttagagtagcgcgagtgcttgggcgtgctggccgctgagcttgctcctgggaggcactttatcgtgggcatctggccgccaattggcagcgtgacgggggcggccattagaaacgcgggtacggtacttccgtttccattgcccaggtctgatcccagcgacgacagcgtggtggtcgacgccgagtgcggctcgcaggctatggagagcgacgactggctgtgggggctactcatccggccggtggcggacgatgtgttgttctgactcacgctgggacttggatggcttaccgagacggacacggagtcacaggtgctctcccccacagttggactgtgcaccacggtgctgttgctgtgctcgctggagctacttgtgctggtgcaggcggctgtcgagtgctcggatatgtcctcgtcatccgtcgcttgtggcggtggacaagcccatgtttcagccacctccagattggcattgtcgccaaccgaagtgcatggggtgacggggggttcgacggcttttccgttcatgttcaagtcggatagcgcctcggtaacggacaatcgtaccgttgtgggcaggcagtgatccaccacatcgactccagtagccatggtcgccactgtcgagggcgaaccagccttgctcactggcctctcctctgcaacaaccacgacgggagaaaggagcttgttgtttgtatcgatttcgcgtatgtggcgcaggtactggtagcaattgtttggctttgcctccaccggagcagtgccattcgccgatcccattggagaattgcaggatggattgctatttttttttcctttaaatgctgatattacggagttcattttgattttaatgcggatagtcttgtaggcagataaagtttggcttctaatagttattgagtgtgcttaaatggcgatgtaagcatgtatttctggcacaacctcggaattgcttgttagttccatcgcttaactatgcgttttcgagtgaaatgttttgctctgggtcatggggtctttctcatctaattgcgctgtcgtctccgctcattggcgcggaatatatggctctcatatcagatcgtcctttttatagtagcagcgacagtcgcttttcacccatcgacccactagaaagataaagaaaattggtgtcaattagtaattttcgatcaatttaataccccttcgcattagatttttacgcttagccaaactgtatgtaattttatgatactgtcttttaccagcacacagaaattgttatataattaacttaatcaaaatatataccgcacacgcatacacatacaattgatattttagagtgtcaaatgttgaaaaatataaatatatactaatgatcaagtcaaatatgtattggaatcaaagatgcagagatggggcaccgcctttaaagtgggttgactatatttaattgtacaccgccttgacccatttgaacatggtgtcacgaacaaacagtcggcatttttttttttgtgttatgtcaacgattaataccatattcttttgtttcccagtggcaaatggaaattgagctacacctccaagataccttgccatcccttctattctgccccgcggcttagttgccttatcttggtcggccacatcgcccagcatcctcgctcgtatgcacgttcgttcagtgagaaattaaaatttgatgactttgtgacctgaccccaattatgtcctagccaactgcactgagctaatcgcacctccgtcaactggtgctgccgtgaattac

SEQ ID NO: 15395 - DNA, 4719 bp, DROSOPHILA
atgggatcggcgaatggcactgctccggtggaggcaaagccaaacaattgctaccagtacctgcgccacatacgcgaaatcgatacaaacaacaagctcctttctcccgtcgtggttgttgcagaggagaggccagtgagcaaggctggttcgccctcgacagtggcgaccatggctactggagtcgatgtggtggatcactgcctgcccacaacggtacgattgtccgttaccgaggcgctatccgacttgaacatgaacggaaaagccgtcgaaccccccgtcaccccatgcacttcggttggcgacaatgccaatctggaggtggctgaaacatgggcttgtccaccgccacaagcgacggatgacgaggacatatccgagcactcgacagccgcctgcaccagcacaagtagctccagcgagcacagcaacagcaccgtggtgcacagtccaactgtgggggagagcacctgtgactccgtgtccgtctcggtaagccatccaagtcccagcgtgagtcagaacaacacatcgtccgccaccggccggatgagtagcccccacagccagtcgtcgctctccatagcctgcgagccgcactcggcgtcgaccaccacgctgtcgtcgctgggatcagacctgggcaatggaaacggaagtaccgtacccgcgtttctaatggccgcccccgtcacgctgccaattggcggccagatgcccacgataaagtgcctcccaggagcaagctcagcggccagcacgcccaagcactcgcgctactctaagcctcgtctcagcctgagccgcgtgtttaatcactctatgccctccgtgcacggccgaccaaatctcagtttagcgccagctggagttccgggaagtgtgaatccgccgaaacgtatttccacgcaccaaagaaacctaagcttggattttagatccatgggcatacttcttccgcctgtctcgcaggtgaccaataatcacatcaatcacacccagcaccaccgcaatcgcagcctcgacagtgccttgcaacgcattccggaggtcgaagtgtcatcgccaaatgctgaaagcgaaaacacgttctgctcaccgtccattctcggtgcgactatgtgctcaaaaattgccacgacagcggcaactgtaacgtcagccctgtccccaccaggcacgcccacaccggctctgatgtcgacggcgtgcacgcccacgattggagccgtaaagggcaacgtgcaacatcccgtgccgaagcatgagcaatcgatttctttggcagctgcttgcaggtccagtgccgtcgtggaatcctgtccaacgttacgaatgcgcccaaaatccagcgagtcggttgcggccaatggacaagagatgatcggcgtcattgtcagcagcacgggcaacggcagtagcagcagtaataatagctgtagtagcgctggtagcaccaagaagcgagaggatctcaccagtcttggatcggatgattctggcatcatctgtggctcagagtcggaccaaatatctctgaatcgcatatgccactcacatgagtcgcttgattcgggtgagatggatgcggatgccgatgcagaagaggagtgcgttgatcttatggatacgacatccatcgacgaggagtacaacattatgcagccggaccatctctgcctctatcctccacaggccgcttccaccgaattggactgccgcaccctgcgtccgtctcggaaacaaaagcgacagcaacagcaggtcctggagcggaagaatctaccgtcccaaaaccagatcgaaagcgaagactcagtggatgctggcgtcgacgcccgaacacgctatcgcgttatgaacatgtcgcaggcagctatcaatgttgaactcggaacagcttccaatgaaatcgatccggatgtcaactacagagaatctcaccaagatcccatcgctgatgcaccttccctctccaccccaagtgtagcatcaacggcgtcagccacgccatcggtaaccccaacaccgattgccactccgacaccaacggagagcaccaagaacgaccaagtgctgtttaagaatttctttggcgccaccaagaatgccatatttcgcacagcccagagcattattgaaaaccatgagaagaaaaacgctgctaagcagaaggagcagcctgatcactcagggacagtcagcttagtgggttcgccaaatggaggaagcagtgtgccacaagacctggtcaagtctcccacagacatttcgaaaaagaaggaattctttagtttgctcacgtctagttccagcataaaggcagcggctgcagctgcggcgaactcagctgctagcactcctcctgccacgcctacggaggcactagctgcgaattcaaattcgaagcttcaaccgctttccgatccatctgccgatttaaaagtaaaggaacgtactctcaacttgcgtctacctggagatagtgaaggcagtgaaggagcattgacaaagtgttcatcaatcaactcgatacacaaactaaagcttcctgttcctggtgtcgttaagtatttcatcagtgaaaaagcacctgtgtctgatgtgctccagaagccagagaaaggccaaagcggccttttgcgtttctttgagtcgccagtgttcaacatacactttgctgtgcattatctcttttactcaaaggaaccgggagtcctcagctttatcggcaacaagatcttcagttttcccgaccaagaggttgatctgtacataccacaattggttgttatgtacattcagatggatgagctagctgaggttctggatccgtatcttaccattcggtgtcgcaagtcggttgacttctcgctgaagtgtctgtggctcttggaggcatataactaccaagtggactcgctagggaactcacacaacagttctcggaaatcaaagctggcgctcatgaaggaaatattctcaaaaagggagcacaaacagactcaaaacgacctcaagtctgcaggtactggaggtctgcatgttggagagccgaggtcggtagtcgcgcttgccaagaagactcaccaccgctcgcaatctgatgccactgtgctcctagccgactttcgctcgcctcacacactgagtatatcgcatcgtatgtaccagcagccaccctataccacacaaacacttcccactacgcccgccaagctgtgcctcggtgacttaacttccggccacgcatttgataacgggtgcacctgcttcgagacggttcgaggccaagtaaatggtctgcttgggcagaggacgctatgcagctgtggtgctccaaagacgtcaccccagaaagagtttatgaaggcattgatgaacgttggtaaaaatctcacctcgtggccttccaaagcggagaagacttcagcgctgcggatgtccctcaacttgattaacaaaaacctgcccgctagagtctggcttcctttgtactcagacattccacatcatgtcgttcgtattacagaggagaagaccgcagtactgaactcgaaggataaaaccccctatatcatatacgtagaagttgttgaaattcctgacatctatacttctcccctgattcccaaaatgatgccttcactgcggcacaccaagagcgaagagcacctggatgggtcctgcctgaactcccaccaacatctgagctgcagtcgaacttcaagctgcagtagcagtcagcaaggcacaagttgccgccgaaaaaaaggagcagatgtagatggcggctgcggggatgcgggtccacataatagctgcagcaatgtacattcgttaggtggacttcagttccaggaagatgacgtgtggtcacaagaggaggacgaaataacagcgcagtatcttaacatgcggaaagtgagcgagcgggacacaatttcacaaatatcactagattcctgcgattcaagagatcaaggtccaccagtcgtgtttaatattggcgacgtgcgcttgcgccactgcagcaatttgagctgcgaaaatactaaatccttcagtaacgacccggaggatccttcggcggcagctttaaaggaaccgtggcacgaaaaggaaaagcttatccgcgagtcttcgccatacggccatctatcaaactggcgactgctttccgccatcgtaaagtgtggcgatgatttacgccaagaactaatggctacccaacttttacagttttcttaccgacgtttatccaaccactttaggcataatggcaacattctcttccattcggatgggcacattatacacattgactttggatttattttaagtatatcacctaaaaacttgggattcgaacagtcgccctttaagctaacgccggaatttgttgaggtgatgggtggcacgagctcggagcattggcgtgaatttaataagctcttgttagttggaatgatgtctgctcgaaagcatatggatcgtattattaacttcgtggaaattatgcgcagcaatgcgcatttgccgtgctttaagaatgggtgctctggaaccgtacagaatctccgaaaacgctttcatatgaatttaaccgaacaagaaatggagcgaaaggttgagcagcttgtacaggactcgttaaaaagtctgtcaaccaaactgtacgacggttatcaatactacactaatggcatattgtga

SEQ ID NO: 15396 - protein, 1572 aa, DROSOPHILA
MGSANGTAPVEAKPNNCYQYLRHIREIDTNNKLLSPVVVVAEERPVSKAGSPSTVATMATGVDVVDHCLPTTVRLSVTEALSDLNMNGKAVEPPVTPCTSVGDNANLEVAETWACPPPQATDDEDISEHSTAACTSTSSSSEHSNSTVVHSPTVGESTCDSVSVSVSHPSPSVSQNNTSSATGRMSSPHSQSSLSIACEPHSASTTTLSSLGSDLGNGNGSTVPAFLMAAPVTLPIGGQMPTIKCLPGASSAASTPKHSRYSKPRLSLSRVFNHSMPSVHGRPNLSLAPAGVPGSVNPPKRISTHQRNLSLDFRSMGILLPPVSQVTNNHINHTQHHRNRSLDSALQRIPEVEVSSPNAESENTFCSPSILGATMCSKIATTAATVTSALSPPGTPTPALMSTACTPTIGAVKGNVQHPVPKHEQSISLAAACRSSAVVESCPTLRMRPKSSESVAANGQEMIGVIVSSTGNGSSSSNNSCSSAGSTKKREDLTSLGSDDSGIICGSESDQISLNRICHSHESLDSGEMDADADAEEECVDLMDTTSIDEEYNIMQPDHLCLYPPQAASTELDCRTLRPSRKQKRQQQQVLERKNLPSQNQIESEDSVDAGVDARTRYRVMNMSQAAINVELGTASNEIDPDVNYRESHQDPIADAPSLSTPSVASTASATPSVTPTPIATPTPTESTKNDQVLFKNFFGATKNAIFRTAQSIIENHEKKNAAKQKEQPDHSGTVSLVGSPNGGSSVPQDLVKSPTDISKKKEFFSLLTSSSSIKAAAAAAANSAASTPPATPTEALAANSNSKLQPLSDPSADLKVKERTLNLRLPGDSEGSEGALTKCSSINSIHKLKLPVPGVVKYFISEKAPVSDVLQKPEKGQSGLLRFFESPVFNIHFAVHYLFYSKEPGVLSFIGNKIFSFPDQEVDLYIPQLVVMYIQMDELAEVLDPYLTIRCRKSVDFSLKCLWLLEAYNYQVDSLGNSHNSSRKSKLALMKEIFSKREHKQTQNDLKSAGTGGLHVGEPRSVVALAKKTHHRSQSDATVLLADFRSPHTLSISHRMYQQPPYTTQTLPTTPAKLCLGDLTSGHAFDNGCTCFETVRGQVNGLLGQRTLCSCGAPKTSPQKEFMKALMNVGKNLTSWPSKAEKTSALRMSLNLINKNLPARVWLPLYSDIPHHVVRITEEKTAVLNSKDKTPYIIYVEVVEIPDIYTSPLIPKMMPSLRHTKSEEHLDGSCLNSHQHLSCSRTSSCSSSQQGTSCRRKKGADVDGGCGDAGPHNSCSNVHSLGGLQFQEDDVWSQEEDEITAQYLNMRKVSERDTISQISLDSCDSRDQGPPVVFNIGDVRLRHCSNLSCENTKSFSNDPEDPSAAALKEPWHEKEKLIRESSPYGHLSNWRLLSAIVKCGDDLRQELMATQLLQFSYRRLSNHFRHNGNILFHSDGHIIHIDFGFILSISPKNLGFEQSPFKLTPEFVEVMGGTSSEHWREFNKLLLVGMMSARKHMDRIINFVEIMRSNAHLPCFKNGCSGTVQNLRKRFHMNLTEQEMERKVEQLVQDSLKSLSTKLYDGYQYYTNGIL

SEQ ID NO: 15397 - DNA, 5823 bp, DROSOPHILA
tttcggctgcagttctctggcgactggcatagtgctcgatctgctgcagcgtgttcttcaggcgctcagagtcgcgcagcttgcacagttcccgcaccgactgcacggttacatccacgtccatcagattgggagccggcttagccagcttctccgccagcaactgttttgtgggaggggaatcattaggtctgatcaacatttgctttggttccttacgctctcgtcctctgcactggccatctccgaatcctcctcctccagctcattgtcattgtcttcctcgagatcggctaaaagctcatcggctagcgacattttggcttatttcaaaagtttattttgcgatctcgtgaaattaagtttgttttggaattgaagtgaccgttgctcagccgccttagaataccatgcggttcattgaaaaaatactaagtattagcatgaaatatatagggtattcatttaaagaataccataaggctattccactggattttaattgatcaatttgaccaaattcaataaacatttcatgaacagaacgatccaatatcataactcttgttattattctggaaagtttcgattttcctgcttaattagaattctgtatctaaaagtaaaggaattgaaaatatggttgaaaatataaggttgatgaaaatataggtatggctatcaattgttttgcttaattcttaactatcactctttatttattttgggacaacaaagcctagataaacacagatcaaaaatgaaaaaaaatgacttattatataagaagcatcaaattgtaacgaaaaaataaaatctcctcagtggtattcgaaaattccaacgggcacgagttccctaaatatactaaatagtcaagctactatttcggtattattaagccacaatttgacagaatattttttggttttggcgcacaatcgcagcgtctgcatcctggttttttgagtaacctggcagacgtttctaggccattgtcatgtccaagaagttaaacaccagcgtgggcgggacgcccacaaacacgctactaaattacttttccaagtcgccagctttcgacaaaaagaaattgactcctagcgtgaaaacagatcccgatgcatccaagagcgaaaaggagaatctccagaaccagcagccaaaagtgaaggatggtaagaaagaggcttccaagccggcggccaagaggaagttgcccatttccgacgatgagccggccagtggtcaacgcaagcggaagcgcatcgttcagccggaatcggacagtgagccggaaatggaggtaaccaagtcggaggacgacttctccgattgcgcctccgactacgaaccggatgagaatgaagccagcgatgatagcgttagcagcggcgcggaggaggtgtcgcctagcgagaacgacatgtccgtggacagtccgacacccaagaaatcgcgcaaaaagtctaagattctgaataacaacaataacaatgagccatcgagcaagaaggtcaagctagagtcgaccatccagttggccgagggtgcaacctttcaagaaaagctgaagaacctgcagagcaatgccaagcaggatgcttcctacgatgatatcgtgaccaacacgtccaatctggatgagcccgttgtttggccgcaccagaaactagagttcctgcaaccggacaagatcaaggacaaggagggaagacgtccagatcatccggactacgataagagcaccttgcatgtgccggagaagttcctcaatggcctgtcgccgggagttcgacagtggtgggtccttaagtcggacaactatgactgcgtcttgttttttaaagtcggcaagttctatgaactgtatcacatggatgcggatgtgggcgtcaacgagctgggcttcacttacatgcgcggcgagtttgctcactccggtttcccggagatatccttcgacaagatgtccaccattctcgtagacaggggcttcaaggtaatttgtccaaggatagctccttttcccagtaaaactaatacaagtttttctttaggtggctcgcgttgagcaaacggaaactccagatatgatgactgagcgctgcaagcggatcaaggccaccaagttcgacaaagtggtggcccgcgagatctgccagatcaccaatcgtggcacccaggtctttggctcacagtgcaagatcgggccgaatcatcagcccaactatatgttggccatagtggagaaggatgagggaacttgtagccggtatggagtgtgcttcatagacacctccattggtgactttcatttgggtgagtttgaagacgacaagaactgttcccgcctcctcaccctggtgtcacatcatatgccagtattggtaagtaaacttatttaactattttgtggacatggaaaacaacttatgtgttaatattccctagttccttaatgagaaatccgctctgagccagcgaacccagcaaattgtgcgcactgtgctgggtggaatccttaaggagcccgttcccggcaacggaaagcatgcctgcagtgccgaaaaaacactgaaacttctggcggaacgttactatgctggacccggatccgatgacaactggccattggtgctgcgcaccatgcaatccgatatggatcatttgggcctgacaccaaatgataattacaagctagcccttaaagctctcggccagtgcatcttctttatccataagtgcaagctggagcccaaggtgctgcccatggcgcgttatcagctatatgtgccgcccgatcagctggcggatgccaagccggcggtagcatccacattgagacgctcccacatggtactggatgccactactttgtcgaacctcagaattattggtgaggaacactccttgctctccactttggatcactgctgcaccaagttcggaaagcgactgctgcaccactggctttgcgctccgagttgcgatgtctcagtcatcaaggagcgacaagatgctattggtgagctaattcgaatgcccaccgaactgcaggaagttcgagctttgctagctccgatgcccgatttcgaacgaaatcttgcccagattcatctatttggcaacaaacagataaagcagatggaccacccggattcccgggcgattcttttcgaagaaaagctatataacaagcaaaagctacagggatttatggccgtacttaagggattcaatgatctaaccaaattgcctacgatgttccatcagtgcaaaacaactttgcttaagagaattacccagctgccggaatcgggaggctcttttcccgatctaagcaaggagctacaatattttgccactgcctttgatcatgatgcagctgctaaaacgggtgtgattgcaccccaagctggaatggatgctgagtacgatgcggcaatggattccataggtgaggttgagaaacgcctcaaaacatatcttgtggaacaagagcgacactttggttgccgcattacctatttcggcagcgacaagaaacgttaccaattggatgtgccagaaagccatgccagcaaggccaataaatcctacaccttggaaggacaaactaagggaaagaagccatctcgtcgctacaccactgctgaaacccgtgccctactaaaggacatgcagcacgctgaggatacaaggaacatggtcctaaaagatctggcgcgtcgtcttttcgagaagttctcgaatcactacgaccagtggaagcaatgcattgactgcgtcgccaacctggatgtcctaggctcactagctgaatacgctggtcaacaaatggttatctgtgtgccagagctggtctctgatgcggatcagccgtttatccaactggaggagggctaccacccttgcgcaaatgcatccacctatattcccaatggcctggaattgggcactgcatcggaggcgccactgtcactactcactggccccaatatgggcggcaagagtacgctgatgagagaagtgggtcttctcgtaatcatggcgcaaattgtaagtaatttcaagtaataggaacttcctctggagtgtttaattaatattgttaactttcattttagggcgcccacattcccgctgctagttgtcgcctttcgttggtggacagaatcttcacgcgcctgggtgctcaagatgacattctggccgggcacagcaccttccttgtggagcttaacgaaacctcacttattctcaaacacgccacatgccattcgcttgtgctgctcgacgaactcggcaggggaaccgccacatatgatggcacagcgattgctgcctctgtcgtcaactttctggccaatctcaagtgccgcactctgttctccacacactatcacaatctgattgatttcttccacaacgacaagagaatcacactgggtcacatggcttgcatggtggagaatgaagacaatgccgatcctacccaagaaacggtcacgttcctatacaagtatacagccggtgcttgtcccaaatcgtatggctttaacgcagccaaattagctggaatgcctcagggaattattaagcgggcctatgaggtgcgtatcttttaacttttaagctaaaaaattgtattaaagacttgtttcttcttgcagctttccaagaaagtcgaagccattgctttgcagcgcaaaattacggccaagatcgtagctgccacagccggaaacgaagacaccaaaaaggagaaaataaatgcactcaaagatctgctaaagcagttaaaaatgtgccaagtttagggtgcagaagctccaaagttgaggctaccagacaccatttcccattttaaaaacatgtttacttatgattcgccaagaggcagctatgctggaatttgatgtatacgaagctttttaagactttttcaccatttcagtatgcattttttttgtagtttttataaggaatttgaatcaaaacctgtgccattctcaacattctcaattaagcaaaatggaactattccatttacagcccagaaaacattttaaattgtttgccattatttgccaccgtttaattcttgtttattataattattatttttttttgtatcacagtaaaaattaaaattaaaacaagttcacaatcaaaatacacacacatatgatattattcaatacttataaataaaatgttacacaataaatacaaatattgataaaaattgtaaaaaacacacacattgcgctgttcgaactaagataatacgccatatgatatttcatgaaaaataggaatgcagattgtatttgtatttatatcagatatacatatgtaggcttgtgcgaatcggttataaagttagtagttagtcaacaggctgggaaacctttacaagtagctctcaacagctaatatttcaactaaaagccggtctagatagagcctaatacagaaaattaaacctggaaaagaaagtgcgctctaataacaggcaacttatttcaggtcgagccattgtgtttgctggttgcttacaaaaacacttacaaaagatctaatctatatagctgatgcctcctctcatttgagttaagccttttaatgttgaactactttaacttgcctgtcatttaatcattacggtctattttggacttgcttttagtttaaacaactatataaattaccgaactatgtatacatagcacttgtatatccatatatatctagactaggtttctacgttctcttatgcatctggtattgtatatgttacaatggtcggcacgggaa

SEQ ID NO: 15398 - DNA, 3573 bp, DROSOPHILA
atgtccaagaagttaaacaccagcgtgggcgggacgcccacaaacacgctactaaattacttttccaagtcgccagctttcgacaaaaagaaattgactcctagcgtgaaaacagatcccgatgcatccaagagcgaaaaggagaatctccagaaccagcagccaaaagtgaaggatggtaagaaagaggcttccaagccggcggccaagaggaagttgcccatttccgacgatgagccggccagtggtcaacgcaagcggaagcgcatcgttcagccggaatcggacagtgagccggaaatggaggtaaccaagtcggaggacgacttctccgattgcgcctccgactacgaaccggatgagaatgaagccagcgatgatagcgttagcagcggcgcggaggaggtgtcgcctagcgagaacgacatgtccgtggacagtccgacacccaagaaatcgcgcaaaaagtctaagattctgaataacaacaataacaatgagccatcgagcaagaaggtcaagctagagtcgaccatccagttggccgagggtgcaacctttcaagaaaagctgaagaacctgcagagcaatgccaagcaggatgcttcctacgatgatatcgtgaccaacacgtccaatctggatgagcccgttgtttggccgcaccagaaactagagttcctgcaaccggacaagatcaaggacaaggagggaagacgtccagatcatccggactacgataagagcaccttgcatgtgccggagaagttcctcaatggcctgtcgccgggagttcgacagtggtgggtccttaagtcggacaactatgactgcgtcttgttttttaaagtcggcaagttctatgaactgtatcacatggatgcggatgtgggcgtcaacgagctgggcttcacttacatgcgcggcgagtttgctcactccggtttcccggagatatccttcgacaagatgtccaccattctcgtagacaggggcttcaaggtggctcgcgttgagcaaacggaaactccagatatgatgactgagcgctgcaagcggatcaaggccaccaagttcgacaaagtggtggcccgcgagatctgccagatcaccaatcgtggcacccaggtctttggctcacagtgcaagatcgggccgaatcatcagcccaactatatgttggccatagtggagaaggatgagggaacttgtagccggtatggagtgtgcttcatagacacctccattggtgactttcatttgggtgagtttgaagacgacaagaactgttcccgcctcctcaccctggtgtcacatcatatgccagtattgttccttaatgagaaatccgctctgagccagcgaacccagcaaattgtgcgcactgtgctgggtggaatccttaaggagcccgttcccggcaacggaaagcatgcctgcagtgccgaaaaaacactgaaacttctggcggaacgttactatgctggacccggatccgatgacaactggccattggtgctgcgcaccatgcaatccgatatggatcatttgggcctgacaccaaatgataattacaagctagcccttaaagctctcggccagtgcatcttctttatccataagtgcaagctggagcccaaggtgctgcccatggcgcgttatcagctatatgtgccgcccgatcagctggcggatgccaagccggcggtagcatccacattgagacgctcccacatggtactggatgccactactttgtcgaacctcagaattattggtgaggaacactccttgctctccactttggatcactgctgcaccaagttcggaaagcgactgctgcaccactggctttgcgctccgagttgcgatgtctcagtcatcaaggagcgacaagatgctattggtgagctaattcgaatgcccaccgaactgcaggaagttcgagctttgctagctccgatgcccgatttcgaacgaaatcttgcccagattcatctatttggcaacaaacagataaagcagatggaccacccggattcccgggcgattcttttcgaagaaaagctatataacaagcaaaagctacagggatttatggccgtacttaagggattcaatgatctaaccaaattgcctacgatgttccatcagtgcaaaacaactttgcttaagagaattacccagctgccggaatcgggaggctcttttcccgatctaagcaaggagctacaatattttgccactgcctttgatcatgatgcagctgctaaaacgggtgtgattgcaccccaagctggaatggatgctgagtacgatgcggcaatggattccataggtgaggttgagaaacgcctcaaaacatatcttgtggaacaagagcgacactttggttgccgcattacctatttcggcagcgacaagaaacgttaccaattggatgtgccagaaagccatgccagcaaggccaataaatcctacaccttggaaggacaaactaagggaaagaagccatctcgtcgctacaccactgctgaaacccgtgccctactaaaggacatgcagcacgctgaggatacaaggaacatggtcctaaaagatctggcgcgtcgtcttttcgagaagttctcgaatcactacgaccagtggaagcaatgcattgactgcgtcgccaacctggatgtcctaggctcactagctgaatacgctggtcaacaaatggttatctgtgtgccagagctggtctctgatgcggatcagccgtttatccaactggaggagggctaccacccttgcgcaaatgcatccacctatattcccaatggcctggaattgggcactgcatcggaggcgccactgtcactactcactggccccaatatgggcggcaagagtacgctgatgagagaagtgggtcttctcgtaatcatggcgcaaattggcgcccacattcccgctgctagttgtcgcctttcgttggtggacagaatcttcacgcgcctgggtgctcaagatgacattctggccgggcacagcaccttccttgtggagcttaacgaaacctcacttattctcaaacacgccacatgccattcgcttgtgctgctcgacgaactcggcaggggaaccgccacatatgatggcacagcgattgctgcctctgtcgtcaactttctggccaatctcaagtgccgcactctgttctccacacactatcacaatctgattgatttcttccacaacgacaagagaatcacactgggtcacatggcttgcatggtggagaatgaagacaatgccgatcctacccaagaaacggtcacgttcctatacaagtatacagccggtgcttgtcccaaatcgtatggctttaacgcagccaaattagctggaatgcctcagggaattattaagcgggcctatgagctttccaagaaagtcgaagccattgctttgcagcgcaaaattacggccaagatcgtagctgccacagccggaaacgaagacaccaaaaaggagaaaataaatgcactcaaagatctgctaaagcagttaaaaatgtgccaagtttag

SEQ ID NO: 15399 - protein, 1190 aa, DROSOPHILA
MSKKLNTSVGGTPTNTLLNYFSKSPAFDKKKLTPSVKTDPDASKSEKENLQNQQPKVKDGKKEASKPAAKRKLPISDDEPASGQRKRKRIVQPESDSEPEMEVTKSEDDFSDCASDYEPDENEASDDSVSSGAEEVSPSENDMSVDSPTPKKSRKKSKILNNNNNNEPSSKKVKLESTIQLAEGATFQEKLKNLQSNAKQDASYDDIVTNTSNLDEPVVWPHQKLEFLQPDKIKDKEGRRPDHPDYDKSTLHVPEKFLNGLSPGVRQWWVLKSDNYDCVLFFKVGKFYELYHMDADVGVNELGFTYMRGEFAHSGFPEISFDKMSTILVDRGFKVARVEQTETPDMMTERCKRIKATKFDKVVAREICQITNRGTQVFGSQCKIGPNHQPNYMLAIVEKDEGTCSRYGVCFIDTSIGDFHLGEFEDDKNCSRLLTLVSHHMPVLFLNEKSALSQRTQQIVRTVLGGILKEPVPGNGKHACSAEKTLKLLAERYYAGPGSDDNWPLVLRTMQSDMDHLGLTPNDNYKLALKALGQCIFFIHKCKLEPKVLPMARYQLYVPPDQLADAKPAVASTLRRSHMVLDATTLSNLRIIGEEHSLLSTLDHCCTKFGKRLLHHWLCAPSCDVSVIKERQDAIGELIRMPTELQEVRALLAPMPDFERNLAQIHLFGNKQIKQMDHPDSRAILFEEKLYNKQKLQGFMAVLKGFNDLTKLPTMFHQCKTTLLKRITQLPESGGSFPDLSKELQYFATAFDHDAAAKTGVIAPQAGMDAEYDAAMDSIGEVEKRLKTYLVEQERHFGCRITYFGSDKKRYQLDVPESHASKANKSYTLEGQTKGKKPSRRYTTAETRALLKDMQHAEDTRNMVLKDLARRLFEKFSNHYDQWKQCIDCVANLDVLGSLAEYAGQQMVICVPELVSDADQPFIQLEEGYHPCANASTYIPNGLELGTASEAPLSLLTGPNMGGKSTLMREVGLLVIMAQIGAHIPAASCRLSLVDRIFTRLGAQDDILAGHSTFLVELNETSLILKHATCHSLVLLDELGRGTATYDGTAIAASVVNFLANLKCRTLFSTHYHNLIDFFHNDKRITLGHMACMVENEDNADPTQETVTFLYKYTAGACPKSYGFNAAKLAGMPQGIIKRAYELSKKVEAIALQRKITAKIVAATAGNEDTKKEKINALKDLLKQLKMCQV

SEQ ID NO: 15400 - DNA, 10719 bp, DROSOPHILA
acgccgaacggaaacctatcgctggaggaggaaaaccgccagctaaaggatgcacgcttatgcaaggtatgcttggacgaggaggttggcgtagtgttcctgccctgtggccacttgggtaagtcgctgaactataccttgattgccttgagctgtagctaacttcctgttaacccgacagccacctgcaatcagtgcgcccccagtgtagccaattgtcccatgtgccgcgcagacatcaagggattcgtgcgcacgttcctttcgtgaagtgcatatcgacatcatttagagttcaccagcctagttagcagttaagcaaatcgattgattgcacccacacaaactactacagcgaagttcaaattatccggtgattagctaatataatcgtctactaatcgtctactaagtacttggccaactgcagctattcgtttttacattagctacggttgtaagttgtcgttactaactatcgcattgtgtccgagcgcatcccttttgaaccatacattatgcacgctgaaatgaccttatatagatgagcagctctaattcgcgctgaaaagggtatcaatgcaccggcacgaccgcagatcacatggatttcttgttatagtactcttattaacacatgtatgtatttttgttgatcatgtttataggccgctgatagtatggtttacacacaactatatgcattctccaataaatgtatatgtaaatgttaaaaaatttgtcttttcaattgcaaaaattctttaaaataatttatttattttgctaagttttaaatcccaacggtcttcaagtgatgtgccccgagagattagcctattagcttgcaacagtctgattccactgctcacaactatctcgatatcatcgccatgcacggttcgatactatcgatagtagcatcgatgttttgacggctctactcaaaagtaccaaaatattggtatccaagcaatcgttttcagctctccgcgtgaagtcgtgtgcgctgctcgtaagggagctccattgagttctggtcgcgaaaaactaacaagctccaacgccaagaagtgcagaagatagtgaacaaaatttagaagaaccgaaccgaagctacggggaattttatgtgtgaaatcgaaattaccaaacgcgcgctcgtgtgagtatattctgcgagtatttcaaaggaagagttcaagtgtgtgtgtgtgtgtctggtgttgctgctgcattttacggagtgtgggcgctttatgctctttatagtgtggtgtggcaagcagtggccatatccccccgctacaccagaaaacccttacagtccgctacctttccattttggaatcttcttcgaaaaacactttttcgtacggtgagaaacaaagcgacgcacgcacacacacgttcagcgagcgttgcttatctagattgtaagagggagggaggggagagagagcgcgacacgtatctgaaaatctcaatctcacaagtacacaccgtaatttcggttgtcgagcgtgctgcgcatacgcgcttggcttgataccatttctcacattttccattcgggtcagtcgctggaaacagctgtgggctgtccccccaccccttaccattcccttctaaagagaatgaccaatccacccattaaggtattccccagcgaaccgcaaaagcccaatcagcgtttattttttattcggaatgattattcatttaaaactctggataacctgtatgtatgcgtgatggtgtgtgttggcaatgttttgcaaatacatacaatttcaacagcgcataaaaaaaagaaaaacaaaagcagggcgggctttttaccgttctctttctctttcttccgcctgccagaggagaatgcaaaaataaacaaataacgaattcccgctatctggactgcgaatgtgttcagaatttctatatccatatatgtatgtatccgtacacaacgtttgtttagcaattgacccagtgcttcccttaaatattgaactcaattggaggcgcagttacacgcggtgggcactttattgactgcattactcatatgcaagtcccaaaaggagggggatcgaatgcgaatgccgcaccccgtacttgcagcacttatctgtctacgaagaaattgcataaaacgtgccgatctcaacgtttgatgttttacaagagtagctggcatggtggtagatagctgaagtacagtgaactggcgctatgcgagtctgtgcttgacccacagaagttactgtcaaaacattgcttatagattttgattaatcacttgtaaagttcattaaacccatttaggctcattacaagtgattaaggttttaagtgcccttttagcttaactcatatgcctaatacattttgtacatcattaagtcacaaagcagtttaaattatgttttgagctactttattaaagagagtaaaccctgcgtttttgtgtagtttttactaatgccagttactgttagccggttttcactgtgccagggctgcggcacctgcacgcatcgcagatcgaaccgttggaagcctcgcatctcgcgatcagcataagttgcaaccctagtcgctcactaacatacacacacaggcagacatgctgctcacgcacaatggagccagcttcccagtttgcgctctcgtgtgtgtgtgtgtgtgtgtgtgcaaatacgtatgtatgtgcgtgtggcagcattaactagttttatttgcctggtgaatgtcaatttcattgtaattgcacactcagagtctctccacgaatagaaaaggaaaacaagttggccagcgggcagcgatgtttggtgattagtgcaccacacctgggagttgccattttagccccaacatttggcgaggtgaccttcgccagagttgccgatcgattgtgagttgcacttgctgttgctgcggcggcagctctaattgttttgtttacatttctgtgtgcggtgcgaaaatgcgagaaatgccagaaaacgagagcgccagcgaaatttaacggtacgtggttgcctgcctatgtacgtttgcatgtacatatatataaatgtatcggtttgtgtacatatgtgaatttgcgatcaatggcgctgcttcgctaaataatttgacctctgggccaccaattaaagtgtggatgctgcccattctattaccaccacaccacgccacaccgcaccatctgcccatatcgcattcgcatatattaccaaaaggtattaccgaaaagaagtgcaagactggttgtgcgcgtgcgcgtgtgtgagtttcggagattttatggcggctacgaaggtcacggctaagcgtatgcaaaataaaatcaaagctaaaccagactcaacagactctgtgattcaatgagatcgcagaccagcaactgataaggcaagttggccaagtcgaagctcagatgccctagtatctaataatttcattattatatacacatagcattgcacttgtacttgatcagcacatctactcttatagaatccttaaaattaaaaaagtttgcttagatgtataaccgttatacagttaataaactgcataaacttatgcaagttaggtttgccggtttctatggcaactatgtgctgcttttgattgaacacaacatttccacatgcaataaaaaaaaccaccaccgtttgccacattttatttgctatcctggccagaggactacgtttatttggtcctcgttatatcgaatcaccggctgataccgccgacaagtcggaaatgtcttcttaaatactaaataaactccataatacacaagggtattcatacaggtaaacaaaaaaaaaaaagcgaatataaaacaattttgacgtgaatcgaggtaacgtgccaacgatctcccccctttaaggcctagactccagcactccctttccgaattgattgtttatatcgtgccttaaaaaattattaacggaagtacattcacctgatcagttgaatgaacatgagctctgctctttcctactgttttatttatttgctttatttttttttctaccattaaacattttttttccatattttttctcgaccatttgacagcagctggcgtagattgtttttttttttttcattttttatagacgcgattcactcacgtgcaaacaatcgtaaaaacgccagagcacgcgcttgtttgcatttgattgcattttaacgtagaatgaaaagtgatcttcccactgacctgtcccaatcggtggttctgatttgattgtggctttaacaaacatttttctcgggctcgggtttcatctgaaggagagcattgcctatcatcgctgaacgaaacttggatttcccgaaaaaataaacaacgtatttgatttgacgcaatctgtgctttaattggagcaagtcttatcaatttcggggtataatttaaatgctatacagctttgaagtccgctagatggttggattactcataaagacaatttgaatttgtctaacttgaatttcatttgagaatcatcgctttttttagcacaattttattgagttacttgttcgctaattatcgttttccgattcggttattaagttgtatactttcaacgaaataactcgtttgaattagtaaaagctagtttggcggttttagtagctgttttattttttaacaaacaaaaaacactaaattgagaaatccgttcaatcaatcggttaattaaatgcagattagtcattctcaaattagtcaccatttaaggaaatttctcaatgtgacacagtttttaagtggttccttgttgccaattgggcaactttcactgttaaaagtattccttatgccttttataatttaccagaatatttcgttttattttaaacgaatttaaattcatatattaatatattctagttaaaattaaaatatgttaaccttttcaaacttttacctgaaaaatgttttgcaaattaaccggtcggttaaagtgctgatttcaccttcacagtttcctatttagttcttaatgcaattaaattaatcacaactacacagcttttttgtaagattcaacttagtaagaaaaaaactatctaagcaaagagaaaatgagttaattgccactttataccaactgtctacttttctactttatttttctccagatccaaaaatttttattctgcacttaagttttttttatgtgtacccattgcaaaattttggtgttaataaacacctattcgtatccattgcaggaacgactttgaagcttttcaacactgccggcaggacaaatcagctgcgacatccggcaatgcaccaagatgagcagcaaggagcagcaagcagcaggccgggactttaagcgcaattcaaatgcctactccagtctgccgcctacaggaacgggagcaggatgctccggagcagcactgggatcgggaacgggaactggcaaaagagctcgcagcaaacagcatcagttggagcatgagcagtttggactctcgaacagcctgtccagcgaatcgatacggcaggcctgtgcctactacgacgacgagttgagcgacgaggatctcatcgagattcagcagacgccccaagccttccaccagcagacaaaacaacccctccagctgcagccaatcagcttcagactgggagatgagctgggcgacgaacgaagtgccttttgtggcagccaggagatgcagcaggtgccattgagcacaccgatcaaacaagctgctgaaacggatgaagccctatgtgtgctcagcgaactggatgccattctggatgtccacgatgtctcgcagctgaatggcacctgctcgagcggatctgtgaattccggaagtgacgatgacaaggtagaggattatttaatggatctggacaactatctggaggagatggataatgccttaaaccgcgaagattcactcatcattatagacggccacaccagcttaaaacgagagcctagaactagaactttgcctttaagtaggaaaaaaaagtcaagtaagaaaaaaagcgaagatcaggaggcggcacaaggtgatttccaaagagaacatcaattaaggaagactttcagctgttcattaaggcctacaagccaaataggttggtaatctcttagctgattaaaatatataaaacaatcaactaaacttttcttatttctagcttcctcttccggatcattggagacttccacggagcccgttatggacgtttggaggcgacagtccatgcgtcgagccctcgagcaggaagacaccaaagctacagttgcgatggaaagagaggaagacgatataccgaccttattggtggagttgccaccgagacgcgatgcggaaatgcgtcgctgtttctcccaaggcgattgccaagcatcggtagcgcctacggttggctctcagatgctcacagaggcgcacatcttcgacaacctcctgcaaacgaacgcacgggcatcgagcgaagagccgcgaccccggcagtatggtcgccgcttggagggacctcctactccagttcgccccttgattctagcccagagtcggccacagagcgctccgacgcgcgtgcagatgagagaaccacagctgcaggacacgcccacgcacccaattatgtccacatgctcggaactcagctcggcgcgctcgtcacgaatgcccagtccagtttccctgccctcggacagcagcagcagcggaagcagctctgctgaacacgatcaggaaccggatcccgtgcaaaccacgaccatgtgcagtgccagcagtacgacgcccctagagccgctccaccaattgcaattgctgctgcgcgagaagtgcggtttcaacagtcaatggccccatgccggaagtcgtactcttgcactgatcggatgcactttgggagtctttaatatgtgccgatttgccgtgctcaccattaactttggtggcaactttctgctacagtttcttctgctctcggttatctttggaatcccacttctttggctgcaaatgtgcttgggcgccaaaatacgtgctggtcccgtttccatgtggaaaatcagtccgatatgcgccggagtgggcatagctctggtgatgcagcagtgcttcctggccttgtactcaacagtatcgctggcctggattttagtctaccttagggacgtattcccgacagcagcacgcagtggatatcgctggcaagagatggcatttccctatcgctatgatgcatcgaatgcaacggggaatctcacgcaaacagtggccgagtacttcaacgtggtggtgttgcagcgactacatctggccaatcatcctgatgccagtggaatacgattccacgttaatgatcgggtaagtttcgccctccccactatcccgcttctcatctaactgactcacatccaattccttcagcagctggccttttatctggcccttatttgggcggccgtgtttctcatcctctgtaagggtctcaagtccttgggaaagttggcttacattatctacactctgccgttagtagctctggcggtagtgaccgctaagtttgtctatgtcgtggatcccagcaggatacaggtaagtttgttacccgacaacaaaaaactctttaaactatcgatattctgtaatttttgtagaacatctttgctgccagcgatttcgacgactttctggtgaactcaaatagctggacggcagccacgcaggaaacgtttcttacttggggtctcctaggcgcctccgtaatcgctattacgagcagaagtcacaccaatgccaacaaggccgctttgaggagggatgcgattctcctggtattgtttacccttatcggattgggtttaatggcactgctagcgttgtgttgtgcacagattctgtggcagcatggatacgtttatgtgccaggatcgtttggtgagttttaaatcatgtctcttttttagttttaaactaattctattatgcttttcagagaatcccgattgttacacgtccatttactcgctgcaatcaaacaccaatccttatctgctttcctatccgcgctcgctgattccgcactactcctcgttcattggcgagacttacaggaggaatcgcaccatgattcacgtggagagcggattccaggcactgcgcttcatctcggaaatctttccggccgtgctctcgctggccagtgatagcatatcgtgggtttgggctgcagtggcctttgcaacgttcgccggatttggtctagcgcagctgtgtgtgatgtggaaacccatctcaagtgccttaggtaattccacgagctcggttttgttgagctgcgtgactggtctgctcctaagcattccattcgccacagagatgggcatttcgatcttgtactatgtagattttctactgggcggctcctggttcattccgatcatctggacggctcagatatttggcgtgtttctaatacgggggcgtccgtacaacggagatgatctggtaaatgacctaaggctttgtgggtccatgtcggcattcttggcattgtcttggaacgttttgctgcccattggtctgatcacattgtctgtcgtagactataaggcttcgttgtcgaatcagttttattattggcgtggaaagtcatactttacgtattggtccaggaagatgggcagtcttatccaaattggagtgctgttagtcattcccgtgactgctattattcaaatctaccggtatttggcgcacgggccacccgatatcttggaggtgagtctataataatatttgccttattatttggcactttcaataatattatttccttttctcttttagcgcattcaactgctgtaccgaccgcccgaggagggagaggaaccgcgtcgtccatccgctcgacaaacggcgtcccaaagtcgtcgtaatgctttgggccagaccacggagggcggccaacacgatgcacagaacgatgctccgccaaagtacacaccacctccgtcctacacaacggccactggagcccgccttgccaagcttctgcgccagagcattcgccgcagcgtaagaaggtacataaaaaccatcccttaatataaacaaaaagttatttacgaccaatttatcgacacagggttctcggagactcaagtcgaacgcgacccgtgctctccctcgatgcggagtctgcttcgccagcggcgccgcctgattacctaaccatactgaccaatccggctggcagtagtttcaacgcggatccttcgccagcttccagcagcagtcccgagtccatagagatcgaccagcgacccgttggctactcccaacgctcgcaatcgttgggcaggaaactgcatcgttcgggtgcttcgacactggagaggcggccctatacggcggaggatgtggtgaccatactgcgctcctcggtgcgacatcgccagtcgcagggaggcggaaatttggtcactgccagcaccctgcctcgccccccaaccgccgccatgtccacgcacttggaggacgcctcattccgatccatagagaatcttgtgctgaatgccgagccaccggacagaacgcccggtgtggagctggagctcgaattggaggctggacaggcggaggagtgcgcgcgaaataatacatctgtgatttaactgactaatatcgtaccgtacatagcgtaactcttatgcgatccacatatccgcttgctttcttagacttgattagcgctagttatctaaatacgaatattaccttgtagttatgcgaataataacgaaaacaactagttggtactcccaagtgtgagctcttttgatccctacaaccggtattcccagttcgatccaacccaccccatttaattccatttcacatatattttaggcttacggatcgcgcctgtctgcacagttgcccttaaaattatcccaacaatggagtaggcctcctacgtgcccagctctcgagggtcagctatttaagggaatacgtacttgggccctaagccgattaacaaacgtgaccagttgaataaaaaaagtgaaaataaacggaagtccaggatggcgtagccaacaaaggcgcctaatgaggcgggccaggaagttgctgcatatttcgattaaaatgtcacgccatttcttttgttttctttgtgacttgcatattccaaagggattggcctgcaaaaaagttaatccgcggaatttttaaatcagcacgaattggcggttattattttaatatctggcagcgctggttcaaagaaccagttcaaatgggttgagtctcggctagaacttttgtgaagttcacacaataattgataccgttatttttacttataattagtaattttaatgctagaaatacataaataacaattgagacctatataaaagcaagtgataagggttcttatacaagccaatgtgtgtagtacaactactctataatttgggatgatagttataaagttttaaataaatatatattttcatgaaaatattatcaacactttaataatgaacgagtttttggacccttattaaccataatatttgaaatttaagttggaacaagaaacttttaaactgttggcgaacgcggtattttttaggcccttcttgccgggtgaggttactcctg

SEQ ID NO: 15401 - DNA, 4161 bp, DROSOPHILA
tcgtgtgcgctgctcgtaagggagctccattgagttctggtcgcgaaaaactaacaagctccaacgccaagaagtgcagaagatagtgaacaaaatttagaagaaccgaaccgaagctacggggaattttatgtgtgaaatcgaaattaccaaacgcgcgctcgtgaacgactttgaagcttttcaacactgccggcaggacaaatcagctgcgacatccggcaatgcaccaagatgagcagcaaggagcagcaagcagcaggccgggactttaagcgcaattcaaatgcctactccagtctgccgcctacaggaacgggagcaggatgctccggagcagcactgggatcgggaacgggaactggcaaaagagctcgcagcaaacagcatcagttggagcatgagcagtttggactctcgaacagcctgtccagcgaatcgatacggcaggcctgtgcctactacgacgacgagttgagcgacgaggatctcatcgagattcagcagacgccccaagccttccaccagcagacaaaacaacccctccagctgcagccaatcagcttcagactgggagatgagctgggcgacgaacgaagtgccttttgtggcagccaggagatgcagcaggtgccattgagcacaccgatcaaacaagctgctgaaacggatgaagccctatgtgtgctcagcgaactggatgccattctggatgtccacgatgtctcgcagctgaatggcacctgctcgagcggatctgtgaattccggaagtgacgatgacaaggtagaggattatttaatggatctggacaactatctggaggagatggataatgccttaaaccgcgaagattcactcatcattatagacggccacaccagcttaaaacgagagcctagaactagaactttgcctttaagtaggaaaaaaaagtcaagtaagaaaaaaagcgaagatcaggaggcggcacaagcttcctcttccggatcattggagacttccacggagcccgttatggacgtttggaggcgacagtccatgcgtcgagccctcgagcaggaagacaccaaagctacagttgcgatggaaagagaggaagacgatataccgaccttattggtggagttgccaccgagacgcgatgcggaaatgcgtcgctgtttctcccaaggcgattgccaagcatcggtagcgcctacggttggctctcagatgctcacagaggcgcacatcttcgacaacctcctgcaaacgaacgcacgggcatcgagcgaagagccgcgaccccggcagtatggtcgccgcttggagggacctcctactccagttcgccccttgattctagcccagagtcggccacagagcgctccgacgcgcgtgcagatgagagaaccacagctgcaggacacgcccacgcacccaattatgtccacatgctcggaactcagctcggcgcgctcgtcacgaatgcccagtccagtttccctgccctcggacagcagcagcagcggaagcagctctgctgaacacgatcaggaaccggatcccgtgcaaaccacgaccatgtgcagtgccagcagtacgacgcccctagagccgctccaccaattgcaattgctgctgcgcgagaagtgcggtttcaacagtcaatggccccatgccggaagtcgtactcttgcactgatcggatgcactttgggagtctttaatatgtgccgatttgccgtgctcaccattaactttggtggcaactttctgctacagtttcttctgctctcggttatctttggaatcccacttctttggctgcaaatgtgcttgggcgccaaaatacgtgctggtcccgtttccatgtggaaaatcagtccgatatgcgccggagtgggcatagctctggtgatgcagcagtgcttcctggccttgtactcaacagtatcgctggcctggattttagtctaccttagggacgtattcccgacagcagcacgcagtggatatcgctggcaagagatggcatttccctatcgctatgatgcatcgaatgcaacggggaatctcacgcaaacagtggccgagtacttcaacgtggtggtgttgcagcgactacatctggccaatcatcctgatgccagtggaatacgattccacgttaatgatcggcagctggccttttatctggcccttatttgggcggccgtgtttctcatcctctgtaagggtctcaagtccttgggaaagttggcttacattatctacactctgccgttagtagctctggcggtagtgaccgctaagtttgtctatgtcgtggatcccagcaggatacagaacatctttgctgccagcgatttcgacgactttctggtgaactcaaatagctggacggcagccacgcaggaaacgtttcttacttggggtctcctaggcgcctccgtaatcgctattacgagcagaagtcacaccaatgccaacaaggccgctttgaggagggatgcgattctcctggtattgtttacccttatcggattgggtttaatggcactgctagcgttgtgttgtgcacagattctgtggcagcatggatacgtttatgtgccaggatcgtttgagaatcccgattgttacacgtccatttactcgctgcaatcaaacaccaatccttatctgctttcctatccgcgctcgctgattccgcactactcctcgttcattggcgagacttacaggaggaatcgcaccatgattcacgtggagagcggattccaggcactgcgcttcatctcggaaatctttccggccgtgctctcgctggccagtgatagcatatcgtgggtttgggctgcagtggcctttgcaacgttcgccggatttggtctagcgcagctgtgtgtgatgtggaaacccatctcaagtgccttaggtaattccacgagctcggttttgttgagctgcgtgactggtctgctcctaagcattccattcgccacagagatgggcatttcgatcttgtactatgtagattttctactgggcggctcctggttcattccgatcatctggacggctcagatatttggcgtgtttctaatacgggggcgtccgtacaacggagatgatctggtaaatgacctaaggctttgtgggtccatgtcggcattcttggcattgtcttggaacgttttgctgcccattggtctgatcacattgtctgtcgtagactataaggcttcgttgtcgaatcagttttattattggcgtggaaagtcatactttacgtattggtccaggaagatgggcagtcttatccaaattggagtgctgttagtcattcccgtgactgctattattcaaatctaccggtatttggcgcacgggccacccgatatcttggagcgcattcaactgctgtaccgaccgcccgaggagggagaggaaccgcgtcgtccatccgctcgacaaacggcgtcccaaagtcgtcgtaatgctttgggccagaccacggagggcggccaacacgatgcacagaacgatgctccgccaaagtacacaccacctccgtcctacacaacggccactggagcccgccttgccaagcttctgcgccagagcattcgccgcagcgtaagaagggttctcggagactcaagtcgaacgcgacccgtgctctccctcgatgcggagtctgcttcgccagcggcgccgcctgattacctaaccatactgaccaatccggctggcagtagtttcaacgcggatccttcgccagcttccagcagcagtcccgagtccatagagatcgaccagcgacccgttggctactcccaacgctcgcaatcgttgggcaggaaactgcatcgttcgggtgcttcgacactggagaggcggccctatacggcggaggatgtggtgaccatactgcgctcctcggtgcgacatcgccagtcgcagggaggcggaaatttggtcactgccagcaccctgcctcgccccccaaccgccgccatgtccacgcacttggaggacgcctcattccgatccatagagaatcttgtgctgaatgccgagccaccggacagaacgcccggtgtggagctggagctcgaattggaggctggacaggcggaggagtgcgcgcgaaataatacatctgtgatttaa

SEQ ID NO: 15402 - protein, 1308 aa, DROSOPHILA
MSSKEQQAAGRDFKRNSNAYSSLPPTGTGAGCSGAALGSGTGTGKRARSKQHQLEHEQFGLSNSLSSESIRQACAYYDDELSDEDLIEIQQTPQAFHQQTKQPLQLQPISFRLGDELGDERSAFCGSQEMQQVPLSTPIKQAAETDEALCVLSELDAILDVHDVSQLNGTCSSGSVNSGSDDDKVEDYLMDLDNYLEEMDNALNREDSLIIIDGHTSLKREPRTRTLPLSRKKKSSKKKSEDQEAAQASSSGSLETSTEPVMDVWRRQSMRRALEQEDTKATVAMEREEDDIPTLLVELPPRRDAEMRRCFSQGDCQASVAPTVGSQMLTEAHIFDNLLQTNARASSEEPRPRQYGRRLEGPPTPVRPLILAQSRPQSAPTRVQMREPQLQDTPTHPIMSTCSELSSARSSRMPSPVSLPSDSSSSGSSSAEHDQEPDPVQTTTMCSASSTTPLEPLHQLQLLLREKCGFNSQWPHAGSRTLALIGCTLGVFNMCRFAVLTINFGGNFLLQFLLLSVIFGIPLLWLQMCLGAKIRAGPVSMWKISPICAGVGIALVMQQCFLALYSTVSLAWILVYLRDVFPTAARSGYRWQEMAFPYRYDASNATGNLTQTVAEYFNVVVLQRLHLANHPDASGIRFHVNDRQLAFYLALIWAAVFLILCKGLKSLGKLAYIIYTLPLVALAVVTAKFVYVVDPSRIQNIFAASDFDDFLVNSNSWTAATQETFLTWGLLGASVIAITSRSHTNANKAALRRDAILLVLFTLIGLGLMALLALCCAQILWQHGYVYVPGSFENPDCYTSIYSLQSNTNPYLLSYPRSLIPHYSSFIGETYRRNRTMIHVESGFQALRFISEIFPAVLSLASDSISWVWAAVAFATFAGFGLAQLCVMWKPISSALGNSTSSVLLSCVTGLLLSIPFATEMGISILYYVDFLLGGSWFIPIIWTAQIFGVFLIRGRPYNGDDLVNDLRLCGSMSAFLALSWNVLLPIGLITLSVVDYKASLSNQFYYWRGKSYFTYWSRKMGSLIQIGVLLVIPVTAIIQIYRYLAHGPPDILERIQLLYRPPEEGEEPRRPSARQTASQSRRNALGQTTEGGQHDAQNDAPPKYTPPPSYTTATGARLAKLLRQSIRRSVRRVLGDSSRTRPVLSLDAESASPAAPPDYLTILTNPAGSSFNADPSPASSSSPESIEIDQRPVGYSQRSQSLGRKLHRSGASTLERRPYTAEDVVTILRSSVRHRQSQGGGNLVTASTLPRPPTAAMSTHLEDASFRSIENLVLNAEPPDRTPGVELELELEAGQAEECARNNTSVI

SEQ ID NO: 15403 - DNA, 4790 bp, DROSOPHILA
tctcgaaccggcgcagttccagcatctgcgtgtacatcgtcagggcgtcctccctggacagctccacgtccattgtgggtccattctccaggtcgtagcacttgaacgtctgcaacgggcataacaaaatcattaaagtaacccatttcggaatgctgctctagtaggaacgcaagaagaatctatgtgttgtgcagcactgaaaaatatcagcagcttatgtctatattcagtgttggtctacgcgatgagcagattaagtcgtttctatgttagatttatatcagctatacttaacagcaaatatttaaacatttttcagagtacataatttaattcaaaatgaaaaatataacttttacgatatagcttttttcaatggtatttacttatccattgaccttcttgtgataatcaaaacacttacgttctccagggtcaaacagctacatttgtggcgccctattatcctgcagagcatatttctctcgaggatggagtgggctccactgcatctcatcgccacgcggacacaactgaacttcatcattggcccttgcccgaataccaattcccaaacaccggggcactaaaatgagcttgtagccaaatgggcaattgccacgcactaaaattttgaatatgatcggaaattgttgaaaaatggatttgtactcaaccgaaaagaaatcgacagtaaaatcataagcaaatcgacagagatggcaactgtcactaaacagaacgagaaggaaatataacgattttgggattgcttatggagctgacaactgctccttttcaaatactactttgattcgaactgtaattcttccacaaatcgaattatctattaaatctattccgtttattaatatcttataaatctatcaaaattctatagtgcaagtataggtgaaacagactgagattttcacatttcaaaagtacatacttgattcacttttgttaagaaaactaatttggattaatttttctagatttttatattttcaacaatttacacctcgctttatccttattgaacacgttcgcaatataatatccaatgcagtaccccagagttatgtggtgcgctacgatgtgtggttggagtgctccgattagctaagctttttgtgggtctcttcggatccgttccgttctacggggttctcatcgttcaactttcggcttatgatctagagatttcgcttgtgtccaagtttctgagttattgtgtcttcttgtctgtctgtcagtgatttgtgtttgctgttcggttttcttgtttcgtttaaggttcttgtgagttcccgaatcagattcgttggcccgatgacttagtgattgacgcccttgcgctcctggatgtgatcaatatcgtaggcgatggtgccgcgcagcttgggctccagattgttggagtacacgtccgtccagaggtggctcacgcccagctcggcatcggacttggcgaaggcggtggcctcgtcgacctccttgcgtaccttcagatcgatggcctggaagatgtttttttcttttagcaatcataactcataacaaaaataaaaccctataagccaaacccaccttaacttcatcggtggtaatcagacccagctcgatgcacagctccttgaaggaggtgatgggatcacgcttctggcgcacctcctggatctcctcgcgtgtgcggtacgatgtgcccggatcggacatggagtgtccagagtatcggtacgtgttcgtctccatcaccaaaggtccgtgagtgttcacatagttgatggcgaactcggtggcgctgcgcacggccagcacatccatgccgtccacccagattccgggcagagcgtcgccgcgggtatagtaatcagtgttgcaggaagcacgctcagaactggtgcccattcctaatgggtataattatacaacatttggtttaagtaaatatcttttagcattgttccactttctacagcactcaccgtagttgttgttctcgcagacaaagatcacaggcagtttccacaggtaggccatgttgtaagcctcgaacacctgtccttgattggcggcaccatcaccgtagagggccaggcacatgccgccattgcccttgtacttgcaggccaagccaacgccggcacccaaaggaacttgagcacccacgatgccattgcctccgtagaagttcggtgcgtacatgtgcatggagccacccttgccgcgggcacagccaccctggacaccggtgagctcagccagtacgccgctgggtgagacgcccatcaggtaggtccatccgtggacacggtacgccgagatgatgttgtccacatcccgcatcgccgccttcatgccaacggcgcatgcctcctggccggaatacagatgacagaagccgcgaatgatcttctccttgtacagattaccggcggccgtctccaaccgacggatcgtctgcatctgtgtgtagtacttgagggcctgatccttggtcagcttcacttccgtggcgggtccttcgtccaggcggtgcagcttgaagggctgcaaagttggaaagcatatttagaatttagatccctaaacttcattaattttaaaaacgttttctacttttacattaacaactgacacacacatctgataagaacgtaacggaaacgtttggaacgcatgataagtaataaaatgatagcagtttgattggataaaccaaataaccataggcttcaagcttctctaatcaaagtatactaatctatagagagctataaccacatatcgaggattttcggaagtatgctccaaaaaccaaatttggatttatggcggctaatttatggcgtgagaatcgacgtaaacagagagccagacagacagacggagagaaagagagagagggtgaaaatcggcggatcgttgataagactatatgttatatggtgcgtgaacagtcacgcgtcggccacgcaaaaggcagacggtgataaagagcgtgggagacggaaaactacaaattactgcgtgaccttgtcatttgaaaatgagcggattgaccggcaaaatgcaaccctgcacttacacacacacacacacacacgcaaaccgtttgctatctggcgaaaatcgcattatgtaaccgtattttttcccttccgacttttgaattttcctgagttacaagtacttaatgctataatacgcacccgattcacttgaacggtggcctccgtggcataattgttggttttcgaaacacctgcttgggctgcattctggaataaaccgaaaaacgacgatgaatatctcccattcctgatgatatcgatgctgctgttgttgttgttgttgctaagtatccgacatccgctgatgatgatgttgttgttgttgttgttatggcaacgcttttagtgttttcattatcgaatggatttgttcaattgcatttttagtgacaacaattagaaatgttagtgggtgcaaagcgggattgggattacgtactttttgcagttgcttaacaataatgggcaattcgctaacgcgtgacagagtacgcaacattttcgctgtgttattctcgttcgactgacagaaattggatgtgaatgggggctttctatatgcggattgtccggatctagaatcgcacgctatatatctggtgtctcagtcgcaccgccgcgcgtcgttgtaagttaaacaatcggaaaaaaaggtagcgagattagtttatcaactactatattgcacaactataacaaccgtttggcgttatagcgaaaaataacgcaccacttggcctattagtgtgaccctaaataaaatactgcagctttccctgttttcaaaaaatactaaattagcttatcgaactttctttttcaatataacttgaaatataaatgtttacgtaaaatattcaataagcttttatataatgtgtcacacaatgttatatcaaaataatagtagtgtttggcggttattgaaatactcgaataaatacttactcaatcacattttatattactttgccgcccaaataaaacgagggttttcaaagaagtacttttatttcacattgaagatctcatttggtttttgtttgctttctcatttcttactcgtattgttacttgaaattgcctccataaatccacatttgcgattgcagttgcaattgcaatactgctctatatcgcactcagctcacataattcactaatctcttacaaaaacttaagtaatgtttgttccttgcacaaaaaaccagttaaatagaaataggtaaagtagaattaaacagttaaattcaaataaacgctttacaaactaagattttaaactagtttttgtatttgttggtttctcggtttgttgtttcatttttttttttttgctttagaaatggcagctaaaagatttgagtttaaaagttactaacggaaaatgaggaaatggatcgatcgtttgggaaaaactaagcgaatgaaataaattttttactttcttttatctatcttttgctctgttaccgttacacatattcaatttttcgcgcgtttttctgttacatcaaaaattggtttctcacacaaatattttgcattatgacaaaaaattatgctttgctttgttttttgttttgtttcatatgtatacatgtacatgtatatatatatatatttgtatgtataaacacttattagaagtcctgttgtgtttttgtttcctttcccgttagaaatccggcattccgattataagaa

SEQ ID NO: 15404 - DNA, 1751 bp, DROSOPHILA
ccaaacggttgttatagttgtgcaatatagtagttgataaactaatctcgctacctttttttccgattgtttaacttacaacgacgcgcggcggtgcgactgagacaccagatatatagcgtgcgattctagatccggacaatccgcatatagaaagcccccattcacatccaatttctgtcagtcgaacgagaataacacagcgaaaatgttgcgtactctgtcacgcgttagcgaattgcccattattgttaagcaactgcaaaaaaatgcagcccaagcaggtgtttcgaaaaccaacaattatgccacggaggccaccgttcaagtgaatcggcccttcaagctgcaccgcctggacgaaggacccgccacggaagtgaagctgaccaaggatcaggccctcaagtactacacacagatgcagacgatccgtcggttggagacggccgccggtaatctgtacaaggagaagatcattcgcggcttctgtcatctgtattccggccaggaggcatgcgccgttggcatgaaggcggcgatgcgggatgtggacaacatcatctcggcgtaccgtgtccacggatggacctacctgatgggcgtctcacccagcggcgtactggctgagctcaccggtgtccagggtggctgtgcccgcggcaagggtggctccatgcacatgtacgcaccgaacttctacggaggcaatggcatcgtgggtgctcaagttcctttgggtgccggcgttggcttggcctgcaagtacaagggcaatggcggcatgtgcctggccctctacggtgatggtgccgccaatcaaggacaggtgttcgaggcttacaacatggcctacctgtggaaactgcctgtgatctttgtctgcgagaacaacaactacggaatgggcaccagttctgagcgtgcttcctgcaacactgattactatacccgcggcgacgctctgcccggaatctgggtggacggcatggatgtgctggccgtgcgcagcgccaccgagttcgccatcaactatgtgaacactcacggacctttggtgatggagacgaacacgtaccgatactctggacactccatgtccgatccgggcacatcgtaccgcacacgcgaggagatccaggaggtgcgccagaagcgtgatcccatcacctccttcaaggagctgtgcatcgagctgggtctgattaccaccgatgaagttaaggccatcgatctgaaggtacgcaaggaggtcgacgaggccaccgccttcgccaagtccgatgccgagctgggcgtgagccacctctggacggacgtgtactccaacaatctggagcccaagctgcgcggcaccatcgcctacgatattgatcacatccaggagcgcaagggcgtcaatcactaagtcatcgggccaacgaatctgattcgggaactcacaagaaccttaaacgaaacaagaaaaccgaacagcaaacacaaatcactgacagacagacaagaagacacaataactcagaaacttggacacaagcgaaatctctagatcataagccgaaagttgaacgatgagaaccccgtagaacggaacggatccgaagagacccacaaaaagcttagctaatcggagcactccaaccacacatcgtagcgcaccacataactctggggtactgcattggatattatattgcgaacgtgttcaataaggataaagcgaggtgtaaattgttgaaaatataaaaatc

SEQ ID NO: 15405 - protein, 399 aa, DROSOPHILA
MLRTLSRVSELPIIVKQLQKNAAQAGVSKTNNYATEATVQVNRPFKLHRLDEGPATEVKLTKDQALKYYTQMQTIRRLETAAGNLYKEKIIRGFCHLYSGQEACAVGMKAAMRDVDNIISAYRVHGWTYLMGVSPSGVLAELTGVQGGCARGKGGSMHMYAPNFYGGNGIVGAQVPLGAGVGLACKYKGNGGMCLALYGDGAANQGQVFEAYNMAYLWKLPVIFVCENNNYGMGTSSERASCNTDYYTRGDALPGIWVDGMDVLAVRSATEFAINYVNTHGPLVMETNTYRYSGHSMSDPGTSYRTREEIQEVRQKRDPITSFKELCIELGLITTDEVKAIDLKVRKEVDEATAFAKSDAELGVSHLWTDVYSNNLEPKLRGTIAYDIDHIQERKGVNH

SEQ ID NO: 15406 - DNA, 4996 bp, DROSOPHILA
gcagtcagtcgtgtttgtggccaaatctggtttttctgagatcttagcacctgactgccagtggtaacccccggcgactagaaacctccgaaagacaacaaaagattataatgacaaaaaaaaaaaaaaaaacagaagcatctacctgctgctgcaatgaatggaaattttctccctaaaaaaagtcccgggtattaatacactcggttcgggtccaaaaatcagggtaactttccactcatttgttccaaaatatcacagatacccgatacataaatacacaacgaacaacgggctcacgtgttgagcgaatgctccctaaaatgccgagccagccaaataattacggactaatacgaaaagaatttacaacttcctttcttctcttttctgtactaattttttaactttttttcttcgattttcgttttgctgctcaatggttttttttttttgtttttgtttttgggcagtaagtgctcataagacaaaaaacgaaacacgcgatgggaacttcgctttatcgtagttttcctacattttccccctcgtcggattatcagcttcacagggcaacccgcatatcgtcgatcgtcccggtttcccaaaacaataataataataataataacaagccagattccagacccgaaacccaccaacgacccgactcaacgcgactcgaaaatagttaacaacaaacggagcgacgaagatgacgagaacaacaaagttttgaattttataaaagacaaggttcgcatcaagtacaaaacagtttcgttcgaaacgctgccgtgtgaagagccaagcgaccagaaccgatcgttcgaacaacgggcatctttcagatactatccaaatacccgacttggcacttagatttagtgtcacctggtgccatccgccggcaattataactcaagccaacttgtgttttgtgggcagtgtttgtttgtttgttttgatcagagctgctgttgccacccccgctccaaagatgaaatccaatccggcctcggatcacgtctacttcaacgacggattcaagtgctccacgatcagcatcagcaccaatctcaccgaacccaatgggagcagcaacagcgtgggatcccagggatccaaggagtttatacgtgagtctaaagtattaagacatttagccaactattgggagtgattatgaaaccaaatagaggagttaaattaaatatagtaatttgctgccgtaaaatcaatcacattgtatttgtaataaattttagatgagttcgtgtagaatgatcttttaataagtaataaaatagcttgacgggactaacaaaagccaaatacaaactgtacacatttaatagtctagcaattgcaattgatttattgtaatttttttttttttacgaattaccaaacattaaaattgtgactcaaatagctttagcaattttggctattagctggtgaattatgaactacaaaatcaaattaaattaattattttgtaggaacaagttaatgagctttcggagtcacgagagctgcccatttaagtactattacctaagctctttagtttggaagcaacttatgccacaagttacagattgatttcatagttagttatttccctgttagttgcaattaaagtaatggaattcagcgaatgtttctggcaagaaaaacgttgcatcaagtatacgcctcgtgctccccgctcggagatactcgtaaatgcaattgttttccacgttttctcagctacaaaacttttgctttggccttgacaatgaaattcacgtagatcagaatgaaaaccaaaagcaattaaaatagcagaaagcaaactgaaactaaatggaagggtgggaaccagcaaaaactcgatcgagcgtggggttctgcagtacgtgctaatgaatcagtgctgttttagccatttcatcgaatctctcttgatttccgacatatcttttgcagtcactgaagacggcaagaaggtgaagccaacagtgagcacactggactgcacacgcagttggctgcaggattgccagcggcgcaccttcaatcgcaagaccctgcacaagagactcccgatcctcggatggctccccaagtacaacagccaggatgctgtgggcgacctggtggcgggcatcacagttggtctcaccgtcataccacaggcactggcctatgcgggaatagcaggactgcccgtagccgtaagtagcacatacatatataaatattacttacaagtataaattgtaatcgacatgttcctttgggcagtatggcttgtatgcctcctttgtgggctgctttgtgtacatattcctgggcagctgcaaggatgtacccatggggccatctgcgattgtggccctgcttacttatcaggctgctcaaggatcttggcagaaatcggtgttgctctgcctgctcagtggaattgtggagctgctgatgggcctcttcggactgggcttcctgattgacttcgtctccggaccagtttcctcgggcttcacctccgccgtctcgctgatcatcctcacctcgcagatccaaagtgtgctgggcatcacggccaagggcaacaccttcgtggagatctggacgcaagtcttccacaacatcgagcacacaagggcaggagacacggtactagggctaacctgcattgtcatcctgctgttgatgcgcagtctgtcttcctgtcgaattggaccagtcgacgagaaggaatgctcatccttccagcgggctgtgaacaagatcctttggatcgtgggtactgctcgaaatgccattctggtggtcgtttgctgcatcatgggctatatgctccacaccgaggagcacggagctccgtttcgagtggtgggagagataccacccgggctccccagcatccagttgccacccacatcgttgactgccaatgaaaccagcaatggagtggccgagggattcgtggaaatggttcacagcatgggttccggcttggtggtgattcccttgatctcgctcatggaaaacatagccatctgcaaagcgtttggtgagtcttaagctctatctttccctatatggttccctataataatagttgatcctttcagccaatggcaagccagtggatgcctcgcaggaattgattgccattggaacggccaacatcttcaactcttttgtccaagcctttccgggcactggagcccttagtcgtggagcagtcaataatgccagtggtgtccgtactcccctgagcaatatttactccggtggcctggtcatgattgccctgctcttcctcacgccctacttctacttcattccacgccctaccctggcagccatcattatatccgccgtggtcttcatgattgaagtaaaggtggtcaagcccatgtggagatcgaagagtaagtcatacaaaatatggagatagtggtcatttgttcatctcactttaataacccattagaaagtgatctggtgcctggagttggaacctttgtggcctgccttgtcttgccgctggagtggggcatcctcattggagtgggactcaatgtcatctttatcctctaccatgctgcgcgtcccaagctgagcaccgagctactgaccacacagtcgggtgtggagtactcaatgatcacgccagatcgatgcctgatcttcccgtctgtggattatgtgaggaatctggtcaacaagcagtccattaggcaaaatgtcccagtggtcatagatgcgtcgcatgtctacggggctgacttcacaacggccacggttatagactcgctgatcagtgatttcaatcagcgaggacaactgctcttcttctacaacctcaaaccgagtatctgctccattttcgagcacgtgtcggcggcccagttcgtggtctactaccaggagcagcagttggatgagctgctcaaggagcgcaactatgtgcagaagcggctcgagacggcctaactggcttattctcctcaacacgtgatacaaataatttagcctaagtgtttgctttaattatttatggcgttgtaaatagattgtaaactaattgtgtagtattatccagagcacacaactattagaaattgtaaggtgaacaaataagtgtatttcttaattacgtaataataacaaacaaaaataatttatcttgtttatttcatgaaagagtaaaagtcagtgagattggttaactcaaatcaattaaaactattattcagttttgtttatcagatatatttgattttgaatttaaatacttgggcaatatacaacacttgataatggcgctatacagcactcttaagctatcgataaaagctatagatagaccgatatattcagtgctgttagccgtccctactcaacactgaaacatttctcacgtgtaaagttgagcagtttgttttcctcttttttccgcttaatttaacttaaaatgaaacgcctgagcgacgaacgtgccaagatcttgttcgagcacctgtccaaatagtgagtacccaaaacagatcatcgcaatgcagctaacaagtgctcttacagcattggcacaaatgtgaagcatttgattgaccggccagatggaacatattgctttcgggagcacaaggatcgggtctactacgtctcggagcggattttgaagctgagcgagtgcttcggctacaagcagctggtgtgcgtgggcacctgcttcggcaagttctccaagaccaacaaactgaagttccatatcacggccctctactacttggcgccctacgcccagtacaaggtgtgggtgaagccctccttcgagcagcagtttctctacggcaaccacatacccaaaacaggactgggtcgcatcacggagaacgccggccagtaccagggcgtggtggtctactccatgaacgacctgcctctgggcttcggcgtactggcgcgttccacaacggactgcaagaccgcc

SEQ ID NO: 15407 - DNA, 1965 bp, DROSOPHILA
atgaaatccaatccggcctcggatcacgtctacttcaacgacggattcaagtgctccacgatcagcatcagcaccaatctcaccgaacccaatgggagcagcaacagcgtgggatcccagggatccaaggagtttatactcactgaagacggcaagaaggtgaagccaacagtgagcacactggactgcacacgcagttggctgcaggattgccagcggcgcaccttcaatcgcaagaccctgcacaagagactcccgatcctcggatggctccccaagtacaacagccaggatgctgtgggcgacctggtggcgggcatcacagttggtctcaccgtcataccacaggcactggcctatgcgggaatagcaggactgcccgtagcctatggcttgtatgcctcctttgtgggctgctttgtgtacatattcctgggcagctgcaaggatgtacccatggggccatctgcgattgtggccctgcttacttatcaggctgctcaaggatcttggcagaaatcggtgttgctctgcctgctcagtggaattgtggagctgctgatgggcctcttcggactgggcttcctgattgacttcgtctccggaccagtttcctcgggcttcacctccgccgtctcgctgatcatcctcacctcgcagatccaaagtgtgctgggcatcacggccaagggcaacaccttcgtggagatctggacgcaagtcttccacaacatcgagcacacaagggcaggagacacggtactagggctaacctgcattgtcatcctgctgttgatgcgcagtctgtcttcctgtcgaattggaccagtcgacgagaaggaatgctcatccttccagcgggctgtgaacaagatcctttggatcgtgggtactgctcgaaatgccattctggtggtcgtttgctgcatcatgggctatatgctccacaccgaggagcacggagctccgtttcgagtggtgggagagataccacccgggctccccagcatccagttgccacccacatcgttgactgccaatgaaaccagcaatggagtggccgagggattcgtggaaatggttcacagcatgggttccggcttggtggtgattcccttgatctcgctcatggaaaacatagccatctgcaaagcgtttgccaatggcaagccagtggatgcctcgcaggaattgattgccattggaacggccaacatcttcaactcttttgtccaagcctttccgggcactggagcccttagtcgtggagcagtcaataatgccagtggtgtccgtactcccctgagcaatatttactccggtggcctggtcatgattgccctgctcttcctcacgccctacttctacttcattccacgccctaccctggcagccatcattatatccgccgtggtcttcatgattgaagtaaaggtggtcaagcccatgtggagatcgaagaaaagtgatctggtgcctggagttggaacctttgtggcctgccttgtcttgccgctggagtggggcatcctcattggagtgggactcaatgtcatctttatcctctaccatgctgcgcgtcccaagctgagcaccgagctactgaccacacagtcgggtgtggagtactcaatgatcacgccagatcgatgcctgatcttcccgtctgtggattatgtgaggaatctggtcaacaagcagtccattaggcaaaatgtcccagtggtcatagatgcgtcgcatgtctacggggctgacttcacaacggccacggttatagactcgctgatcagtgatttcaatcagcgaggacaactgctcttcttctacaacctcaaaccgagtatctgctccattttcgagcacgtgtcggcggcccagttcgtggtctactaccaggagcagcagttggatgagctgctcaaggagcgcaactatgtgcagaagcggctcgagacggcctaa

SEQ ID NO: 15408 - protein, 654 aa, DROSOPHILA
MKSNPASDHVYFNDGFKCSTISISTNLTEPNGSSNSVGSQGSKEFILTEDGKKVKPTVSTLDCTRSWLQDCQRRTFNRKTLHKRLPILGWLPKYNSQDAVGDLVAGITVGLTVIPQALAYAGIAGLPVAYGLYASFVGCFVYIFLGSCKDVPMGPSAIVALLTYQAAQGSWQKSVLLCLLSGIVELLMGLFGLGFLIDFVSGPVSSGFTSAVSLIILTSQIQSVLGITAKGNTFVEIWTQVFHNIEHTRAGDTVLGLTCIVILLLMRSLSSCRIGPVDEKECSSFQRAVNKILWIVGTARNAILVVVCCIMGYMLHTEEHGAPFRVVGEIPPGLPSIQLPPTSLTANETSNGVAEGFVEMVHSMGSGLVVIPLISLMENIAICKAFANGKPVDASQELIAIGTANIFNSFVQAFPGTGALSRGAVNNASGVRTPLSNIYSGGLVMIALLFLTPYFYFIPRPTLAAIIISAVVFMIEVKVVKPMWRSKKSDLVPGVGTFVACLVLPLEWGILIGVGLNVIFILYHAARPKLSTELLTTQSGVEYSMITPDRCLIFPSVDYVRNLVNKQSIRQNVPVVIDASHVYGADFTTATVIDSLISDFNQRGQLLFFYNLKPSICSIFEHVSAAQFVVYYQEQQLDELLKERNYVQKRLETA

SEQ ID NO: 15409 - DNA, 4634 bp, DROSOPHILA
tagtccgcttctttgaaaggggtttgtggggtgtgggggttgcaacccctaaaagctaagcattagctgcgcgggctgtcgaaacttgtggttcctttcaattaacctttcatctgtttaacatgtattataaaattagacgcggtctcctggaccacagcagcagcagtgggttaaggcgtctgagtgggggggtggtgttattgccgatggtgggcaatggcggcctaatgtatgcacaaccacaaccccaagacatgacaacactattaaacattattcgtggccatgggaaaggacggccaagcggaggtcctaattgtcgccgggccaacgcggcgtatgcgcaatcaatggggtaaagctccggctaatgaaggatgaaatcaaaaaatcgcctaagtaaaagttaaagcttatataaatgtaaggcttgacattggatttttttaaatcattgcttatagtcagtgagggtattttgtattcgttaataaacagtaaatgtaaagtgtgtatcaaaatcaataccaccagacgaatcaaattttgggaactataagagctaaattttaacattaaataatcatgcagtttcagcaaaactttgcttaaaataaaaacatttttataacctttataattttaaattgtatttttttgaaatgtaataattggcatgcatgttgctattgtaatgcaatgtaagatctaatcataagtttctatgttaataagataagcacttaaataagcgttttatattgtgtcaatggcatttacctcttataaacggataaaatagttttaagatttcttgatgtggcccatttatttttaaaactgcatacttatctacaattactgcatctcgcccgatttttaacatgtaaaatgcgacatgtaaagtaagagctggcatgtagatacggatacgataacagtcaatcgaaccgaaccacagcgaacatctgtttggccgtaccattgcggcgtactggcaacgccaatttcaacacgtcacctgtcttgtgcaaaaacgatgtaatatttattgtttacgtctgcatttcgtctgttttgttccttttacgtgttcacgatgaagttcgccgacgtgctgcgtcgcctggacgcctatccccgcacactggatgacttcagcgttcgcacagtgggcggcgccgcaggtgggtgcaggtgtacaattgattgtggcgttaaggaacccaaacaaccggcttttctctgattttcagttacaattatcagtaccagcatcataagcctactgatcttcctcgaggtcctcaactacatgcagccaaccctaaatgaagagctcttcgtggacaccactcgtgatcacaagttgagaataaatctggacgtgacactgcataatctggcgtgcaactacatctcattggacgcaatggattcatctggcgacacacacttgagggtggaccacgacgtctttaagcaccggctggatctcaatggcgagcccctcaaggagacgcccatcaaggaaatcgttgcagtttcgccgcccaataagaatgtcacttgcggcagttgttacggagcggagcacaatgctactcagtaagatagtgaacagcttctaagttcaaccattagttccacctattttcgctgacaagatttatctaaggagatatctgtatctagagctaattatagcaatggctttctaatctcccccttttaataccaactaccatcctatctagctgctgcaacacgtgcgaggatgttctcgacgcctaccggctgcgcaaatggaccgtggccgtggacaagatcgagcaatgtaagggcaagtacaaacgcagcgacgaggacgccttcaaggagggctgtcgcatccagggtcacctggaagtgaatcgaatggccggcagctttcactttgcgcccggcaagagcttctccatccgccagttccacatccatgactttcagttcagcaatgtgaagctatcgcacacaatcaatcacctatcgttcggcgagaagatagagttcgccaagacgcatcccttggatggactacgagtcgacgtggctggtgagtagtgaacacaaacacggactcgtaattctgtaacatctctattgcaataacttagcgtaatttaaacaagattggagtagggcttaaggttgtggttgtttagtaactctagtcaaatgccagcaggatcagcagcgaatccccgtgccgatggccataaaggtgccaaaggttccgccgccctggaccatggtcttgcccacgttgttgatcagctcccgcccgcgtagtccgtatctaaagtgtatttcaatgtggttcgttagttagccggagtaattacataattgccggcctccacttgcgtcacttctttggaggagcgctaagtggagcatccgagtgcaaagtccaactaacctgagcgccgagaacccgccaaagaccgcaccgctggccatgcccacgcagaatccgatgatgaagcccgtcttcatcttatcgaagcacgttggtccctgctgggaaaatgagctcgtaggcagaggcatgccgctaagtccgtggttttcctggttcaccggctctatatgagttgataccgctgagtagcaagctccgctgctccgacgcacttatgaatctcgcagaaggttcgtttattttaggaatattcaaaatatttctatttatttcggcaccgactagtcgaataattcgtaaacgtgtgagtgtgagcagctgagtgatggtgtgcgtgagctgtcaaattatagaagggttgccactttgtttttcgctcggcttgcctcgttctagagaaagccgatagggggcggtagctaaaaagcgggtgctttaaaatcaatttatattctttatttattaatattattaaaaagcatacttaagactgaaataaaaaaaaactaagttatttaagcacaggcatccattttaatttatattttactcctcgaagaatttctgggaaacttcggaggtctgttgtgtggggcattttcattttttaaattggaaaaaatatactcatttgttcgaattgtgaaatacctgtttttagaagcatgaagtttaattcgtaattaccttaccaaattaaatacatttatcaacgacaaatgaagtaaactagaaaatctgctctcctctttttgcagaaaccaaaagtgaaatgttcaattactatttaaaaattgttcccacattatatatgcgaggaaacagcgacggcgagcccatatacacgaatcaattctccgtcacgcgataccgaaaagatctttcagatcgcgagcgcggaatgccggggatattcttcagctacgagctctcgccactgatggtgaaatatgcggagagacacaggtcagtaagccacaaagctaatggttaattttacaagttttattggttgtgttgtgtattcccagctcatttggccacttcgccacgaattgctgttccatcatcggaggcgtgttcacggtggccggcattctcgccgtgctgctgaacaactcgtgggaggccattcaacggaaactggaagtcggcaagctcagctaacaacaattcgaatctcttatgcagctttactacgcctaactcaatatacattcgacaaatctccaaataaaagtgcttaattttatagaaaataaggatagagctgttctcttaagtggtccgctgtcccactgacatgaatccggatgtgtttgaaaagtatttggcattggcctccgtctgcgaacgctccgccgcctgcggattcacaatctctagaccttgcagtggcgtaaaggccacactggatgccgttccggagatttggcgtttgaccgtggtgttgccgccgtacacctgctgtttctgcagattcttgtgcaacgttttgctaatgcgcaccttggtcttctcatccacctggggcaatcggatgcggccggtgccagttttgccgatggtgccgcgtgaatagcccagatctccttggtaggcatcctcttcgatctgaaagaaaagttcaaagattaatacataaccattatatttttaagccagaaacttacgtctccgaaattcatgcggttcgcttgcttgcggaactctgtcagcgcatatcgttccttcatcttgcgcacgcgtttgcctcctcgcttcttcttgcttccctcgatgggtttgggcagcggctttatgaacttcaccggcggcggctcctgcagcttgtccagcttcttttccacatcctccttgaagcgcagtccaatctccccgtggacactctcatgacaggcatcaacacgagcagccagcacggacttggcggccaccaagcgagctgccttgcgtcgcagatctggcgcagtatcctgcacaatctgtgagtagtacacatagccagtgtgcggcaacatctgcgtttgtgagaagcccgagagggttttcttttgtgcacccaacacctgaacattgcaggccggcattttggataatttggaaaggccaccagcaatgcccaagagtttagccgccgtcgatgctccaacaatcatggaaagat

SEQ ID NO: 15410 - DNA, 1224 bp, DROSOPHILA
gcaacgccaatttcaacacgtcacctgtcttgtgcaaaaacgatgtaatatttattgtttacgtctgcatttcgtctgttttgttccttttacgtgttcacgatgaagttcgccgacgtgctgcgtcgcctggacgcctatccccgcacactggatgacttcagcgttcgcacagtgggcggcgccgcagttacaattatcagtaccagcatcataagcctactgatcttcctcgaggtcctcaactacatgcagccaaccctaaatgaagagctcttcgtggacaccactcgtgatcacaagttgagaataaatctggacgtgacactgcataatctggcgtgcaactacatctcattggacgcaatggattcatctggcgacacacacttgagggtggaccacgacgtctttaagcaccggctggatctcaatggcgagcccctcaaggagacgcccatcaaggaaatcgttgcagtttcgccgcccaataagaatgtcacttgcggcagttgttacggagcggagcacaatgctactcactgctgcaacacgtgcgaggatgttctcgacgcctaccggctgcgcaaatggaccgtggccgtggacaagatcgagcaatgtaagggcaagtacaaacgcagcgacgaggacgccttcaaggagggctgtcgcatccagggtcacctggaagtgaatcgaatggccggcagctttcactttgcgcccggcaagagcttctccatccgccagttccacatccatgactttcagttcagcaatgtgaagctatcgcacacaatcaatcacctatcgttcggcgagaagatagagttcgccaagacgcatcccttggatggactacgagtcgacgtggctgaaaccaaaagtgaaatgttcaattactatttaaaaattgttcccacattatatatgcgaggaaacagcgacggcgagcccatatacacgaatcaattctccgtcacgcgataccgaaaagatctttcagatcgcgagcgcggaatgccggggatattcttcagctacgagctctcgccactgatggtgaaatatgcggagagacacagctcatttggccacttcgccacgaattgctgttccatcatcggaggcgtgttcacggtggccggcattctcgccgtgctgctgaacaactcgtgggaggccattcaacggaaactggaagtcggcaagctcagctaa

SEQ ID NO: 15411 - protein, 373 aa, DROSOPHILA
MKFADVLRRLDAYPRTLDDFSVRTVGGAAVTIISTSIISLLIFLEVLNYMQPTLNEELFVDTTRDHKLRINLDVTLHNLACNYISLDAMDSSGDTHLRVDHDVFKHRLDLNGEPLKETPIKEIVAVSPPNKNVTCGSCYGAEHNATHCCNTCEDVLDAYRLRKWTVAVDKIEQCKGKYKRSDEDAFKEGCRIQGHLEVNRMAGSFHFAPGKSFSIRQFHIHDFQFSNVKLSHTINHLSFGEKIEFAKTHPLDGLRVDVAETKSEMFNYYLKIVPTLYMRGNSDGEPIYTNQFSVTRYRKDLSDRERGMPGIFFSYELSPLMVKYAERHSSFGHFATNCCSIIGGVFTVAGILAVLLNNSWEAIQRKLEVGKLS

SEQ ID NO: 15412 - DNA, 6842 bp, DROSOPHILA
cttcgatgaccagttaaagctggctagcgtcgagttgggcgatttctcggacgatgacctggcgctccttgacaaatgcgcccaatattattcacttttgcacattcacgacatcaatctgaactacttgcgcgacttctattgtgccaagaagagggaatgcatagaaaaccggcagaccacagtgcagcaacgcgtagagctgcagcgcatcctctcgtccatcgaggaggcgactagggacgtagttatgttggagaggtattggtgaacaaatccctttaatagttgaatccctgaccaaaaccattcttctgcagatttaatgctgctgcggaagagcggctcatcccggatatcgtcgtaatgcagcgaaacgcccaacagcttgcaacaaaacaggccttactggaccggcaaaaaacccttaagatcccaaaggattttagcattgaaagtgtcatcgagaaggtagattcgctggagcagcgctaaagaagtgaattgctttcgtttttaaaaaattatttaattgtatttactcagtaatgcaaaacactttacaaaaacataaaatctgcaaattttaaagatgaatgttgaggtttacaacttggaacactacacaatcagagggtgcacttattttggttattgtacgcattttaaaaacgttccaattgttgctaggttgtgtcaaatatttatttaaagtatcatgataggaaaactagaagaccaaataataatttgccagctgcttaaagcatacaaaaagtgtaccgtgttcttccatgccattgctcatatgtatgtatttgtgtatttccaatgtggtatatgtatcatatatattggtgtatagatagaattagtaatttcatattctttaagttcttgcttgttgttatgtatataaagggcgggtatgtggcagacaatcttttcggctagcaacgcgctccacgccacaggcctactccacgtttccgggcatcttttagcggaactcgggcgcatcatcttgcgttatgtcaccgtacttccagatggccagatgcgcgacccgagctgcttcctgcgcggctttgtactggtccactagttccttgagcttccgctctccacgctgttcggccagaacaaggccctcggctacaagctgctttccaaaatcgactttagtagttggatcgcgaagagtggccaagttcggcgacccagtcacctttagctcgacattgagttgaaccttatggttcaaaacgtcttcggaaaaggcacgcaaggcttcttccttatcttcgttgtcagttggcagggcgactaaggccaaagcatactccgtagcgtagggcttttcgctgctgaaggctggtggcagggctgccaaacggttggtcggaagtgtctaaaaatggaaacgagtgttaatactgccaggaaaaaatcacaatggttttggtatgagtgtgtcgcaactcgaatacttttgaagcgtggttctggcgcccccagctactcagtgctcttgtttctcgcgtattttaaacctgctactttggacaatggttgacccaaaaaatatggaactacctttgcaccgttgaagaggatgccacacgacttgaaacggcgaacgcatttaacgcagctgtagggtttgcttacgccatcacgaatcttataaaatcattcgatgaagcctatttaatgtggcaagcttatgactcatgcgtttcacttcaagccggaaacggatctaaggaacttgcagtaatttaaatgttagtcaaagcgacacttacctccttgtttccataatcgatgtacaggactgtagcattactgccctgcacgcgttccaccttggcacgataccactgattatcaagtgtaaactgagcggccaccaggtcaccacgctttggcgtgtacgatccagcgatgggtgggttggactggaaatcggcgtgaagtttgctcataagcgactctagcttggatccgctctccacagattgcgcgaagaatgtcagagtttcggtgatctcagtgacaataacgttttcgtagttgactttacgctccgccactaccttgtcctccttttcttcctcggtgacagttttttctttaggcacttcttctacgtagtttgtccagatgttctttttggcggccttggcacggtcttcagcaatcttcaactggcggtagtattcagatttttcagcactaaagtgcacttcagcaagaccctcttcgacaagagcaactgacaagttggcgccgctgtccgtccagagccaaccaatcactgaagatcctgccttgtcggtggtatcgatatgaacagaaacgtcgcgttgcaagacacgctccctggtaaaggtcaaagcctcgtcgccaaatggttccccctcttgggcaggaacgccattaagcgctggacgagaggaacgcggacatgaaatcccagcaagcaggaatgttaccaggcaactgtccttcggtacaaagattcggaggcgggatccgctggcgacaaactctacaatggcttcagtacgcaaagcacgctgccacgatggcaagtattgaactttaattcgggaatgatcaacagtcaggtcgttaacacgcagtgtggcgttatccttctttgcgtgcagtccctttagtcccttgatggcttgctgttcggcggcaatcaattgatcataggcggaagatctctgatcgtcgtcctggcgatagcgaacacatgttgccaaacctttggctaccattgcctcagccacgttctgaccgccaatagagacggtatagcagtatttctcagggaagttttcgcgcggcggtgagatgtagtccaggttgcattgaacttttttattaattagttttttacgcagaaactcacgggcatcgaacatgtgtggaatttcgtaaagtggtctgtagttttttccgcgtggtggtgccttgacgatttcctcgccatcggtgccaacaaccgcgcgttggtcacgcggcggcctgatagacgagaagaaaaccttctttacttgtccattggaaagacgtacattaatagcatcgccattgaagacttccaccactgttccagagaagtctttctccttcgagttgaaagcaggagttttagcttggtagtcctgccattggcgaagacgcttctccttggcaaaacgctccgcagcccgcagtttatcggtgcctgaagagaaaagcgaattagtcagagttgaaatacgaaaaattgttaataaaatgcaatgtcgtcggggtgaaatgaacgcagcgacaataatcagtcgcaaagttcttggaatccgtcgtttttctggcagccgattgcaaacagtaaacagcacgacgataggttatttaccaatttggtgctgtgctgtgcaagcgagctgcgaacttaacttgattctggtcttacctgtcttcataacagccattgaccagtccacacacttggcaagtccctctcgcaggagtgattctgcaatgtttcccttgggatacagaatagttccaatgaagttagagttgttaaccgattccagtcggatttccacatcgcgttgcaacaggcgggtttccacatagtagcgagcttcgtcagcaaaaggcacctttacactgaggtcgggcttgccatcagcatctaatttcactcctggacaacggatgcccgaaatcattagcgttatgtagtggaagtccggcagcaagaatgctcggaccgtggatccatcgcgcacgtgctcgatgatcgccttcacggggtttcctccgtagatgtcgaccaggtgtgcgggattctcatgggaccacttgatgttgcgaaccttgtcggcggcacttgcggtgggcgaccattttccgcggcctgctgcacgcgcctggtcctccaactcgatgagtgtttgctgctcggctgtgggacgtccctctcgacggaccgacaccaggccctctcggacaatcgactcgaccacattttcaccggtttccttgtccttaccgatccacacaaaaccgtactcccggttcgagttggctggcttgtcaaacgtgaaagtcacctccacacctatcaactttttacgcaagaattcccgcgactcccaagcccagggctcgtccttggtctcgtctccgccagcgccaggacgacgggccaacttcggggcaaggacatgcgagaaagtaatttgtttctccggaggcggggcacccttagttgcgcgaataactaccgtatcgccggagagaacctgaatcagagcgaggagtgaggttaaaataaaatgcacgtgtggggtcactagaggtggaatagtatcgattgcccttttggatctgggtcctaagcgaccaaacacactatcgatatatgtaatattttagatcggctcacgtaaaaaggaaaactactttctagctgttttgatattatttacatataaaaatgaactctgctgagcaaggacgtgctatttaactaacataacagttcctcatagacagcgcctgcgcacaaatcttcttggtttgtcctatggaaaatgcgagcaacggtattttattgaatttattcgtactgcaaatgcattccgttaatccaactgaaaacaaaattgttgccaaaccggtttagggtgcccaaaacggaggcaacgtgcaagagtgcagctcaaatctcttctagatacaaaaaatcgacataaaaagaaaataatggtcttgtaattgggagcaaataccaaatgtccaagggaaaacatgcaaggtgttactgataagggcgtcagatattacctgtaaaagcaacaggtttttttgaaaatgggaatcatccaaatgcaaggttgaatgaatttcgggatgttttctttggttgcagggtgccaacgtcaccaaatcagattacgcctgtaaatctctacagccgctggaaactcagttgttatcagagtcgttggataaagtgctgactgaaaacagccggtaatctttgggcgctggtcacaaagccacccagaagtaaaagtatatgatgaactacccactcccagggacaattatcagcattgggcgccggacacggtctccgtatacgccaaggaggttagaaacgaaccgttcggcacacaaatcagttctcagcaagtgtgtgggcgggcgaaaaaaactacagctttgcaatagatggtttataatgccggtaaatggggccgtactagttagctgtccctctgtgacaacaacagccagaacatctaccgccaaagacaccgcgtcgaagaaaatctgccagcttggcacctacgataactttcatttctttggatcggacagcgtgtgcaacgtgtcacacacgcacagagtctatacgcgtctcactcgcacttgtcagagttgcactagagctgctttggtaggcgctgccgcgtttgccacgccgataggaggatagtacctcttagtttggacgaactttcttttcaaggagtctgcgcactgaaatcctagccacgagtttcatcccagagccgcagaccaatccgacttacctgctttacaatgccggacaacgactttgtaggcgctggcggggcgtctttagctgctccggcagctgtcgcggtgttcgctgctgttgccatttttttattgaatgcgggggagatactagcagagggccgtggcactaggcttcaatagcggaatattgcgttgattgcgtttcggagctaaacaccgctttcaacctaatgaagtttgaccaagagaagaaccgctctcaaaatctaaaaaattttcactgaagtgacactgctagctagagctgagaagtcagcgcgatagcatcgatattttcgtgacacgcttgtcatccgataggtagtgctaaacatttttcttaattgccaacttaatttacaaaaaatatgaatgacggtaaaattgagagggatttgggatcctttatattgggaatttttatatattcatatttattttaattgtatttatgcgtaatttatcagacgaactttggaatttccaataattctagatttttttgtttcatttcaaaactaattttaattcgcttaacgagtgcatatctatattatgtttactttaaatttatctgtgggggcagccttagatgttcacattgcaggccatagtgtcgatagatccaggcgccaaaagagtatcgctatcgataaatggtcgccagctgttcggcgaatgttacgtgatttcctatttgtaacattgctaaaaatcgagtaaaatgaatcaagccgatgtaacaaagctcatgtcacagctgcgtatagcggtcaggcccaacaagcgccatctgaagaatgtcgatggcccggaaggtcggctgctgaagctgcgtaagaccgtcactgcgttggtgaagcacgagcgtattgaactgttctacaaccgtgccgatgaagctcgtggctacgccgaactggtaagagaccaccggcgatacgccaaaggctggaatccaaataaagtttcctcccctcgcagctcatttccaatgccatacgccatggggaccgacaccaagccaccatggaactggcggactattggctgctggaaaagcaactggttcataagctcttcaaggtgctggtaccgcgctatgagacttacaatgtgtcctacactcgcatgtacaaagcccctcgggagtatcctggcatttactacaggcggtctgtgctggagcttcggggcaatccctacccttcgctggc

SEQ ID NO: 15413 - DNA, 2915 bp, DROSOPHILA
cggttcttctcttggtcaaacttcattaggttgaaagcggtgtttagctccgaaacgcaatcaacgcaatattccgctattgaagcctagtgccacggccctctgctagtatctcccccgcattcaataaaaaaatggcaacagcagcgaacaccgcgacagctgccggagcagctaaagacgccccgccagcgcctacaaagtcgttgtccggcattgtaaagcaggttctctccggcgatacggtagttattcgcgcaactaagggtgccccgcctccggagaaacaaattactttctcgcatgtccttgccccgaagttggcccgtcgtcctggcgctggcggagacgagaccaaggacgagccctgggcttgggagtcgcgggaattcttgcgtaaaaagttgataggtgtggaggtgactttcacgtttgacaagccagccaactcgaaccgggagtacggttttgtgtggatcggtaaggacaaggaaaccggtgaaaatgtggtcgagtcgattgtccgagagggcctggtgtcggtccgtcgagagggacgtcccacagccgagcagcaaacactcatcgagttggaggaccaggcgcgtgcagcaggccgcggaaaatggtcgcccaccgcaagtgccgccgacaaggttcgcaacatcaagtggtcccatgagaatcccgcacacctggtcgacatctacggaggaaaccccgtgaaggcgatcatcgagcacgtgcgcgatggatccacggtccgagcattcttgctgccggacttccactacataacgctaatgatttcgggcatccgttgtccaggagtgaaattagatgctgatggcaagcccgacctcagtgtaaaggtgccttttgctgacgaagctcgctactatgtggaaacccgcctgttgcaacgcgatgtggaaatccgactggaatcggttaacaactctaacttcattggaactattctgtatcccaagggaaacattgcagaatcactcctgcgagagggacttgccaagtgtgtggactggtcaatggctgttatgaagacaggcaccgataaactgcgggctgcggagcgttttgccaaggagaagcgtcttcgccaatggcaggactaccaagctaaaactcctgctttcaactcgaaggagaaagacttctctggaacagtggtggaagtcttcaatggcgatgctattaatgtacgtctttccaatggacaagtaaagaaggttttcttctcgtctatcaggccgccgcgtgaccaacgcgcggttgttggcaccgatggcgaggaaatcgtcaaggcaccaccacgcggaaaaaactacagaccactttacgaaattccacacatgttcgatgcccgtgagtttctgcgtaaaaaactaattaataaaaaagttcaatgcaacctggactacatctcaccgccgcgcgaaaacttccctgagaaatactgctataccgtctctattggcggtcagaacgtggctgaggcaatggtagccaaaggtttggcaacatgtgttcgctatcgccaggacgacgatcagagatcttccgcctatgatcaattgattgccgccgaacagcaagccatcaagggactaaagggactgcacgcaaagaaggataacgccacactgcgtgttaacgacctgactgttgatcattcccgaattaaagttcaatacttgccatcgtggcagcgtgctttgcgtactgaagccattgtagagtttgtcgccagcggatcccgcctccgaatctttgtaccgaaggacagttgcctggtaacattcctgcttgctgggatttcatgtccgcgttcctctcgtccagcgcttaatggcgttcctgcccaagagggggaaccatttggcgacgaggctttgacctttaccagggagcgtgtcttgcaacgcgacgtttctgttcatatcgataccaccgacaaggcaggatcttcagtgattggttggctctggacggacagcggcgccaacttgtcagttgctcttgtcgaagagggtcttgctgaagtgcactttagtgctgaaaaatctgaatactaccgccagttgaagattgctgaagaccgtgccaaggccgccaaaaagaacatctggacaaactacgtagaagaagtgcctaaagaaaaaactgtcaccgaggaagaaaaggaggacaaggtagtggcggagcgtaaagtcaactacgaaaacgttattgtcactgagatcaccgaaactctgacattcttcgcgcaatctgtggagagcggatccaagctagagtcgcttatgagcaaacttcacgccgatttccagtccaacccacccatcgctggatcgtacacgccaaagcgtggtgacctggtggccgctcagtttacacttgataatcagtggtatcgtgccaaggtggaacgcgtgcagggcagtaatgctacagtcctgtacatcgattatggaaacaaggagacacttccgaccaaccgtttggcagccctgccaccagccttcagcagcgaaaagccctacgctacggagtatgctttggccttagtcgccctgccaactgacaacgaagataaggaagaagccttgcgtgccttttccgaagacgttttgaaccataaggttcaactcaatgtcgagctaaaggtgactgggtcgccgaacttggccactcttcgcgatccaactactaaagtcgattttggaaagcagcttgtagccgagggccttgttctggccgaacagcgtggagagcggaagctcaaggaactagtggaccagtacaaagccgcgcaggaagcagctcgggtcgcgcatctggccatctggaagtacggtgacataacgcaagatgatgcgcccgagttccgctaa

SEQ ID NO: 15414 - protein, 926 aa, DROSOPHILA
MATAANTATAAGAAKDAPPAPTKSLSGIVKQVLSGDTVVIRATKGAPPPEKQITFSHVLAPKLARRPGAGGDETKDEPWAWESREFLRKKLIGVEVTFTFDKPANSNREYGFVWIGKDKETGENVVESIVREGLVSVRREGRPTAEQQTLIELEDQARAAGRGKWSPTASAADKVRNIKWSHENPAHLVDIYGGNPVKAIIEHVRDGSTVRAFLLPDFHYITLMISGIRCPGVKLDADGKPDLSVKVPFADEARYYVETRLLQRDVEIRLESVNNSNFIGTILYPKGNIAESLLREGLAKCVDWSMAVMKTGTDKLRAAERFAKEKRLRQWQDYQAKTPAFNSKEKDFSGTVVEVFNGDAINVRLSNGQVKKVFFSSIRPPRDQRAVVGTDGEEIVKAPPRGKNYRPLYEIPHMFDAREFLRKKLINKKVQCNLDYISPPRENFPEKYCYTVSIGGQNVAEAMVAKGLATCVRYRQDDDQRSSAYDQLIAAEQQAIKGLKGLHAKKDNATLRVNDLTVDHSRIKVQYLPSWQRALRTEAIVEFVASGSRLRIFVPKDSCLVTFLLAGISCPRSSRPALNGVPAQEGEPFGDEALTFTRERVLQRDVSVHIDTTDKAGSSVIGWLWTDSGANLSVALVEEGLAEVHFSAEKSEYYRQLKIAEDRAKAAKKNIWTNYVEEVPKEKTVTEEEKEDKVVAERKVNYENVIVTEITETLTFFAQSVESGSKLESLMSKLHADFQSNPPIAGSYTPKRGDLVAAQFTLDNQWYRAKVERVQGSNATVLYIDYGNKETLPTNRLAALPPAFSSEKPYATEYALALVALPTDNEDKEEALRAFSEDVLNHKVQLNVELKVTGSPNLATLRDPTTKVDFGKQLVAEGLVLAEQRGERKLKELVDQYKAAQEAARVAHLAIWKYGDITQDDAPEFR

SEQ ID NO: 15415 - DNA, 2717 bp, DROSOPHILA
taagtcatacaaaatatggagatagtggtcatttgttcatctcactttaataacccattagaaagtgatctggtgcctggagttggaacctttgtggcctgccttgtcttgccgctggagtggggcatcctcattggagtgggactcaatgtcatctttatcctctaccatgctgcgcgtcccaagctgagcaccgagctactgaccacacagtcgggtgtggagtactcaatgatcacgccagatcgatgcctgatcttcccgtctgtggattatgtgaggaatctggtcaacaagcagtccattaggcaaaatgtcccagtggtcatagatgcgtcgcatgtctacggggctgacttcacaacggccacggttatagactcgctgatcagtgatttcaatcagcgaggacaactgctcttcttctacaacctcaaaccgagtatctgctccattttcgagcacgtgtcggcggcccagttcgtggtctactaccaggagcagcagttggatgagctgctcaaggagcgcaactatgtgcagaagcggctcgagacggcctaactggcttattctcctcaacacgtgatacaaataatttagcctaagtgtttgctttaattatttatggcgttgtaaatagattgtaaactaattgtgtagtattatccagagcacacaactattagaaattgtaaggtgaacaaataagtgtatttcttaattacgtaataataacaaacaaaaataatttatcttgtttatttcatgaaagagtaaaagtcagtgagattggttaactcaaatcaattaaaactattattcagttttgtttatcagatatatttgattttgaatttaaatacttgggcaatatacaacacttgataatggcgctatacagcactcttaagctatcgataaaagctatagatagaccgatatattcagtgctgttagccgtccctactcaacactgaaacatttctcacgtgtaaagttgagcagtttgttttcctcttttttccgcttaatttaacttaaaatgaaacgcctgagcgacgaacgtgccaagatcttgttcgagcacctgtccaaatagtgagtacccaaaacagatcatcgcaatgcagctaacaagtgctcttacagcattggcacaaatgtgaagcatttgattgaccggccagatggaacatattgctttcgggagcacaaggatcgggtctactacgtctcggagcggattttgaagctgagcgagtgcttcggctacaagcagctggtgtgcgtgggcacctgcttcggcaagttctccaagaccaacaaactgaagttccatatcacggccctctactacttggcgccctacgcccagtacaaggtgtgggtgaagccctccttcgagcagcagtttctctacggcaaccacatacccaaaacaggactgggtcgcatcacggagaacgccggccagtaccagggcgtggtggtctactccatgaacgacctgcctctgggcttcggcgtactggcgcgttccacaacggactgcaagaccgccgatcccatgaccaccgtatgctttcatcagtcggatatcggcgaatatattcgcgccgaggacacgctcttttagatccatagatgctaagtttttacatgttttgtagcaataaccatgtttaggtaaataataagtatgctgaaaaacggataaactgcttttgattttatatttttaatgttaatactgataataataataattgataataaaacttacactacatttcataaattattattaaaaaaaaaaattttaaatagtgagccaatattttgtggtatattttatgcaaggtattttttgagtttgaaatagtatatacccgcattttcaatgccaatggtattttgtaccgaaacggtcacacgcaacactgcaatttctggacgcgatttcgtgggaatcttcgatggaaatgcgtctgaatgcggcttccatatggctgttaatactgtcgtatggagcaactattggtaataatcaggacgaaaacaaagtggagcttccagtagcgaccggcgtcgaaaacccgcacgcccactttttaatataggccaaataacctgagtcatctaacccgaactttctttgtccacagctcaaggagaaagaacccgcgataagatgtacgagcccattggaggagctagctgtttccgacggctgaatggcacccatcagacaggctgttcctgtgagtccattgagaatataccttgaaatcctctataattctttcttttcagcaacctactccggttccgtgggcgtactacatctaataaacgtcgaggccgacctggaatttcttcttagcagcccaccatctccaccttacgcccccatgataccacctcacctgttcacacgtaacaacctgatgcgcctaaaggaagccggaccaaagaacatttctgtggtgctgctgatcaaccgcacgaaccagatgaagcagttctcgcacgaactcaactgccccaatcagtacagcggcctgaacagcaccagtgagacctgcgacgccagcaatccagccaaaaactggaatccctggggcactggacttctgcacgaggactttccctttcctatctattacatagccgatttggatcaggtcaccaagctagagaagtgctttcaggac

SEQ ID NO: 15416 - DNA, 666 bp, DROSOPHILA
ttgagcagtttgttttcctcttttttccgcttaatttaacttaaaatgaaacgcctgagcgacgaacgtgccaagatcttgttcgagcacctgtccaaatacattggcacaaatgtgaagcatttgattgaccggccagatggaacatattgctttcgggagcacaaggatcgggtctactacgtctcggagcggattttgaagctgagcgagtgcttcggctacaagcagctggtgtgcgtgggcacctgcttcggcaagttctccaagaccaacaaactgaagttccatatcacggccctctactacttggcgccctacgcccagtacaaggtgtgggtgaagccctccttcgagcagcagtttctctacggcaaccacatacccaaaacaggactgggtcgcatcacggagaacgccggccagtaccagggcgtggtggtctactccatgaacgacctgcctctgggcttcggcgtactggcgcgttccacaacggactgcaagaccgccgatcccatgaccaccgtatgctttcatcagtcggatatcggcgaatatattcgcgccgaggacacgctcttttagatccatagatgctaagtttttacatgttttgtagcaataaccatgtttaggtaaataataagtatgctgaaaaacgga

SEQ ID NO: 15417 - protein, 180 aa, DROSOPHILA
MKRLSDERAKILFEHLSKYIGTNVKHLIDRPDGTYCFREHKDRVYYVSERILKLSECFGYKQLVCVGTCFGKFSKTNKLKFHITALYYLAPYAQYKVWVKPSFEQQFLYGNHIPKTGLGRITENAGQYQGVVVYSMNDLPLGFGVLARSTTDCKTADPMTTVCFHQSDIGEYIRAEDTLF

SEQ ID NO: 15418 - DNA, 20184 bp, DROSOPHILA
ttttagattcatgtaattattagacttattggttatgatcaaaagtaactaaaacgttacaggaatacactcattcaaaataaaatgtttatccaaacgaaaactcttttcttaaaattcccatgtttacttgttgatagggagttttccccaggaaaaacataccatatgctattcaaacaactgataattgtagttttctgaaggtgattagtggtagttgctaccgctcaatccgacaggtgtttcgagggatggttttctttttttttttcattgaaaataaaaaagacgagctaatttgtggccaggcaatatatcatggcgttacagacgacagttgagttttatatgtatgtatgttcgttcatccaacttctgccactcaacttcctcgtgtgtatatattttaagttttaagtaaaataaatatacatcgtaaagcgtataggtttatatttaaacgctcagtcaatggcaatttcctgctgttgccgctgcgatgccttgccgaatttatagataatttttcatgattttaccgacacattcttctttcccaatctcgttgcagatgcgctcagcaggtcgctgcgatgccttcgagctggtgctgccgccggtgctgatgatgatgatgaagttgctgccgctcccggtccgatgctttagctgctgacagccaagtgcagtatccgaaagataccagatacgagatacccgagacaaaggaaaggaaaagtgcatttcctgctacctaacttgtgcgtgccgttctacctacatagccggattctacctacgatttcggtagggagttgaaaaagagagtaactcgccgccgatactctctcgctgcttgctactcgctgctcggtactcgatacttttgtcgagcgctcgacggacagacagacatctgctcagccggtccgctcagtttggtcaagaagcgcgttcgcgacggctgcaaaagagcgtaccgccgtaggaaaaccccgagtgaaaagtgcgccgtggagcgcgggcggacattcaccgaacccaaaacgcctcgaactcgatatcgaatcgaaaggattaatccagtgaaatcagtgaagtgaaagtgcctgcgaacgcatcatcaatcctttatcctttctccctcaaatatttacccagtggtgattgctgttgacaaagtggattggcatatacgggggccactttcaattaggcacgttgccgctgcttcataaatgtgccacaatggccgcgccgtccaggacgacgttgatgccaccacccttccggctccagctgcggctactgatactacccatcctgctactcctgcgccatgatgcggtccacgcggaaccgtattccggcggattcggcagctcagctgtatccagcggtggactggggtcagtgggcattcacatacccggcggcggagtgggcgtcatcacggaggcccgctgcccgagggtctgctcctgcaccggattaaatgtggattgctcgcatcgaggactcacctccgttcccaggaaaatctcagcggacgtggagcgactgtgagtattttattgacataaatacattcgaatgcggattacccttttgtgcgattgaggtgcttgaatgggccagaggattctaacagctgtatctatttgtcatattctatctatggcagcagctccccttatagatttctatttaaaaatcactttgaatcagcattcaattaccactcccattcttaatgcagtcataaatcaatattaaattcacaattttattgaaatgccattatgcaaacaatctgagcagacataaaaccaatagaaagacacttcccccatggcacaacaaagacttccgccaagtctcgcaccaatgccatatcgatgccttgccatttccatccgtttagttaggatctccattcagatacttccttctgttgggcagtcgggaaaactgcatgacaaattccaattatggaaggcccattctttcgccatttgcccattgcccattgccaattgttcaaacattgagcacactctattaaaataataaagccggacccgggtccggacgcacacgacccgctgctggccgggattggtcggtccgatttgtatttatttaaaaatcagcataggcaaacaacagcagcggttcacagggtagttggattgtggagtatggggaaataaataaagccgtgaccatgtcgtcgtgtcgatagcgataaagaaaaagggtccccagggtccagaaaccaggaacagaaacaggaccagaaacagaaccaaccagccgaacagccaggctaccaccaggcagccccaagccgacttgcagcgagctgcttacattaaatcgccattaagtttattaattgtcgccgaaggagccgcataagcgcatcagtggccaggcggcaataattgttgcatgttgcgcagagtcgaatgcattaagccaatgtggctgtgactgtgactgcgattccaattccgcctgccattgcgactccttcatctccatcgtctgtcctctgtccatcgctcacagtcgccacataaattaacgcgctggcaattagcaagtgtatgcaaaataccacctcccagccacccaaccaaccaaccacggcatcctccagcactcaactccaacctcagcggcctcaaaagcctgctgtcgtggcggcagtttttctacataaattaataacagatatcagcagcggcagtggcagcattaacgttatagcattatagcccagttataagcagtcggccgggccaactcggttgcaagttgcctggctgactggttggttggctggcgactgtgctcagggacacatttggctgctgttatttgcgctctttttttatttgtgtttttatttttattttgtatttattcgtttttaatgctgcatacagagagagtaatataaaacacagaaaccagccagcagtgagccaacagaaacagaaaacatatcaacatgcacgacatatttgcattttaaaatagagaaccgaaccgatgcgaacccaactgaactgggcacggcatatatgtgccgtactatactatactatattgtattatgcacagggtgcctcaacgaccacggatcaaatttatatatgtcccatttatgtgagtgacattccatggggagcgatgaggttccgggtgtcaaaatgtgtgtgtgtgtgtgtgcaggagaatgtgtcaagagtcttaagctgagcttaagtggggcagcgaaagaaccaaaataagcgactggcaaccaggtgaggatgtgatggaaaggctcttgggggaattatgatttcaacagattatatagtagaagcgggggaattaattcccaaagccatcggaggggagaggggggaactctaaaggtgaaaagtacttttgtttcaatgaaattgaatacagtctaagtcgcattgtctacggcacgtttgagtttaagtgacttacctagctcaaatttcattatcttatactccagcatggcaagcaacttaaatgcttcgttttggaaaacggaaatccagctacctaaaaattgctaaatacttttgggtttagtttatgctaaaacgagcagttatagtttcagtcttttgaattcgattttaatagccaaagtaattaaaaagcttccacgaccaaccttgggacaccctaatgctgaactgggcagaaccttctaacccggcacacaagcatatatcaaatattgaacatgcccacaactattggcaccatgtccatgtgcaccgaacgggatggccaacattggagctcagctgtatgtatgtatgtatgtatatacatgggagaacggacaaaaaacaatgccaaatgcaaactggggctctctggcaaattgtgttcttcaacctttaccaccccccgccccctcgctttcgacgcccatgtccatgtcattgccatttaattacaaagcccccgggcgcagaaaggtgggatgaggtctgggtgaagacctcgaagaggagagctcgaatggaagagttctgagctgacaggctgccagtcacccacacagttgattcaattgacacgacagcatttttgcatatctaatttgtggaaaacgggtgtcttggctgctcggcttggtggcccttcacacctgagaacgactaatttatagctgaggtaaacgaggtggcagctgcttttgatgttccatggttactcggttcctcggctcctggccacaaaagagcaaaccccaagatggcatctaattggcagcggagtgcgaaaaccaacagaatgcttttatatcgggcggccccatacgcatctaatgaagttaaatgcttaattataagccaggggaaaacggcaaaaattatgcatacggcgattccaaccaaaagtgatataaacaaattacataaaaaccagcgccagaagcgtttgaaaaatgtttggcaattagacggcgacgagcaagacttttgtttttatttttaacccaacaaaagcaaaacaaagcatattgaaaatcttgctcgaccatctgatatcgctgaggtacagagagagaaaaaacatggatactttacgtaaaaaggaaatgttttttttttttaacaattcaaatcccagctgaattataatgtaagtctgttttttgatagagaggaaagttatcaaattgataatcccgcttatgttttgttttttgtcgtgcagttactatggccagtctgctgtaatcagtgggatctgagcaagagttgaccacatctcgaagagatattaagctcattaaaaagacatacgtgtgtatgtgcgtgtgtggatggactgaggagcagcaggctacacatgtctgtatgtatgtgaatggccaccgcctcatcatcggcaacttgatgcgagattcattaaggcttaagccgtacagaaaatatcttacgtctgggtcggcgaaggtcttactacctgttgttttgggcccacaagaccaaaaacccagactccagctcgaaccttactcaaaaagtgagcagctgagaccaacttgttgttgtttgtagatggttgcgcgcatgcgcacacggttaactgaagtcttttgtatctctctcggttgcatttcattgttatgacatctacaggtaacaaattttgtatttctggccaaagaaacgagttctggcctcgttggcggttctccgtgctccatgttcaatgattaaatatcatattttcgttatcagcaacgaggagcagaaaaaatctccatcttactcctacccggtggatcccctttcgattttccctttgccagctgcattcatatctcagattgctgttgtcctcttgtcttacaagcaattaaaaaaaattatcgccctgtctgtttgaatgcctcttgggttgcatccacaccgcagcgacttgcaacataattaatgcaatttctgtaatcgtaatttctttatctatattttcgcagcgagctgcagggaaacaatttgaccgtgatatacgagacggatttccagcggctgaccaagctgcgaatgctgtaagttaaattatggaacattaaatcgaaattgcccgattaactcaaatcttcgaactttgaatttccacagccaactaactgacaatcagatccacacgatcgagaggaactccttccaagatttggtctcactcgagcgactgtgagtagcgtcagattatggagtataacttgttttgcagtaatgctagttgcatgagatacttttgaatattgaatttgaactcactactactaaccaatttttgatgatctccacatctggatcttaatcttaattaatcaattgatattttcttagacttagaatatagctagctagcgtacaaattgaatttagcttgatgccagatttagtttgaattattaacattttgtatctgattcccgtttttgttcttgtttatttttattgcatatctctaccgttctttgtctctctctgcttttgttacgtttcgttttgcgtacctaaaatgctcgtctctacaccaaaaaccaaatcaaaccaaaatcaaatcaaatcaaaaaccaatatcgaaatcgaaacaccaaaaaccaaatccaacactgtaatcaaacagacgcctaaacaacaatcgactaaaggcaattcctgaaaactttgtgacaagttcagcgagtcttttgcgattgtaagtaaactccaaagtagccgatagtagtcgacacttgtactcaggtcgtattcgatatgggatcatttatccataaatttgataatcctgcagggacatctccaacaatgtcatcacgaccgtgggtagacgcgtcttcaagggagcccaatcgttgcggagtcttcagctggacaataaccaaatcacctgcctggatgagcacgcctttaagggattggtggagctggagatactgtgagtactatttaccagaataagtcaaagtgaagggagataataaccaaatttgctagccaatcaatggagctgcgtgccattgcggtcgagtaattaatcaatgatttagtgccttttgttaatcaatcaaatgggaattagtgaatgaattaaaaatcaatcagttaatgctctggctaaattacataataaatggttaggcttttgtggccagataagccaatcgcagccaaaatggagctcatatatcaagtgattagaagggagcgagaggaccaaatagataaatggcaagtggccaagctaaagctgaacagttttgccagataatgtgtaaatggggggtttaactaacattaatttgttgacaataaacaagaaatttatcaaatcataatataccaattttgatgaataattaattagctgcacgaagtacactttttatgaaagtaaagtttactaagaaatcgataaaccaagcccgttgaaaacaaattggcaagtgccctaaactttctattaaaagagaatttcaaattagtggctttttgaagatagaaggcgattccacatgtagagagaccaggaaactcaatagttgctaaccattttaattaaattttgatcggcacccgattcgtgctcttttggccaggccaaacccttgctgccataaccataactagccaatagatatagttgcttgataaggccggatcatctgctccactcactgaccatttccttctctccacttgtattttccagcacgctgaacaacaacaacctgacttccctgccgcacaacatcttcggcggactgggacgtttgcgggcactccggctgtcggacaatccgttcgcctgcgactgccatctgtcctggctgtcgcgattccttcgcagtgccacccgcctggcgccctacacccgctgccagtcgccatcgcagctgaagggccaaaacgtggcggacctgcacgaccaggagttcaaatgctcgggtatgtaatggccaatggccaatggcccggtgctttgtgcaacatgttgtggcagcttccactccctgaatgctaccaaaaatgggcaacatttggacgctcctcccccccgtcacaattcgtagtcgaaattaattagttttttatgcgaaagcgaggaaaacaaagcattgcgggtataaatcataagcagtcatatgggcacacccccactgcctcgaacgcccacgaaacgacccgcaccataagcaccatgagcaccatgagcacaaagcgtcagcagctcaatatctggcaagaaccacttggtgctttggtggcttcatccattcggttatatcccccgtttccttctgcagcgaggtcgtgtgtttgccaaaacgtttaacgccgtcgaaatcattgcctggtgtttgtattttttggcttctccacttactgaaagatgccgatgcagatgctcggatgcgaaggcttaagacctgagcacgagatggagatgaggctgcgggccaagtgaatgggaatgggtagtggccaaaacgaaaaccaaagctgaagactgagcgtgaagcgctcaatgaagcggaaaatgcgccccaaaacgatgcagccatgaaacgagtttcttggctcaaccacttctgccgaatggttagggtatatcgcattgttttgcgtcgtggttggtttttctggggagcctgtaatcgatatgagtatgcagatgagctgatatatccctggatgacccgtgtcaagttggataattctttagtgcctataatatgatgggaactctgaggtttcgaattgctaaggctttgtgtataaacgatatttcggggaaattttcctaggataggcagattaatgaatagattgattcctctacgatgaatgattcaagttctcatgtttgttgtttaactaaatattaaattttcttctcaatcgttcatttctcggtttcactttattataaatattaaatgtttattatttagctcgcgtcttaagattttcgaatgtatccatccatcaacaaagtgtatctagagtttcacattcacctcaaagtgaactataattccgagcttgtttgactttcgttttgtatgaaatgctatggaattatgtgggtaaacatttatgaccagcggctggttagagttgcacctccccaaaacccatttccccagctgctgcatccccttttgtcccgccatcggaggagcggctatgcagtagcattgataattacgatactgctggttgcaaagcaagccagatccaaatcggatgctcgttttcccagctaccggagctcgaaccggagcaagactaaattcgccaagtacttatcccaatctctgcaaccatattgtttgtccatcaggtctgacggagcacgcaccgatggaatgcggggcggagaacagctgtccgcacccatgtcgctgtgcggacgggatcgtcgattgccgtgagaagagtctgaccagcgtgcccgtcactttgcccgacgacaccaccgagctgtaagtggtgcatctttgaatgtgaatggcggtgcttctctctgacttggcatcactaatactctgattttttttttgcagccgcctcgagcagaatttcattacggaactgccgccgaaatcgttctccagctttcgacgactgcgacgcatcgacctgtccaacaacaacatatcccggattgcccacgatgcactaagcggcctaaagcagttaaccactctgtaagtagataatacccggtggtggaggtgttgttgccactttacttgctgcagtgcaacaagtagcctttgcagaacaaaatgtgcactcacttgagctgccctgcggctgctcccgcactcgggtaaactcacctgaaccaacttaaatgaggggaatgggctaagagttgcctctgggccaggccagaagcgagctaatcggcccacgcttagcgttcctgccagcttacaccacaaggcatcgggccgggcatcggcttacattgcccatgtgtggaatcctccatcgccctgacacccagctcctgctccaccttctcccttctcgacgagcacgtgtgtgatggagctgagaacgtgacacggacttaattactggtagccacattaaaggggttttattttctgaatttttaattatgtttggagctgtgcttcttccaattagaactgctgcaggagagagtatggtactttttgtgtcaaatgaatcgaaattaaatgagtgcttcattaaaaagtaacttaaactaaggaaacagattaaaggcgcaattgtagtactacttagaataagttttaagttttaaaagttagatggaacagttttccaaacattagcattacttttcacgcagaacatttttgcgtgtcacgactcagtttttgatcagggctaaggaaaccagttgccgcccgcaacagcaacatcaacagcgacatccacattcatatcaacaaaaaagaatgacagcggcaacaagaacttaaccactttgtctttgcccgcagagtgattttgtattttttgtaattttttgtgccacctcctggcggggcttgtgttttctttaagctttttttttttcttttattttcgagctttgttaacattcgtcgtgtgttctatttgtgttcttttccatgtcggctccacccatcgtcaacgtggccattgtaccatcgtggcatcatcccatcagcgtgctgtacggcaataaaataaaggatttaccctcgggcgtgttcaaaggactcggctcgctgcagctgctgctgctgaacgccaacgagatctcgtgcatacgcaaggatgcctttcgcgacctgcacagtttgagcctgctctccctgtacgacaacaacatccagtcgctggctaatggcacattcgacgccatgaagagcatcaaaacggtgtaagtacatggagacctactcctccattcctccacttccttactcctcgacctcttcacgtccgctgaacgccgcctgctcaacgcccaccaagcactcgagtggggaacaggcccatgtcgggatcccatcttgaatggagcaggcactttggtgttaaacctctgaagtgcatttagtagttgcctttgactcagccccgcctccctcgcccaccacgccttctcgtcttgagtccgcttcagagttcgcgttgacatttgtttagcagcaaacaagaagcatctcccgccccctgacacatcatcccagtacccagcacctactatccagcatccatccccttctctgtgaaccgtgaagactttcggcatttccagcgaacaaaagacgaaggctccgagaagaattctccgtttggcatcgataaatgtacgctcggctatggagctgcacaaaaaaaaatcttggatggtctctaaaacatgggtttgggcggggggttgccataagtgcggctgccagagggatttgcatgcttgagtgggttaagtatttgccagggttgtcggctttccggttagttgctcacgcatatttcagtggatacttaagagatctttcggtcctacgcaacgttgatatgctaatgatcatgttaataaattggcataccgaattggtgcatatgttgctctttaaataattaaaagatcatcaaattgagagcaaatttaggttgttaccatatggattttatacaaaccgtaaagatgctgtacatatatgtatatataacggaataaactcttatgactcacatcccagctctatcccagaacgcataaaaagcattttaaatagtatccaataaaatcgattgagttgcaactagctaacaagctaacctattccttgcggacctgcctccctaactcaattgaaacactaaaaacatttactatttgcgcagtccacaggcgtttggcaaccctgtcgggaatcgcttttaaatagttgcagaacaacaacggcgagctagggagaacaacaacggaaatgtcgtagccacaaggctggtgcacttttaagacgtctcaagactccacggtagccatagacccttcccttcggttgcccgggcaacaacgtcttggtgccccaataccctcctcagaagtcctgccgcataaccgtttcagccattcagtcgaatgctcaatgctactttctttgcttactttcattccatttcggcacgcacactcgcacatccatacacacagacatctggccaagaatcctttcatctgcgactgcaatctgcgctggctggccgactatttgcacaaaaatcccatagagacgagtggagcccgctgcgagtcaccgaagcggatgcatcgtcgtcggattgaatcgctgcgcgaggagaaattcaaatgtaagactgctgctagcgtccttgtacttaaccagccaactgaagcgatccccctcttccgcatttcaggctcctgggatgaattgcggatgaagctgtccggcgagtgccgcatggactccgactgtccggccatgtgccactgcgagggcaccaccgtggattgcacgggccggggcctgaaggagattccgcgcgacattcccctgcacacaactgagctgtaagtccacttccggattccatgtccctgcatcctgctccccgcatccctaactcgcaatatatacattacttcatttggcagtttgctcaacgacaacgaactgggacgcatcagttccgatggcctctttggtcgcctgccgcacttggtgaagctggaattgaagcgcaaccagctgaccggcatcgagcccaacgccttcgagggagcatcccacatccaggagttgcagctgggcgagaacaagatcaaggagatatcgaacaagatgttcctgggactgcaccaactaaaaacgctgtaagtccatttaaatgcttatgggattgctagaattggggggagtataatttggtatgtttgtttttgacgactacaatgtatggatttctttggttcaacaataaaagaaaacagtagctacgataaaaaaatctttaattgcaaacatatgaccatttcatttcccattcaagcaccataaaaacttgattgccctctaattagcgtatccactacctgtaaacgagtacctgacattacgtaatctctttccgttgcagcaatctgtacgacaatcaaatctcatgcgttatgcccggttcctttgagcatctcaactctctgacgtcgctgtaagtaaccagattcccggaatcccagattctctgcttggcaatgcttggcaattaaaactgtgccaagtgctcgggatgcacttcaatagataaatgatttggcttaagcattaattggccagcggatggattggtgaggggcagcagctcctcgctcgtaaaatgaggttaatggttctgattgttctccagttgaactctgtctgatgttgctgctctgtctgctccatgtgcttcgtctgctgccatcaaatcagttttgcttcttgatgccagccaccaaaagcacagcaaactattggatataattcaattgaacttcaatttatagcatggctttctgctcgtctgtgtgtgtgggtttctgtctgcactgctgctgcgataacagataccactagctcctcattctttcccggccatgtgccccatgcgccccatgtgccccgcctttgttgcctgtaaatcatcccccaagcaaagggagaatacgtggcagtggccatgtgtgtgtgtgtgtgcgccttcgatgatttaattaattaaaattgagttcaatggagagcgcccaagccagtcagcatgtaggatgtaggagaggtacatacatagaggtgccgtgtggtccgctgggtctgctcgcaaattattgtaaaattcatttaagtagctaataaatagcatcaatgaaattcattaagtgctgtgcaccacatgacacccaccaccacatgccgccccacaaccaacgccctcccactttgccaccttcaaaggtgttgcgtgaaaggagcccaaagtgttagttagctgcctgcggcctacacactctgctgcactgagagaaatactaagagtttaatattcaaagaatgaaagaagaagtacgggcagcattaagatgcggactatcttatttacatttgaattaattaatttaattcatccaatcatataaatcatatgtatggtcagtaggaatatcactggtaactttattcttactaggatacaaatacttatgctcgattgtgatttaacctcctatgttcataccatttgtaatcagcaggaaccctgcacgatgtatatatttatttactaatgatttatttcgagtgtaaaccttctaacacatgcacatgtaatagggagctggcatagctggtggcatgacaaagcagaattgcttattaaattagtctggactcggctgcaactttggaattgccaatgtaatttgtgcgccattgtttcacttactccgctcctaaggcccctggtccgcataattaaagtgcctggcatggattggccagggaaagtggtcggaggggaagggaaagctgaaggagtaacatatgtatgctgactatggcaccaaatgaatacggaattaatttatcaaacgcccatgcggctgggcaggaaaattgaattataagaaccctttatcaacgccgttatcgtaatcgttttttgtggcccatgctgtcacaatttttatgccctcgcaggaacctcgcatcgaatccattcaattgcaattgtcatttggcctggttcgcggaatggctgcgcaaaaaatcactgaacggcggagcggcacgttgtggagccccgtcgaaggtacgtgacgtgcagatcaaggacttgccccactcggaattcaagtgtagcagcgagaacagcgagggctgcctgggcgatggctactgtccgccatcctgcacctgcaccggcaccgtggtccgctgttcgcgtaaccagctgaaggagataccgcgcggcattcccgccgagacatcggagctgtatctggagtccaatgagatcgagcagattcactacgaacgcatacgccatttgcgctcccttacccgactgtaagtatctatctacattgtgcatcccaaagacgtttgctaattcgccacttggcattccattcgcagcgatctcagcaacaaccagatcaccattctctccaactacacctttgccaatctgaccaagctgtccacgctgtaagtccaactaggcctaatgactttttaattgctccgccgcagcacggaaaccacgaaataacagcaaaagcaacgcaaatcgaaggctcaagagggcttgacacaattctgcgccaattgcatcgtttgtcgacctggccattgcattgcgagtgggattgggattgggccatgggccggtctctggcccggtctttggctcgaggtctgcccctctgtccagaaggcagtcaccaacaaagcaatggaagcctagggagcgcaggcacgaaattcattccgagacgtaaagtcgaaatcgtgactcgtgcttaagcattagtcgttgacgcggactgcgacgccaggctacagtggttcctagtcgaacattgggcttgtacatgtaataatagtggatatagtgtgcagttatcactgctatttcactactttcgttaacgtttagtcattaaaattctatgtgccatgtgccagattagtctcaaaacccacataattatataagacattatggaatctctaaaacatgaactataacttttgtcaaagaaacccatcttggatgctgttcgtccaatgtaagcccactgtcttcgttgatgtgcgctatccacaatcaaagcttagccgttatttctggtgtttctcctccgtttgcgaatggaaaacgttttgcaattactttcatttcttcatcaattgccgcatgtgtctgtttgtgactgtgtgctagcctaatgcaatttgtaaacgtttcttcggtctttctgccctttgcagcatcatctcatacaacaagctgcagtgtctgcagcggcatgcgttgtctggcctgaataacctgcgcgtgctttcgctgcacggtaaccgcatctcgatgctgccggaaggctccttcgaggacctcaagtcgttgacccacatgtgagtagatagagacactagccaccaaattggacagtccattgaaccctaatttcttatacagcgcactaggcagcaatcccttgtactgcgattgcggtctgaagtggttctccgattggataaagctggactacgtggaaccgggaattgcacgttgcgccgaaccggaacagatgaaggataagctgatcctgtccacaccctcgtcgagcttcgtttgccgcggccgcgtgcgcaatgatattctggccaagtgcaacgcctgttttgagcagccgtgccagaatcaagcgcagtgcgtggcccttccgcagcgagagtaccagtgcctctgccagccgggctatcatggcaaacactgtgagtttatgatcgatgcttgctacggaaatccgtgccgcaacaatgccacttgcacggtgctggaggagggtcgtttcagctgtcagtgcgctccgggatacacaggtgcccgctgcgagacgaatatcgacgattgcctgggcgagatcaagtgccagaacaatgccacctgcatcgacggagtggagtcgtacaaatgtgagtgccagccgggattcagtggcgagttctgcgacaccaaaatccagttctgcagtccggagttcaatccctgcgcgaatggagccaagtgcatggaccactttacccactacagctgcgattgtcaggcaggtttccatggcaccaactgcacggacaatattgacgactgccagaaccacatgtgccagaacggtggaacgtgcgtggacggcatcaacgactaccaatgccgctgtccagacgactatacgggcaagtactgtgaaggccacaacatgatctcgatgatgtatccacagacgtcgccttgtcaaaaccacgagtgcaagcacggtgtctgcttccaaccgaacgctcagggcagcgactacctatgcaggtgtcatccgggttacactggaaagtggtgcgagtacctcaccagcataagctttgtccacaacaactcgtttgtagaactggagccactgcgaacacgtccggaggcgaacgtgacgatagtcttcagtagcgcggagcagaatggaattctcatgtacgacggccaggatgctcatcttgcagtggaactgtttaatgggcgtattcgggttagctacgatgtgggtaatcaccctgtgtccacgatgtacagctttgagatggtggccgatggaaagtaccatgccgtggagcttctggccatcaagaagaatttcacgctgcgcgtggatcgcggattggcccgttccatcatcaacgagggctccaacgactacctgaaactcacgacgcccatgttcctgggcggcctacccgtggatcctgcacagcaggcgtacaagaactggcaaatacgcaaccttaccagctttaagggctgcatgaaggaggtgtggatcaatcataagctggtcgactttggcaatgcccagcgccagcaaaagatcacaccaggatgtgccctgctcgaaggagagcagcaagaggaggaagacgacgagcaggatttcatggacgagacaccgcacatcaaagaggtgggttgtcctgtaatcaccactagagaaggctttagctaaacaattttgtccattttcaggagccggtggatccttgcctggagaacaaatgccgtcggggcagtcgctgtgtgccgaattccaatgccagggacggctaccagtgcaagtgcaagcacggccagcgcggccgctactgcgatcaaggtgagggcagcactgagcccccaacagtcaccggtacatacatctatcatgcttttgctactcacaactcacacccgggtgtacaccattcactactaaccaaaaaatatgacataactgagtagggcatttaagatctatatagttttgttttgactgtgaatatgtggtaaaagtagatgggtactcagcttaatttttcaaaaagaattgtaggcttaaaattctcaagaaaacaaaaccaaacaacctcattgaaaaatttagaattacggtactaacgtgattttatttaaaaaaaaaggtacttatatcagaatcgcaatttcataaatagccaagaaacacggcagaggtgttcacctcactcttaagcgttaatcatatggtggcacatgctaaatattaatactacaccagcaagctttaattattgacacatatacgcacacgcatattcatgacattcgcttttcacgctactcatccatcaaagggaaatatcgtggggtttttgatgggggggggcggagacgacactgtgcactttgttagttctaattatccgaccgcaactcacgttgcagccactgccttagctcgccgactaattgcgttctgttgactctttccttccacccacagcggcgtccacctgtcgcaaggagcaggtgcgcgagtactacacggagaacgactgtcgctcgaggcagccgttgaagtacgccaagtgcgtgggcggctgcggcaaccagtgctgcgcggccaaaattgtgagacggcgcaaggtgagtgaatctgaatatacaatatgtcctggtgtttaaaactaatcaatctgcccgttttgcctacaggtgcgcatggtgtgcagcaacaaccgcaagtacatcaagaacttggacatcgtgcgcaagtgcggatgcaccaagaaatgctactgactgaaagatgcgactacccaattgctcgaacggagcaatagcagcttagatgttagtttaggaacaggtttaaatctaacttatagtagtagttatagtaacgatagtcttagccatagcactagggatagcacggatgttagggggacgaaggatgaagcggaggagagtgctgacgcgggggagacaacggaggaggtgagggacgagagtgatgattaccccacggacggcatgcagtccgatctctacgacgacaccatcgatgacgacgatgacgatggtctcgatgatgattatgcagacgaggaggatggggaggaggatccagagcagcttcccgatcccaaaggtctggtaagtgtgccagatgaagaggaagacatgggttacgacgaggatgacgaacgtatcgccatggagcggccaagaacggttagacccaggcccgacgaggagcatttccttaacgaagagggcagtggtttcggcggctttcgatcgcgattccggccgagcaatagcttccgcgagactcagctggagaatatccgcaagaagctgctcacagaagcacaggcggctccggaaacggctgttgcggtggccgtgccgagcactgcgatagatctgcgcgagagcagcggccactttgccaacgatgacgaggatggcgaggacggcgatgacggcgtcgatgacgagttcgccgacacgggggagaaccaggggcgcggcttctttggctcccagcagcaacagcgcaagaacggtccgtatcaccgcaagaacggcaacgatgccatcaaaatcatctccacgccgctgggcaaggtgagcattgtgtaccagcagacggacaaggatcaaagtccggacaaggatgcgcaacagcagcagcaaaagaagccggcgctcaccgacttcgacgccctgtcaccggaccccgagagcagtcatcgctttccgtcgccccaccccaagattacacctgttctgacgcccgatggcaaggtggcgctgctctatcgcggagactcggagagctccaagtacgagcccatacgcaacctgacgcacaagttttcgggacagccggccaaggagtcaaagcctaaaaccgaagattcctcctcggcggaggactctgtctacacggacagcgaggataccgaggacagtaaaggtgaaactagtgctggaaagtcctcaccagtggcctccacgcccaagccactgcagccagagattttggagcctccagataacgtccagccaggagggtcatttataattcggcccacctccgactcgcttctgccgatgatcaacaggccactgtccgaggttctgggcatcaagaagaaccagttccaggagacccgggtgcgtgaccaattgcccacgcaacagcctccgcctccactgccggaggccacgtcccgtagtcccgcttccggacatcagttcctagccaaggtgaacctggctgagttcccgacatccggaaggacgctccagacgccgctgatccccagcacccacgactttgacttcagccgtgacaacacgatgctggacgagcggtcgcgggtgcgtgagttggaaaagcagcgggagcgggacaaggagcacaacgaggccaccagcaagggagccaccgaggcacacaccatagccaacgagcagctgctctccaagacggaag

SEQ ID NO: 15419 - DNA, 5474 bp, DROSOPHILA
gagtgaaaagtgcgccgtggagcgcgggcggacattcaccgaacccaaaacgcctcgaactcgatatcgaatcgaaaggattaatccagtgaaatcagtgaagtgaaagtgcctgcgaacgcatcatcaatcctttatcctttctccctcaaatatttacccagtggtgattgctgttgacaaagtggattggcatatacgggggccactttcaattaggcacgttgccgctgcttcataaatgtgccacaatggccgcgccgtccaggacgacgttgatgccaccacccttccggctccagctgcggctactgatactacccatcctgctactcctgcgccatgatgcggtccacgcggaaccgtattccggcggattcggcagctcagctgtatccagcggtggactggggtcagtgggcattcacatacccggcggcggagtgggcgtcatcacggaggcccgctgcccgagggtctgctcctgcaccggattaaatgtggattgctcgcatcgaggactcacctccgttcccaggaaaatctcagcggacgtggagcgactcgagctgcagggaaacaatttgaccgtgatatacgagacggatttccagcggctgaccaagctgcgaatgctccaactaactgacaatcagatccacacgatcgagaggaactccttccaagatttggtctcactcgagcgactacgcctaaacaacaatcgactaaaggcaattcctgaaaactttgtgacaagttcagcgagtcttttgcgattggacatctccaacaatgtcatcacgaccgtgggtagacgcgtcttcaagggagcccaatcgttgcggagtcttcagctggacaataaccaaatcacctgcctggatgagcacgcctttaagggattggtggagctggagatactcacgctgaacaacaacaacctgacttccctgccgcacaacatcttcggcggactgggacgtttgcgggcactccggctgtcggacaatccgttcgcctgcgactgccatctgtcctggctgtcgcgattccttcgcagtgccacccgcctggcgccctacacccgctgccagtcgccatcgcagctgaagggccaaaacgtggcggacctgcacgaccaggagttcaaatgctcgggtctgacggagcacgcaccgatggaatgcggggcggagaacagctgtccgcacccatgtcgctgtgcggacgggatcgtcgattgccgtgagaagagtctgaccagcgtgcccgtcactttgcccgacgacaccaccgagctccgcctcgagcagaatttcattacggaactgccgccgaaatcgttctccagctttcgacgactgcgacgcatcgacctgtccaacaacaacatatcccggattgcccacgatgcactaagcggcctaaagcagttaaccactctcgtgctgtacggcaataaaataaaggatttaccctcgggcgtgttcaaaggactcggctcgctgcagctgctgctgctgaacgccaacgagatctcgtgcatacgcaaggatgcctttcgcgacctgcacagtttgagcctgctctccctgtacgacaacaacatccagtcgctggctaatggcacattcgacgccatgaagagcatcaaaacggtacatctggccaagaatcctttcatctgcgactgcaatctgcgctggctggccgactatttgcacaaaaatcccatagagacgagtggagcccgctgcgagtcaccgaagcggatgcatcgtcgtcggattgaatcgctgcgcgaggagaaattcaaatgctcctgggatgaattgcggatgaagctgtccggcgagtgccgcatggactccgactgtccggccatgtgccactgcgagggcaccaccgtggattgcacgggccggggcctgaaggagattccgcgcgacattcccctgcacacaactgagcttttgctcaacgacaacgaactgggacgcatcagttccgatggcctctttggtcgcctgccgcacttggtgaagctggaattgaagcgcaaccagctgaccggcatcgagcccaacgccttcgagggagcatcccacatccaggagttgcagctgggcgagaacaagatcaaggagatatcgaacaagatgttcctgggactgcaccaactaaaaacgctcaatctgtacgacaatcaaatctcatgcgttatgcccggttcctttgagcatctcaactctctgacgtcgctgaacctcgcatcgaatccattcaattgcaattgtcatttggcctggttcgcggaatggctgcgcaaaaaatcactgaacggcggagcggcacgttgtggagccccgtcgaaggtacgtgacgtgcagatcaaggacttgccccactcggaattcaagtgtagcagcgagaacagcgagggctgcctgggcgatggctactgtccgccatcctgcacctgcaccggcaccgtggtccgctgttcgcgtaaccagctgaaggagataccgcgcggcattcccgccgagacatcggagctgtatctggagtccaatgagatcgagcagattcactacgaacgcatacgccatttgcgctcccttacccgactcgatctcagcaacaaccagatcaccattctctccaactacacctttgccaatctgaccaagctgtccacgctcatcatctcatacaacaagctgcagtgtctgcagcggcatgcgttgtctggcctgaataacctgcgcgtgctttcgctgcacggtaaccgcatctcgatgctgccggaaggctccttcgaggacctcaagtcgttgacccacatcgcactaggcagcaatcccttgtactgcgattgcggtctgaagtggttctccgattggataaagctggactacgtggaaccgggaattgcacgttgcgccgaaccggaacagatgaaggataagctgatcctgtccacaccctcgtcgagcttcgtttgccgcggccgcgtgcgcaatgatattctggccaagtgcaacgcctgttttgagcagccgtgccagaatcaagcgcagtgcgtggcccttccgcagcgagagtaccagtgcctctgccagccgggctatcatggcaaacactgtgagtttatgatcgatgcttgctacggaaatccgtgccgcaacaatgccacttgcacggtgctggaggagggtcgtttcagctgtcagtgcgctccgggatacacaggtgcccgctgcgagacgaatatcgacgattgcctgggcgagatcaagtgccagaacaatgccacctgcatcgacggagtggagtcgtacaaatgtgagtgccagccgggattcagtggcgagttctgcgacaccaaaatccagttctgcagtccggagttcaatccctgcgcgaatggagccaagtgcatggaccactttacccactacagctgcgattgtcaggcaggtttccatggcaccaactgcacggacaatattgacgactgccagaaccacatgtgccagaacggtggaacgtgcgtggacggcatcaacgactaccaatgccgctgtccagacgactatacgggcaagtactgtgaaggccacaacatgatctcgatgatgtatccacagacgtcgccttgtcaaaaccacgagtgcaagcacggtgtctgcttccaaccgaacgctcagggcagcgactacctatgcaggtgtcatccgggttacactggaaagtggtgcgagtacctcaccagcataagctttgtccacaacaactcgtttgtagaactggagccactgcgaacacgtccggaggcgaacgtgacgatagtcttcagtagcgcggagcagaatggaattctcatgtacgacggccaggatgctcatcttgcagtggaactgtttaatgggcgtattcgggttagctacgatgtgggtaatcaccctgtgtccacgatgtacagctttgagatggtggccgatggaaagtaccatgccgtggagcttctggccatcaagaagaatttcacgctgcgcgtggatcgcggattggcccgttccatcatcaacgagggctccaacgactacctgaaactcacgacgcccatgttcctgggcggcctacccgtggatcctgcacagcaggcgtacaagaactggcaaatacgcaaccttaccagctttaagggctgcatgaaggaggtgtggatcaatcataagctggtcgactttggcaatgcccagcgccagcaaaagatcacaccaggatgtgccctgctcgaaggagagcagcaagaggaggaagacgacgagcaggatttcatggacgagacaccgcacatcaaagaggagccggtggatccttgcctggagaacaaatgccgtcggggcagtcgctgtgtgccgaattccaatgccagggacggctaccagtgcaagtgcaagcacggccagcgcggccgctactgcgatcaaggtgagggcagcactgagcccccaacagtcaccgcggcgtccacctgtcgcaaggagcaggtgcgcgagtactacacggagaacgactgtcgctcgaggcagccgttgaagtacgccaagtgcgtgggcggctgcggcaaccagtgctgcgcggccaaaattgtgagacggcgcaaggtgcgcatggtgtgcagcaacaaccgcaagtacatcaagaacttggacatcgtgcgcaagtgcggatgcaccaagaaatgctactgactgaaagatgcgactacccaattgctcgaacggagcaatagcagcttagatgttagtttaggaacaggtttaaatctaacttatagtagtagttatagtaacgatagtcttagccatagcactagggatagcacggatgttagggggacgaaggatgaagcggaggagagtgctgacgcgggggagacaacggaggaggtgagggacgagagtgatgattaccccacggacggcatgcagtccgatctctacgacgacaccatcgatgacgacgatgacgatggtctcgatgatgattatgcagacgaggaggatggggaggaggatccagagcagcttcccgatcccaaaggtctggtaagtgtgccagatgaagaggaagacatgggttacgacgaggatgacgaacgtatcgccatggagcggccaagaacggttagacccaggcccgacgaggagcatttccttaacgaagagggcagtggtttcggcggctttcgatcgcgattccggccgagcaatagcttccgcgagactcagctggagaatatccgcaagaagctgctcacagaagcacaggcggctccggaaacggctgttgcggtggccgtgccgagcactgcgatagatctgcgcgagagcagcggccactttgccaacgatgacgaggatggcgaggacggcgatgacggcgtcgatgacgagttc

SEQ ID NO: 15420 - protein, 1504 aa, DROSOPHILA
MAAPSRTTLMPPPFRLQLRLLILPILLLLRHDAVHAEPYSGGFGSSAVSSGGLGSVGIHIPGGGVGVITEARCPRVCSCTGLNVDCSHRGLTSVPRKISADVERLELQGNNLTVIYETDFQRLTKLRMLQLTDNQIHTIERNSFQDLVSLERLRLNNNRLKAIPENFVTSSASLLRLDISNNVITTVGRRVFKGAQSLRSLQLDNNQITCLDEHAFKGLVELEILTLNNNNLTSLPHNIFGGLGRLRALRLSDNPFACDCHLSWLSRFLRSATRLAPYTRCQSPSQLKGQNVADLHDQEFKCSGLTEHAPMECGAENSCPHPCRCADGIVDCREKSLTSVPVTLPDDTTELRLEQNFITELPPKSFSSFRRLRRIDLSNNNISRIAHDALSGLKQLTTLVLYGNKIKDLPSGVFKGLGSLQLLLLNANEISCIRKDAFRDLHSLSLLSLYDNNIQSLANGTFDAMKSIKTVHLAKNPFICDCNLRWLADYLHKNPIETSGARCESPKRMHRRRIESLREEKFKCSWDELRMKLSGECRMDSDCPAMCHCEGTTVDCTGRGLKEIPRDIPLHTTELLLNDNELGRISSDGLFGRLPHLVKLELKRNQLTGIEPNAFEGASHIQELQLGENKIKEISNKMFLGLHQLKTLNLYDNQISCVMPGSFEHLNSLTSLNLASNPFNCNCHLAWFAEWLRKKSLNGGAARCGAPSKVRDVQIKDLPHSEFKCSSENSEGCLGDGYCPPSCTCTGTVVRCSRNQLKEIPRGIPAETSELYLESNEIEQIHYERIRHLRSLTRLDLSNNQITILSNYTFANLTKLSTLIISYNKLQCLQRHALSGLNNLRVLSLHGNRISMLPEGSFEDLKSLTHIALGSNPLYCDCGLKWFSDWIKLDYVEPGIARCAEPEQMKDKLILSTPSSSFVCRGRVRNDILAKCNACFEQPCQNQAQCVALPQREYQCLCQPGYHGKHCEFMIDACYGNPCRNNATCTVLEEGRFSCQCAPGYTGARCETNIDDCLGEIKCQNNATCIDGVESYKCECQPGFSGEFCDTKIQFCSPEFNPCANGAKCMDHFTHYSCDCQAGFHGTNCTDNIDDCQNHMCQNGGTCVDGINDYQCRCPDDYTGKYCEGHNMISMMYPQTSPCQNHECKHGVCFQPNAQGSDYLCRCHPGYTGKWCEYLTSISFVHNNSFVELEPLRTRPEANVTIVFSSAEQNGILMYDGQDAHLAVELFNGRIRVSYDVGNHPVSTMYSFEMVADGKYHAVELLAIKKNFTLRVDRGLARSIINEGSNDYLKLTTPMFLGGLPVDPAQQAYKNWQIRNLTSFKGCMKEVWINHKLVDFGNAQRQQKITPGCALLEGEQQEEEDDEQDFMDETPHIKEEPVDPCLENKCRRGSRCVPNSNARDGYQCKCKHGQRGRYCDQGEGSTEPPTVTAASTCRKEQVREYYTENDCRSRQPLKYAKCVGGCGNQCCAAKIVRRRKVRMVCSNNRKYIKNLDIVRKCGCTKKCY

SEQ ID NO: 15421 - DNA, 5419 bp, DROSOPHILA
taaaagctatagatagaccgatatattcagtgctgttagccgtccctactcaacactgaaacatttctcacgtgtaaagttgagcagtttgttttcctcttttttccgcttaatttaacttaaaatgaaacgcctgagcgacgaacgtgccaagatcttgttcgagcacctgtccaaatagtgagtacccaaaacagatcatcgcaatgcagctaacaagtgctcttacagcattggcacaaatgtgaagcatttgattgaccggccagatggaacatattgctttcgggagcacaaggatcgggtctactacgtctcggagcggattttgaagctgagcgagtgcttcggctacaagcagctggtgtgcgtgggcacctgcttcggcaagttctccaagaccaacaaactgaagttccatatcacggccctctactacttggcgccctacgcccagtacaaggtgtgggtgaagccctccttcgagcagcagtttctctacggcaaccacatacccaaaacaggactgggtcgcatcacggagaacgccggccagtaccagggcgtggtggtctactccatgaacgacctgcctctgggcttcggcgtactggcgcgttccacaacggactgcaagaccgccgatcccatgaccaccgtatgctttcatcagtcggatatcggcgaatatattcgcgccgaggacacgctcttttagatccatagatgctaagtttttacatgttttgtagcaataaccatgtttaggtaaataataagtatgctgaaaaacggataaactgcttttgattttatatttttaatgttaatactgataataataataattgataataaaacttacactacatttcataaattattattaaaaaaaaaaattttaaatagtgagccaatattttgtggtatattttatgcaaggtattttttgagtttgaaatagtatatacccgcattttcaatgccaatggtattttgtaccgaaacggtcacacgcaacactgcaatttctggacgcgatttcgtgggaatcttcgatggaaatgcgtctgaatgcggcttccatatggctgttaatactgtcgtatggagcaactattggtaataatcaggacgaaaacaaagtggagcttccagtagcgaccggcgtcgaaaacccgcacgcccactttttaatataggccaaataacctgagtcatctaacccgaactttctttgtccacagctcaaggagaaagaacccgcgataagatgtacgagcccattggaggagctagctgtttccgacggctgaatggcacccatcagacaggctgttcctgtgagtccattgagaatataccttgaaatcctctataattctttcttttcagcaacctactccggttccgtgggcgtactacatctaataaacgtcgaggccgacctggaatttcttcttagcagcccaccatctccaccttacgcccccatgataccacctcacctgttcacacgtaacaacctgatgcgcctaaaggaagccggaccaaagaacatttctgtggtgctgctgatcaaccgcacgaaccagatgaagcagttctcgcacgaactcaactgccccaatcagtacagcggcctgaacagcaccagtgagacctgcgacgccagcaatccagccaaaaactggaatccctggggcactggacttctgcacgaggactttccctttcctatctattacatagccgatttggatcaggtcaccaagctagagaagtgctttcaggactttaacaaccataactacgagacgcacgcgctgcgtagcttgtgcgccgtcgaggtcaagtcctttatgtccgccgctgtcaacaccgaggtctgtatgcgccgcaccaacttcatcaataatcttggaggaagcaagtactgcgatccgctcgagggacggaatgtttacgccaccttgtacccccgaaagccagcaatcgaaaacaacttggagacagtccatacgaatgaaaagttcatattagtaacctgtcgcctggacaccaccaccatgttcgatggcgtcggtgagttcaagtagtggaattactactacttcgactacatgatttatttctacaattcacaggtcttggagccatggactccctcatgggatttgctgttttcactcatgtggcgtatctattaaaacaactacttccgccgcaaagcaaagaccttcataatgtcctctttgtgacttttaatggcgaatcctatgactacattggttctcaaagatttgtatacgacatggagaaacttcaatttcctactgaatccacaggcacgcctccgattgcctttgacaatattgacttcatgctggacatcgggacactggatgacatatcgaatattaagctgcatgcgttaaatggaacgactttggctcagcaaattctagagcggctaaataactatgcgaagtcgccacgctatggctttaacctgaacattcagtccgagatgagcgctcacttaccacctacgtcggcgcaatcatttctgcgacgtgatccaaacttcaatgcattgattctaaacgctcgtccaacgaacaagtattatcattccatatacgatgacgcggataacgtggacttcacctatgcgaacacaagcaaggatttcacccagctgacggaagttaatgactttaaaagcttgaacccagattcactgcaaatgaaagtgcgcaacgtttcctctattgtggccatggccctatatcagacaataactggaaaggagtacactggcaccaaggtggccaaccctctgatggcagatgagttcctttactgtttcctgcaatcggcggactgcccactctttaaggccgcatcttatccgggcagtcagctcaccaatttgcctccgatgcggtaagttagctataaacatgcctatacttggatttatttattgctagcctttcttttcccaagctacataagcgtcttgggtggctctcaagagtcgtcgggctatacgtatagattgctgggctatctcctgtcacaactgcagccagacattcacagagataactgcaccgacttgccgctgcactatttcgccggattcaacaatatcggagagtgtcgcctcaccacgcagaactacagtcacgccctgagtccagcttttcttattgatggttagccctgaaatgcctttattgtcttgtgcaaacatttttacaattaaactttcattaggctacgattggagttccggcatgtattccacttggactgaatccacctggtcacagttcagtgcacgcatcttcctgcgcccgtccaatgtgcaccaggtcacaactctaagcgttggcatagtggtgctgataatatccttctgtttggtgtatataatcagctcacgatcggaagtcctctttgaggatttgccggcaagcaatgccgcgtaagtcccttcagatgcatccacttgtacatcgtcagtttgctcatcaattactgggaaactcatgtcatctttagtgctcagattttgtttggtttctatgtattgtaatatttatttgaaatttattgtttctagattatttggttgatgtcacaactgccacagcgacgaaatcatcgcgttcagcagctcattccatagatttctgcatgcgtaaactaaacgttacttgtaaaccaatcgattaagaatttctgattgtgcccttttagatcgccgcggccgacagcctgttaaatcttcaaagaatatctgatcacgtgccgaagatgattggttgctgaatatgatctaaaacaaaaaacagacttaacaaagacactaaaatgatattctaactcgtcttatttaaaacattaagcaaacgtttatttatatgtatttttgtattttaaagtagtaaattagcttctatcaactacgttgtatcatatatagacatttaaccaattgcgacaaaattctttccacttgtccggccctttttgcattgtacataggattaaccaacccaattgaacctctgataatgccaaggaagagatgtctgtacaaatattgacaagaaactgctataacttataaatcactggaaatatttataccttctgcatctattgcgatactgaacttaatgatctgaaatcattacttcatagaagacaaataattattataacgactttaaattatatatgtttaataaattttgataaggtgtaaagcaatgtcctgttatctagttaggttattttcaaggcaattattcacagctctcagattccaacgattgatgtagtttaatctcaactctttaccaaagaagtccatttgtactagtgtaaaagatattttcaatactcttaaaatcgtggaaatacttttgggaatggtaagaattggcaaaatccgaagttttgacgatattatcgtcttaaatatttttaatttctttagtttagcaatccttgaagccgaagattaacaatcgaatctgtaattacccctgcggatgccttcaagtagccaccactcagcagcatcaccaccggaattcctaatgcccgaaatgtactaaataccaaccgatcccgctcaataacgccctccgcggaaatagccaggttgcccaatggatcgccctcgagcacatcggttcccgcattatagacgaccatatctggacggaactcggccagggactgcatcaggcagcgttttagttgccgcaggtagaatccatcctccgtgtagttgcgcagctccaccgcacaccgaatgctctccttggccacatgatcccgcggatagacaaaggcattgtacatgtcgaaaatgtagacggctgccacgttattgaagtcccgctcgtgcccattgccctgatgggcatccaggtccacaatcattatgcggcgcacccggaatggttcctgctcgaacagcctgacgatgagcagcgagatgtcagcatatggacagaaaccaccgcctctgtacgagcaacagtgatggaacccaccgcccaggttgatggcccaaccataatccaatgccagcttaccggccaaaatggaaccggctgcttgaaagcgcatgggtcgcaaataggaacgctgaatgtatcgattcgggacgaaggccatcagcggcacttcagcgatgcaggccacattcatgctccagcgcagtgactttaggtattcccttgtgtgaatacgacgcagctggtccttggtcagctccgtgggttcgtagaagctgccgtcgtcgagctgcagttgggcgcacaggagctgtggtccattgattggtatataaaagttcaggagatcgggaaatgcatacgaaccttgtgaa

SEQ ID NO: 15422 - DNA, 2428 bp, DROSOPHILA
accgaaacggtcacacgcaacactgcaatttctggacgcgatttcgtgggaatcttcgatggaaatgcgtctgaatgcggcttccatatggctgttaatactgtcgtatggagcaactattgctcaaggagaaagaacccgcgataagatgtacgagcccattggaggagctagctgtttccgacggctgaatggcacccatcagacaggctgttcctcaacctactccggttccgtgggcgtactacatctaataaacgtcgaggccgacctggaatttcttcttagcagcccaccatctccaccttacgcccccatgataccacctcacctgttcacacgtaacaacctgatgcgcctaaaggaagccggaccaaagaacatttctgtggtgctgctgatcaaccgcacgaaccagatgaagcagttctcgcacgaactcaactgccccaatcagtacagcggcctgaacagcaccagtgagacctgcgacgccagcaatccagccaaaaactggaatccctggggcactggacttctgcacgaggactttccctttcctatctattacatagccgatttggatcaggtcaccaagctagagaagtgctttcaggactttaacaaccataactacgagacgcacgcgctgcgtagcttgtgcgccgtcgaggtcaagtcctttatgtccgccgctgtcaacaccgaggtctgtatgcgccgcaccaacttcatcaataatcttggaggaagcaagtactgcgatccgctcgagggacggaatgtttacgccaccttgtacccccgaaagccagcaatcgaaaacaacttggagacagtccatacgaatgaaaagttcatattagtaacctgtcgcctggacaccaccaccatgttcgatggcgtcggcacgcctccgattgcctttgacaatattgacttcatgctggacatcgggacactggatgacatatcgaatattaagctgcatgcgttaaatggaacgactttggctcagcaaattctagagcggctaaataactatgcgaagtcgccacgctatggctttaacctgaacattcagtccgagatgagcgctcacttaccacctacgtcggcgcaatcatttctgcgacgtgatccaaacttcaatgcattgattctaaacgctcgtccaacgaacaagtattatcattccatatacgatgacgcggataacgtggacttcacctatgcgaacacaagcaaggatttcacccagctgacggaagttaatgactttaaaagcttgaacccagattcactgcaaatgaaagtgcgcaacgtttcctctattgtggccatggccctatatcagacaataactggaaaggagtacactggcaccaaggtggccaaccctctgatggcagatgagttcctttactgtttcctgcaatcggcggactgcccactctttaaggccgcatcttatccgggcagtcagctcaccaatttgcctccgatgcgctacataagcgtcttgggtggctctcaagagtcgtcgggctatacgtatagattgctgggctatctcctgtcacaactgcagccagacattcacagagataactgcaccgacttgccgctgcactatttcgccggattcaacaatatcggagagtgtcgcctcaccacgcagaactacagtcacgccctgagtccagcttttcttattgatggctacgattggagttccggcatgtattccacttggactgaatccacctggtcacagttcagtgcacgcatcttcctgcgcccgtccaatgtgcaccaggtcacaactctaagcgttggcatagtggtgctgataatatccttctgtttggtgtatataatcagctcacgatcggaagtcctctttgaggatttatttaaaacattaagcaaacgtttatttatatgtatttttgtattttaaagtagtaaattagcttctatcaactacgttgtatcatatatagacatttaaccaattgcgacaaaattctttccacttgtccggccctttttgcattgtacataggattaaccaacccaattgaacctctgataatgccaaggaagagatgtctgtacaaatattgacaagaaactgctataacttataaatcactggaaatatttataccttctgcatctattgcgatactgaacttaatgatctgaaatcattacttcatagaagacaaataattattataacgactttaaattatatatgtttaataaattttgataaggtgtaaagcaatgtcctgttatctagttaggttattttcaaggcaattattcacagctctcagattccaacgattgatgtagtttaatctcaactctttaccaaagaagtccatttgtactagtgtaaaagatattttcaata

SEQ ID NO: 15423 - protein, 604 aa, DROSOPHILA
MYEPIGGASCFRRLNGTHQTGCSSTYSGSVGVLHLINVEADLEFLLSSPPSPPYAPMIPPHLFTRNNLMRLKEAGPKNISVVLLINRTNQMKQFSHELNCPNQYSGLNSTSETCDASNPAKNWNPWGTGLLHEDFPFPIYYIADLDQVTKLEKCFQDFNNHNYETHALRSLCAVEVKSFMSAAVNTEVCMRRTNFINNLGGSKYCDPLEGRNVYATLYPRKPAIENNLETVHTNEKFILVTCRLDTTTMFDGVGTPPIAFDNIDFMLDIGTLDDISNIKLHALNGTTLAQQILERLNNYAKSPRYGFNLNIQSEMSAHLPPTSAQSFLRRDPNFNALILNARPTNKYYHSIYDDADNVDFTYANTSKDFTQLTEVNDFKSLNPDSLQMKVRNVSSIVAMALYQTITGKEYTGTKVANPLMADEFLYCFLQSADCPLFKAASYPGSQLTNLPPMRYISVLGGSQESSGYTYRLLGYLLSQLQPDIHRDNCTDLPLHYFAGFNNIGECRLTTQNYSHALSPAFLIDGYDWSSGMYSTWTESTWSQFSARIFLRPSNVHQVTTLSVGIVVLIISFCLVYIISSRSEVLFEDLFKTLSKRLFICIFVF

SEQ ID NO: 15424 - DNA, 3105 bp, DROSOPHILA
gctccagcggcaaaaagaagtccgaatggagtgtgctgcgcgaggacttcatgaccaacaagaagatcaagcactgggacgaggaagacgacgacgaggagggtcacaatgatgaagctgatgacagcgattacgatgatggggaagaatagctttaattaccaaataaatgttagcttttcaattaagtcgcgtttatataatggtctaattaatggtttccgccttggaggtcatgtagatggccacaatcaggccaaacagtccgatagccgagccaaaaatctccacaatgaggatcttgacgaagagcgccgagttggccgcatccgccagggcagcgccggatcccacgatgcccacagcaatgccgcaggccacgttcaccattccaacgcagagacctgccccaaaagtagcgaatcccgtaaacatattggtcgccatgaccgtgctgtcggtgatcagacgcacgctgctgaacttgttgacgttgccggacagcaggatggccgtgatcaggccatagatggccaccgcctcgcaaaagatgactgagatcaggttcttggtcttgatgcgaggcgatcgcactccgccgcccgccacactgcatccaatcatgtagattccactggcggcgcccagaacggacagggcgcaggcgaggaagatgcccatgccggaccacaggaagggattcgaggtgtacaggaaccagccgagccccatgcgctcacccatattgaccatcacgttggcgaagattatgccaaccgcgcccaacgaggcggcgcccagtacgaacagcataaagaataatccaaaactcatcttagagatcatcttttaagcgaaaagcttcgaattaacagaatataaagaatcgattttaagttggcacggtggaatgaaatcttttcgaactgacaggataatcatttcttatagaacatataaatgatatgtagaaatgaatgccaataaaaacagaaggaataaaatacatttgtgtatttagttagaagatgaaatgattacatagcaacttatgtaagtcggcatcaattcatggaaatgcagaaaatccgcagcttaacgattcgacttggccacgcgctccaactcgtccttcttcttgatggcgtaggagttggaggatcccttggcggcgttgatcagctcatcagccagacactcggccaccgtcttgatgttgcggaaggcagcctcacgtgctccagtgcagattagccaaattgcctgcaaaaaaacattcagttattaactttattgtgtcaagttctattttgacttattataatggataaaaataactttctgctactgctttctaattatttacattgaaatcggtatgtattgtacctattattttaaatttaagcagtgtccaagtgcctgtaagaattacgtagataactttcttaactacaagaagttccctgaaaatgactcattttaacttcatacgactttgtggaatgcgaacacgattacctggttgacacgacgcaagggcgacacatcgactgcctggcggcgcacagtgccggcgcgtccgattcgcgtggagtcctcgcgcggaccggaattgacgatggcgttgacggtgacctgaagcggattctccgaggttagcagatggatgatctcgaaggcgtgcttgacgatgcggcaggcgaggagcttcttgccgttgctgcgccccttcatcatcagcccgctggtgaggcgctccacgatggggcattgggccttgcggaatctcttggccgcatagcgtccggcggagtgcggcaggtagcgggcgaacttctcctttacggcaatgtagtcctgcagcgagatgtcgctgatggagatgtcgtcgcaggcccagcgcccgaaaagcttgatttccggccactcggtgacctcctgggccggcattgtggtaacgacatcgtcagcccagtcctcctgctcctgcggtataacctggctcgcctcctggctgctggactccaccacttcctcggacatttcggggaaattaattcgagctagatctcaaaaggcgtgcgacttcgcgaagcgttcggcgcggaaagaaagaggatgaaaaagaaacggtaaaaggagctgtcactttcaaaatggccgcgacgtgcaacactgcgccgaggggctgccaactttggggcctttttttggcgggggttcaaatttcaggattgccctttgtgtttattagattacacattgttatcaaactggattcgttatggcaggtaccaaatgatctaattcttttattaacattaattttattgacatttactttttcttattgtccactccaccgatatacttttaaaaactttattcttagattaagaacattattgtttatttataactttggtaaattagttccgtaagactgccttttcagaagtcgctgaaaacgcgaatgaaccaaaagtgcccataatttaaatgcacatcaccatacatatatgcttggataaacaaatgcagcaaaagctcgggttctttttactgctgacttaacataagctgctagtattgctgctttcccattatgcactgatacactgaacgaaaagttgattcaaataagtttaattcgtaatattcatatccctcttccttgttcctgagttcgtttatttccttcctccttgttccaaagcttgtttaataatataatttttgcaccaaactgagaaccattttataaaacaaataggtgccatatatatgtatgaatgatgtgtgtaacgcactcataacattttagcgcgtgcttctgatatctgataagccatcgccgtagtcacactctcacacatattgataaacaaaacgtatatattttatttgttttaatatggaatactttctataataataataatgcgactgtgcaaccatctacaactgctgcctcaaacagtagcttgaaatatacaagtttatcgttttgcggtagtaaatataatacattttaaattagcctttgaagagccagcgtagaaacaaacataacaaactgcttaaaatcaaacacagacacac

SEQ ID NO: 15425 - DNA, 847 bp, DROSOPHILA
ccgaacgcttcgcgaagtcgcacgccttttgagatctagctcgaattaatttccccgaaatgtccgaggaagtggtggagtccagcagccaggaggcgagccaggttataccgcaggagcaggaggactgggctgacgatgtcgttaccacaatgccggcccaggaggtcaccgagtggccggaaatcaagcttttcgggcgctgggcctgcgacgacatctccatcagcgacatctcgctgcaggactacattgccgtaaaggagaagttcgcccgctacctgccgcactccgccggacgctatgcggccaagagattccgcaaggcccaatgccccatcgtggagcgcctcaccagcgggctgatgatgaaggggcgcagcaacggcaagaagctcctcgcctgccgcatcgtcaagcacgccttcgagatcatccatctgctaacctcggagaatccgcttcaggtcaccgtcaacgccatcgtcaattccggtccgcgcgaggactccacgcgaatcggacgcgccggcactgtgcgccgccaggcagtcgatgtgtcgcccttgcgtcgtgtcaaccaggcaatttggctaatctgcactggagcacgtgaggctgccttccgcaacatcaagacggtggccgagtgtctggctgatgagctgatcaacgccgccaagggatcctccaactcctacgccatcaagaagaaggacgagttggagcgcgtggccaagtcgaatcgttaagctgcggattttctgcatttccatgaattgatgccgacttacataagttgctatgtaatcatttcatcttctaactaaatacacaaatgtatttt

SEQ ID NO: 15426 - protein, 230 aa, DROSOPHILA
MSEEVVESSSQEASQVIPQEQEDWADDVVTTMPAQEVTEWPEIKLFGRWACDDISISDISLQDYIAVKEKFARYLPHSAGRYAAKRFRKAQCPIVERLTSGLMMKGRSNGKKLLACRIVKHAFEIIHLLTSENPLQVTVNAIVNSGPREDSTRIGRAGTVRRQAVDVSPLRRVNQAIWLICTGAREAAFRNIKTVAECLADELINAAKGSSNSYAIKKKDELERVAKSNR

SEQ ID NO: 15427 - DNA, 3073 bp, DROSOPHILA
ccagcggcaaggaaccacttggatgccacttcattaagctggagaacaagccagactgcggttgcgaaataatgtccaaatacgagttgataagcgcctgggtgcagttaaagctaatgcgggcagagatgggacactgcacacgcatctcgctacgggattttgagccaatgctggaggagaagctgacgttaatttcgctggagcagcagcttcatgactattataacacaagtatgccgcagctactgtccaacttgtgtgagtttttgaagctgctggacacggtacccgctggagattacctgctgcgatactcacccaagtacaaggataagttcctgctgtgcattgtcaccaaggaggccacgccacagagttttcagctacaccagctcctcacggaatccatccccagcgaccaagccttccttacgcaaagcagctaccttccgatctcgcccactctttgtggccgcctgcacgaggagctccatctactgccctgtgcatttccagcaaaagccaacggtcgctctgtccagcgtcgaaaggtggtggtgcccataccagagccctccagacaagctccagtaagacggcaacgtttaaaaaagtggagcgaagcccaaactcgagaatttcgacgtcgatgtaaggtggatcaaaagaaaagagctcgggctcgcaagacagcagcggccaacaaagaaaaaatagagctggagaagattatgacgttgtaaaaaccgcactctgattgcataagttgattactattagggatgtagttactaactgttacaaaaccaaaaggtgatccccatagtggagttaaccgctcggcgtaaggataagagttaagtttatattgttatgtatcggaataataaaaattgaacgcggtgcttgtggcgcgagcaacaaagttttgatacattttgagatgcaccagaatttacactcatattcataacttttcattttttaaagcttttatttacgttacacaggcacctaacttctcagacttattctcatcattctctagccatttcttcaacatttcctcatcgtgaataacgcgaatgccttcatattttatgttcacttggctcgttttctgcagaatgtcctgataggcggccgtcaagggttgctgcactggctctttatacacatagttctcgccctaaaacaaaacattttagtggtttaaaccaaacgaagatatagtattaacataccaaatcgtatgtgcgatccgagtccaactcgcccttgtaggcaacaaagggaacttgaaccacgggcgggctctccttctttctgcccacccacgactcgggttgatcgtgccattcggtcgtcaggttgcaaggcttgtagccatcgggcagacaaaactctcgggccaccacgaaggcttcaatgctggagttgcgcgaggcggagggcttgaacacgcatacgttcttaaagaaccgcttgagctgagtgtacaaccgactggtcctgtctgcccggtagatcttggacacgaaggagcctccctcttccagtatgaaggtggatatgctgagggcggagagaagtagttcgccctgaacgtacgagtcaaagtcgtgcattccagtagaatcgggagcgccatcgctaacaacaatctgtgccttctcgccgccaaagaactcaattatggcctcggctgtcgactccttgctgatgtccgcccgcagttgtttgactccttcgatcggagccattccctgcaggtctacggcgatgatctttaccttttcccgttcctctggcggcagaggctcgtacaagcgtttggccagcacctgtgaccagctgccaggagcggcgcaaaggtccacggctcgggtgagacctgaaataagtggacaattagaatcgctccgaaaaacacgcggttggatctgcaccttctagcaactgaaaggtctcatccgcctggagcagtttgaaagcacttcgtgcacgccatccctgctccttggccaggcggtagaatatgtctcgtttatccttcgaagtcctgcccatttaaaaataataaaaacaaaagggtatcagctgtgatacgacatctacagtgctgtcgttttagccgttttcccttcaactttgggagtttattggtattaaaaacattaaaaagtttgcaagtgtgagctcgaatttatagttttaaaatatatatcattcattttgtgttaaaatataattttatatttaaatggtagattaggaaaaagaatcaattttgtttccaaatccatagaaatagctacaaaatgtagtttagctttaatcttcataatattgagttacatattcattatatttgaatttgtttatttgaaataaaacacgtacagctaaaatacatatctagttggattttcaatattaatagctaaatggctaaatttgcacaatctaaatttgcacttctgacagcgccatcctatttctttgttatcgataaatttcatgcaaaataacaaatgattgtgttgttgcagcccagcccgcagattgagaaattcctgctatgagaacaggaaaatcggcgagatcccgattcccaaattcaacgtagcccgccccgacaacaaaaaacgaataatggccaagttgaagaaactgcatatgagctccaaccttgatgacctggagaagatgtccatcattccggatctgcgcagcaagggcatgaaaatgtaagtggacaccgcgatttggtgctgatgcggctgttttgatttacctggcattcttcgcagcctactgaacaccgcccgcaaactgtacatgaccgccgaggagtacagactggatggcgacgaggaactggcctacatcacctacatgaagtacttcaatatgctgaccgcaattcacaaaaaatccgattaccccagccacaagacgacggtgcgccagatgctgggcgacaccgagtcgaatcgccgcattatggacacgctggaggagattatcaactctctgcggcatcgttatgctcagcagcaccaagcgc

SEQ ID NO: 15428 - DNA, 963 bp, DROSOPHILA
atgggcaggacttcgaaggataaacgagacatattctaccgcctggccaaggagcagggatggcgtgcacgaagtgctttcaaactgctccaggcggatgagacctttcagttgctagaaggtctcacccgagccgtggacctttgcgccgctcctggcagctggtcacaggtgctggccaaacgcttgtacgagcctctgccgccagaggaacgggaaaaggtaaagatcatcgccgtagacctgcagggaatggctccgatcgaaggagtcaaacaactgcgggcggacatcagcaaggagtcgacagccgaggccataattgagttctttggcggcgagaaggcacagattgttgttagcgatggcgctcccgattctactggaatgcacgactttgactcgtacgttcagggcgaactacttctctccgccctcagcatatccaccttcatactggaagagggaggctccttcgtgtccaagatctaccgggcagacaggaccagtcggttgtacactcagctcaagcggttctttaagaacgtatgcgtgttcaagccctccgcctcgcgcaactccagcattgaagccttcgtggtggcccgagagttttgtctgcccgatggctacaagccttgcaacctgacgaccgaatggcacgatcaacccgagtcgtgggtgggcagaaagaaggagagcccgcccgtggttcaagttccctttgttgcctacaagggcgagttggactcggatcgcacatacgatttgggcgagaactatgtgtataaagagccagtgcagcaacccttgacggccgcctatcaggacattctgcagaaaacgagccaagtgaacataaaatatgaaggcattcgcgttattcacgatgaggaaatgttgaagaaatggctagagaatgatgagaataagtctgagaagttaggtgcctgtgtaacgtaa

SEQ ID NO: 15429 - protein, 320 aa, DROSOPHILA
MGRTSKDKRDIFYRLAKEQGWRARSAFKLLQADETFQLLEGLTRAVDLCAAPGSWSQVLAKRLYEPLPPEEREKVKIIAVDLQGMAPIEGVKQLRADISKESTAEAIIEFFGGEKAQIVVSDGAPDSTGMHDFDSYVQGELLLSALSISTFILEEGGSFVSKIYRADRTSRLYTQLKRFFKNVCVFKPSASRNSSIEAFVVAREFCLPDGYKPCNLTTEWHDQPESWVGRKKESPPVVQVPFVAYKGELDSDRTYDLGENYVYKEPVQQPLTAAYQDILQKTSQVNIKYEGIRVIHDEEMLKKWLENDENKSEKLGACVT

SEQ ID NO: 15430 - DNA, 6182 bp, DROSOPHILA
aaccacaacgattgcctacaaaatatatattatatatatgtatactaaatagaaaccaatataatcaagcaaaacacacaaaatattcaaatatcaaacaaagctaatctaacccaaaagtaaaaagtattcccagtgtatttttctagtaaaactaaagtaaaaatataaaaaaaaatcaaccaaattcatttcaaacaaaatgcaataattcaataataattcaaaactcgaacaaaaataaaaacaccaacggcagcagagctggtgtgcattttcatcgtaaaaccacaatattttgaatacacaaaacaaacaaaaaaaatatttcaagaacaacaactttaaaaagaaatacaacctacaacagacccaggaaggaacttcaaactaccaaaacaaaccaacaacgttacaatatttgtcggcattttttacaagaaatataaaaacacaaaacaacaaggaacacaaaaaaccaacaaacaaacaaaccaacaacagcaaaggaaagctaagtaaaacaaccacattttttgcggggaatgccctcaagaaaagacaaaaatttttattaacttcgaagacaaggaatttcagtgcctcttgtgccagtgtttagccaaaatatatatacacaaaaaacaaaacaaacaacaaataaaaaacaaatacgtatttattgcttagttttttctctttgatataaaactacacgaaaaatataaaaaaaagaaaaaaaaaacataaaaacaaaatttaacagaagtgatatcacgaaatctgttttcggtcatttttcgcgctttcttcaactttaactctcgttccaataattctcgtcattcgcatccattattggtaaatcggattaaaccactgaccatccgataacacctcttacatcgcaatcaccatcgccaagaaccagtctccaatttgctagtccttatcagcattttctttgtttgttaatatccaatcaatcaatcaatcaaacatgaatacccaatcgaaggtgtaccgtaccggcgaaggtaagtccgaaattgggtctcttattaatctagtttatataagtccttgttttaaactattggcatgttaaactatttggcatgttgttattttagtccttataatgtttgattttatttcccctgcaatgctgtagaaatctatgacaacttgccatgcgatagttatttcaacatgaatgccattcgcaacctgggaatcccaacaacgtttccgaccattggaacatttacacttgactctactacgttgggactgcagccgcagggtcagggcccgtcgccccagcagcagcagcatcaacagcaacaacaacagcagcagcagcaacatcagcagaatatgcaccaccatcaacatcagcagcaacacatgcagcagcagcagcaacaacaacaacatcagcagcaacaccaacagcagcaacatcaacaacaacagcaacatcagcagcagcagcagcagcaacaacagcatccaaccattggaatgttcgatgccaacgaggttaacgatgtcatccagaatcctcctcaaatcggggtattccagtctaacagcgttctgaccaacggtgccggcagtggctcctcgatctttggctcccaatcgagcaattcatcggcggcagctgcagatcccagccagaccacccgggaaactggcatcattgaaaagttgttggtgagtagaagagagacactttcgcgtgaccacaatatctaattttactttatttgttttcatctcaattatagcattcgtatggattcattcagtgctgtgagcggcaggcgcgtcttttctttcatttctcgcaattcagcggtaatattgatcatttgaaaatcggagatcccgtggagtttgagatgacctatgatcgccgcaccggcaagccgatagctagtcaagtatcaaaaatagccccagaggttgttctctccgaggagcgggtcaccggcacggtgaccaccgagctgcgcaccgatagcgccaacaatgtgcttaactccagcgagaccacaggtcgcataagctatgagaaccgaggcgaatgcttctttttaccctataccaaagacgatgtggaaggtaatgtcaacttgcgcgctggcgacaaggtcagctttcaaatcgcaacgaaccaaaggtaagcaagcattgattttaaaccatttaaaattcatggttaactaacgaaccttttccattgcagaggtaatctaggcgcctgccatattcgcctggaaaatccggcccagccggttaagtatcgtggggttgtctgctcgatgaaggagtcgtttggctttatcgaacgtgccgatgtggtcaaggagattttcttccacttctcagaggctgagggcaatgttgagctgcgtcccggtgacgatgtcgagttcaccatccagacgcggagcgtaagtggcagtggcgatccgaccaatcccaatatgctccaatcaaaaatgcagtctgcatctgtgcctccgcagggccgtgaatttgcgtgcaacatcacgcgcctagctccgggatcagtgatctttgaggacgtcgatagcacggtgtataagggccaggtgcttaagtcgcttgatcgcaacaacccggtgcgccagaacaatgatcccttgccgggtcgtattcgttatagggccttggattactccgaagtggaggttcctttcggggacaaggatcaaaagggtgacttcaccctgcgccacggcgattgggtgcagttcctgcttgccaccgatcggcgtgatcaattgcagagggccacctccattgccctgttggacgagactttcaaggtttccggcgagaagcgggagcagggcaccattgcctctctcaaggagggcttcggattcctgcgctgcgtagagcgtcaggctcgtttatttttccactttactgaagttttagatacggtaagatagttatttatatttggttatatgggagccagtatatttatcatttacttcttttttaatgtagagccgcgaaatcgatatcaatgatgaggtagaattcactgtcattcaggagcctggattggcctataataactcgcgtttgcaggccattcgcattaaacacttgccgcccaactcagtgcaatttgaaactctagtggccagcaacatagaaggtaggtttctctagtactattccaaattcaagccctactaattcgtgaaatgtttgaacaggatgtgtaactcgcgaggcgcctaagagcccaattaaatctcaagatcgcgtcgagggcggtgtgattacctatgaacatgccgatgttaaaaagactataatgtattttcttaaagactgcgaaaaaccaccaaggattggggagcgcgtacgcttcgatatttacatggtaagttcattaataaaacatgtttaacgatcttagtctaatgtgatttaaacgaacaggtcaaacgtaacaaggagtgtatagccgtcaacgtacagcaagtatccctgcatcagcagcaacaacagcagcaacagcagttgcatcttaatcagtcgaatgctggggcaaatatcaaccaaaatgaccagctgggaggattgtcgaatggaatcagtagcagcagctcgaatgcttcgctacagaatggctatgtcatgcacggcagccctggcggcagcaccagcagcgtgggcagcaacaatccggttcatctggatgaattcaagatggagaacaacaaccatgccggatccgatgccggtcaggtgtaccgtggcttcatagccgttatgaaggagaactttggattcattgagactttgtcccacgatgaggaggtcttctttcactttagcaactatatgggcaatcccaattggttggagctgggtcaggaggtggagtacactcttgctcgtaatgggaatacatccgtttctggaaactgtctgcctgcggaaaatgtccgtatgctgccaaagaactctattccccagccggctgtgctggaaaccacacacaatggcgtggtagcacgtccactgcgttgcatcaatcccgaccagcaggaatatgccggtctcattgaaattctcgatgagctacgtaccactgtcatttcgcaacacgaattcgggattactagtctggtgaacaagagggatctgctccagaagggcgatctcgttagcttccgcatcgatgagagtggtcgagcagcatgcgtgaatgccgtaaggcagaagaagcgtgccactgtggactccatcaagggtcagtttggttttcttaactttgaggtggaggacggcaaaaaactgttcttccacatgtctgaggtgcagggcaatactgtcgctttacatccaggcgataccgtggagttctccgtggtcaccaatcaggtgagttgactgctactacttgtattgaatacatataaatttatttaatcaatcagcgcaatggaaagtcgtcggcttgcaatgttctgaaaataaacgatcgtccggatcgtctgatctcgcgccttaagctcaacggcgatgacactgtgccgcgactgatcctcattcgcgcacccaagggaccgcagggcaagggcttttccgttctagctcgtcatccacgcattccaggtgagacggcgtaaaatatattgtatataagattattttaacgttacgaaattgaactttgcaggcaacttggtggagtagattgctgaagaagttgtataagcaagccaggatattcgatgcacatcaaagacaattacctacagctatatatattcttgtacgcaagccaacaaactaacagcaacgtgaactggtcgcccctaccatacatacacaaacatttataacgaatataatccctagaaccaagcaaacactattggaaacgattgtaattcataataatggatagcaaaggcatacatttaatatttacgaaactacttaacggcaactcaaacaagagagctcttcgtgtctgaaatcgaaacttatttgtaatattaccaactaacccctccaccattgtaacgctttgttttcaactcggcgcaacggtgatccgagttgtggccaggttgaagcaaaacgaaattgaaatccaagtgtctgagagatgaaaccaaaacgtgtgtatacgtatactattttctactagtttgctttaatttaaactaattaaaaaccgattgggataagtgatgagagcaaggaaacgagcaacataataatctatgaagtatttattctagaattcttctggcaacgaactccttgcataattgcgttagaaatcgtataaatgcaacaatctattaacatttatctatggctggcatagttcctgcttctattgtatcttgatctactcgtattctttggtacttctcgaaaaatgttctttcaccgctttcaatcttactgttaacgatttatattaattgaacaattgttgtactacgactgcaagttatgtaggacaacggtcgcagcagcgacggcaaacaaagaaatcaatcaatggagtgaagcatggagaaagtatttatatctacaagtacatatatattttacatattcattaacgtaaacatacctaatattaatgttattatttcccatgatttgatcttcgcttgtataaacacgtcaagtggttttgccaattctttagttgcattcagacagttgcattaacttattacatagcaaacatattatacaaaaaccaaacatacatgctacatcgcaaatatttatttaaagcaacaacaaattgcattacgaaaactcacaaaaaaaaattatccagaagagatggaaattacgaaaagttttgtgtaacgatgaagagcaaatttaatttgctgcgccaaatctgttgaaaccatttaatgaagattataaaaataatttttaaaaaatctacatatacgaagaaaaaaaaagctacaaaaaaataaacaaaaaaaaaacaaacaagcaaactttatgagcgtgtcgtgtgtcggtaacaaagagcaaatattgtgaaaattatgaatttcaattactaaagaaacaaaaactaaatgtaacaaaaacatgataaaaaaaaacacttaacaagctaacaacaa

SEQ ID NO: 15431 - DNA, 3595 bp, DROSOPHILA
atgaatacccaatcgaaggtgtaccgtaccggcgaagaaatctatgacaacttgccatgcgatagttatttcaacatgaatgccattcgcaacctgggaatcccaacaacgtttccgaccattggaacatttacacttgactctactacgttgggactgcagccgcagggtcagggcccgtcgccccagcagcagcagcatcaacagcaacaacaacagcagcagcagcaacatcagcagaatatgcaccaccatcaacatcagcagcaacacatgcagcagcagcagcaacaacaacaacatcagcagcaacaccaacagcagcaacatcaacaacaacagcaacatcagcagcagcagcagcagcaacaacagcatccaaccattggaatgttcgatgccaacgaggttaacgatgtcatccagaatcctcctcaaatcggggtattccagtctaacagcgttctgaccaacggtgccggcagtggctcctcgatctttggctcccaatcgagcaattcatcggcggcagctgcagatcccagccagaccacccgggaaactggcatcattgaaaagttgttgcattcgtatggattcattcagtgctgtgagcggcaggcgcgtcttttctttcatttctcgcaattcagcggtaatattgatcatttgaaaatcggagatcccgtggagtttgagatgacctatgatcgccgcaccggcaagccgatagctagtcaagtatcaaaaatagccccagaggttgttctctccgaggagcgggtcaccggcacggtgaccaccgagctgcgcaccgatagcgccaacaatgtgcttaactccagcgagaccacaggtcgcataagctatgagaaccgaggcgaatgcttctttttaccctataccaaagacgatgtggaaggtaatgtcaacttgcgcgctggcgacaaggtcagctttcaaatcgcaacgaaccaaagaggtaatctaggcgcctgccatattcgcctggaaaatccggcccagccggttaagtatcgtggggttgtctgctcgatgaaggagtcgtttggctttatcgaacgtgccgatgtggtcaaggagattttcttccacttctcagaggctgagggcaatgttgagctgcgtcccggtgacgatgtcgagttcaccatccagacgcggagcgtaagtggcagtggcgatccgaccaatcccaatatgctccaatcaaaaatgcagtctgcatctgtgcctccgcagggccgtgaatttgcgtgcaacatcacgcgcctagctccgggatcagtgatctttgaggacgtcgatagcacggtgtataagggccaggtgcttaagtcgcttgatcgcaacaacccggtgcgccagaacaatgatcccttgccgggtcgtattcgttatagggccttggattactccgaagtggaggttcctttcggggacaaggatcaaaagggtgacttcaccctgcgccacggcgattgggtgcagttcctgcttgccaccgatcggcgtgatcaattgcagagggccacctccattgccctgttggacgagactttcaaggtttccggcgagaagcgggagcagggcaccattgcctctctcaaggagggcttcggattcctgcgctgcgtagagcgtcaggctcgtttatttttccactttactgaagttttagatacgagccgcgaaatcgatatcaatgatgaggtagaattcactgtcattcaggagcctggattggcctataataactcgcgtttgcaggccattcgcattaaacacttgccgcccaactcagtgcaatttgaaactctagtggccagcaacatagaaggatgtgtaactcgcgaggcgcctaagagcccaattaaatctcaagatcgcgtcgagggcggtgtgattacctatgaacatgccgatgttaaaaagactataatgtattttcttaaagactgcgaaaaaccaccaaggattggggagcgcgtacgcttcgatatttacatggtcaaacgtaacaaggagtgtatagccgtcaacgtacagcaagtatccctgcatcagcagcaacaacagcagcaacagcagttgcatcttaatcagtcgaatgctggggcaaatatcaaccaaaatgaccagctgggaggattgtcgaatggaatcagtagcagcagctcgaatgcttcgctacagaatggctatgtcatgcacggcagccctggcggcagcaccagcagcgtgggcagcaacaatccggttcatctggatgaattcaagatggagaacaacaaccatgccggatccgatgccggtcaggtgtaccgtggcttcatagccgttatgaaggagaactttggattcattgagactttgtcccacgatgaggaggtcttctttcactttagcaactatatgggcaatcccaattggttggagctgggtcaggaggtggagtacactcttgctcgtaatgggaatacatccgtttctggaaactgtctgcctgcggaaaatgtccgtatgctgccaaagaactctattccccagccggctgtgctggaaaccacacacaatggcgtggtagcacgtccactgcgttgcatcaatcccgaccagcaggaatatgccggtctcattgaaattctcgatgagctacgtaccactgtcatttcgcaacacgaattcgggattactagtctggtgaacaagagggatctgctccagaagggcgatctcgttagcttccgcatcgatgagagtggtcgagcagcatgcgtgaatgccgtaaggcagaagaagcgtgccactgtggactccatcaagggtcagtttggttttcttaactttgaggtggaggacggcaaaaaactgttcttccacatgtctgaggtgcagggcaatactgtcgctttacatccaggcgataccgtggagttctccgtggtcaccaatcagcgcaatggaaagtcgtcggcttgcaatgttctgaaaataaacgatcgtccggatcgtctgatctcgcgccttaagctcaacggcgatgacactgtgccgcgactgatcctcattcgcgcacccaagggaccgcagggcaagggcttttccgttctagctcgtcatccacgcattccaggcaacttggtggagtagattgctgaagaagttgtataagcaagccaggatattcgatgcacatcaaagacaattacctacagctatatatattcttgtacgcaagccaacaaactaacagcaacgtgaactggtcgcccctaccatacatacacaaacatttataacgaatataatccctagaaccaagcaaacactattggaaacgattgtaattcataataatggatagcaaaggcatacatttaatatttacgaaactacttaacggcaactcaaacaagagagctcttcgtgtctgaaatcgaaacttatttgtaatattaccaactaacccctccaccattgtaacgctttgttttcaactcggcgcaacggtgatccgagttgtggccaggttgaagcaaaacgaaattgaaatccaagtgtctgagagatg

SEQ ID NO: 15432 - protein, 1057 aa, DROSOPHILA
MNTQSKVYRTGEEIYDNLPCDSYFNMNAIRNLGIPTTFPTIGTFTLDSTTLGLQPQGQGPSPQQQQHQQQQQQQQQQHQQNMHHHQHQQQHMQQQQQQQQHQQQHQQQQHQQQQQHQQQQQQQQQHPTIGMFDANEVNDVIQNPPQIGVFQSNSVLTNGAGSGSSIFGSQSSNSSAAAADPSQTTRETGIIEKLLHSYGFIQCCERQARLFFHFSQFSGNIDHLKIGDPVEFEMTYDRRTGKPIASQVSKIAPEVVLSEERVTGTVTTELRTDSANNVLNSSETTGRISYENRGECFFLPYTKDDVEGNVNLRAGDKVSFQIATNQRGNLGACHIRLENPAQPVKYRGVVCSMKESFGFIERADVVKEIFFHFSEAEGNVELRPGDDVEFTIQTRSVSGSGDPTNPNMLQSKMQSASVPPQGREFACNITRLAPGSVIFEDVDSTVYKGQVLKSLDRNNPVRQNNDPLPGRIRYRALDYSEVEVPFGDKDQKGDFTLRHGDWVQFLLATDRRDQLQRATSIALLDETFKVSGEKREQGTIASLKEGFGFLRCVERQARLFFHFTEVLDTSREIDINDEVEFTVIQEPGLAYNNSRLQAIRIKHLPPNSVQFETLVASNIEGCVTREAPKSPIKSQDRVEGGVITYEHADVKKTIMYFLKDCEKPPRIGERVRFDIYMVKRNKECIAVNVQQVSLHQQQQQQQQQLHLNQSNAGANINQNDQLGGLSNGISSSSSNASLQNGYVMHGSPGGSTSSVGSNNPVHLDEFKMENNNHAGSDAGQVYRGFIAVMKENFGFIETLSHDEEVFFHFSNYMGNPNWLELGQEVEYTLARNGNTSVSGNCLPAENVRMLPKNSIPQPAVLETTHNGVVARPLRCINPDQQEYAGLIEILDELRTTVISQHEFGITSLVNKRDLLQKGDLVSFRIDESGRAACVNAVRQKKRATVDSIKGQFGFLNFEVEDGKKLFFHMSEVQGNTVALHPGDTVEFSVVTNQRNGKSSACNVLKINDRPDRLISRLKLNGDDTVPRLILIRAPKGPQGKGFSVLARHPRIPGNLVE

SEQ ID NO: 15433 - DNA, 9404 bp, DROSOPHILA
ttatgcaattgtacattcttagcttaacatcatatcgttcttcggatttcaacgtataagcggctacgccaaggctgaaaaaaacattcaggagcgaaaatgcttgtttgaccaacaaaaatatgaagatgttaaaaaagagtgagtgcagaattattgcagtccaaacacatgcatttattttaatttttgtcgttagcgctaaatgtgtcagcttacttggaataataatggtcgttagctggctgctcgaaataataacattttactcgggatcgaattcaaattacctgatactctgtgacatggtgaatggactccagggagtttgggtactgctcatttttctagtcgtgcgcaggcgtcgcacaataatattaaggtggtggtatgatcgtggttcccacgaaattgaaggcacagagctgcaagctcttagtaatagtcccacatagatatatagaattataatacaattacattacatacgttcaaatctgcgatcgccgttaatattacattattttttaattatattaaattctggtttatttgacctgtaaagaatgatgtgcttataagcaaatcaaattgatgaaaagagaaaaacattcgaaaattgctgaacagctgaacctgatatcctttaatagaatatatgttgttgcgggccacattaccgaaccatttcccaaacatatttgtgaaaatttaactttgtgtaaattgtggtttatttaaacttatataaatactattaaatattaaatgtttgctgtcacttatatggtcatataaagataaatagtcattttattgtaagaatgttttaccatctttgctaatactctaaaaggaaatgtgtaattaggcgtgcgtgttaccaaaatgagccatttctgtttttttgtggattgcggttgttttgaattatgatacgaagacaacgttttgtaacgtttcttaatacggcgatttcatcataagaataattgtgtatttacatgttatatgctacgtatatgggatccaattggtcggccagaaaaccatcccgtaaatgcatccgttgcttttcgccccgactattaataggcaccacacctagaaacaaaagtttccaaaatgaataattttcattagaaaaaatgtatcacaaacctggatcaacgaccactacaacgccgactataagctgatgatcttctaatactgtgtttgtgaccaagggaaccaaatccaaagcttctgattcattgccgtccaactcgacaacaacgactaataagttagtccaggtgaaaacggcgctgaataaaaaaaaataatgcgtgatcttttcaacaagtacgtctttaaggtcttaccactcagcaatttttttgtgacagcgcattaccgaattttcgatatcaattgggtgatagttcatgccacgtaaagagatcacttcatcaacagctccgactacatacactgcgtcgtgtagttcttgatcattagcattgcttgcgccgcctaccaggctatgctcggaatttccacccaaggaaacatttgaaaaatttagttgcaattgacttatcgaattcaaagattctgtatcactatcgcgacttgccacacttggtgtggtctcgtcaagcagtgatgctgattgcgagcattcggtgcggcgtaagaatcctaaatacccagtgcgtgcatatagttctgaggtggccccagttaccaatttcgcgttgaagtgatcattgtagtcagtttcgtcaccataaattgtaaagtaaccatttgcgttgtgaggagcttgaaccttaggaataaataaataataaattagttttgttaagatgattatgcagtttgtaaattgttacccagatttctcccaaatgcgagtcgccacagtggcccttagtttcgggatttgcaattatcacttttacgcctggtaaaagtttacctgattcaattacacacaacgaatttggcgctccacgctctaccagagcaacacgattatttcgcaatgctctcatatctacatacacttgagcactctctgcagaactagccccttggacacaaatggccggatttacacgacatccaaacgaagttgacacgcagcgcgtattcagaccaagggcttgaaatagcttgcagaactgctgggtcagttgcactctggggcgctcttctgccaccacgacacacgtccgtacgcatctcaaatctatgtttcgttgctttaaggaaggtatagaattgctgagagctttagtgcataactcaattacaccatatgaacagaatgtgtcgcgaacgcggtgttgcgatagagttgacagccataaactgggattcgcttcgacctcgtagggcgcgataagtatagaatggtggccactgtatactccgataagagtccacataacaaatccaaggccgcagtacggatccaaacataaagcaacatgtcgagaagggtacagctcacaagccaattttaaactggcgcacagactagagagagatctgttggatagacaaaaattgaatacacacatttcgttaagactcaattcgatctatgtaccgatgcgtaatgttaacaccgctaagacgtccacaagttgatacgctaaagtccaaataggcgctagagtcaaaggaaaccgtggctatgccggcatattttcgtttcgggttgtcatcaatatctaatatagggggccatgtctttgggtcaatcgaggttgctgcctctcgcgatttgagtaacttaataattggctgtatggagagtacaatgccacttttagagacatcaacaatcatccgaacagtgggtaacgtggtatttaaattttgtggatgtggaggccgaatggtaattggtattgcacccaaataaaggcatccataaaatgcacacagcaaatcgagacctgggggaaatataagcgctgcgggaaaatcggacttcattaacattcctatagtgtgtacacagaaaaacttaccaacgtggtctcctggctcaattcttcctcgttcttgtaacaatgccgctattttctctgcccgcttatgcaactcagagcatgtcagtgttttcgcgatggcacctgaagcgcaagtctagaattcgtttctttcaaaaaggaacaaaacttacccttggagttcagcagtgtaaatattatatgatcgggggacgtgtttgctcgccaacgcaacacacctgttatcaattgaggctgttgaagtttggacagttttttagtcgcaattttcgacattagatatgttaaccgacctttctttcgcaatcttctgctaggccaacatcccgtccatgggcttcagcaaggcgattgccctgaactaaatttccaaccatcacagaggctggtcctacacccgtgtctgtaataccacatccagatgatgagcttaattttgcggcagtttgcacaccttatttgtttgaggaatggttagtagtagaatgatttatcggttttgtacaaggattcattacagaagtgattaatttatgcgatttcattagttatgttggcatttgtgtttgttgttgatataatacagtgttgttatttggtttttgcagtgagtgttgttgtggtcatagaagtaatcgcagcattgttgaagggttggtggttaaaaatagaggaaagcaatatttgtattttattaaggtaaataaagcacagaaagtccaacaagccaatttgtaacaattcttaaaaatcaagtatgcggagaacttaccttgatgtagttcccgtggctttggtagattggtaacacatgtatgtgggcacattaaaacattcgctgggtggagagatccctccaagaaccttcgccgtgcttcgcataaatgtatgcccccaagaggagtctttggcaaatgattcggcggaaccaatgccaggcagtaaattccgacttggtgaatggagtctactgcttgcagaacacgtgacatccattggaaactttcttcctccgagcagtccggacgttgttcagcaatgacgcacacgcgttcgtcgcgcaaaactttaatgctaaatacagcaatgcgtcctcgataaataaaccgcatgggttccacagctaacactgtggcaataatgtcatccgcattgtgctttctaccggtaacggtcatcagaccatcacgggacccgcacacaaagaccaagccacccggaccaagaaagcccagtagacctgatctaacgtaaaagtcttcgccaattggtttggaaataatgttcaccgtgccatttccatcttttggttgttccaattcttctaatagaggctgaaccttgaatgttgaatttgtcattccgtcgagaccaaaataactggcgcttgtggatccgctagtaacgcatatttcgccgacttgatcggttttgcacagcacaggtggtccttccgatcgaacaaccaccatttgtgcagctggcataacttgaccacagtcctgcaaagtgagcgatgttaatgagtcttcactgtcaacgcgtacaactccatgcgatagtgctgccattgaaagcacaccacgtccagtagctgacggactaaatccacaagatcctcgcccaggacgccgaagggaaacagtaaatacttcggagctactggcacatggacaaatcgcatctgagcgtaatcctttagcttgaaaaacactcaagaactggtcacacgaggataacgaccaggggttggctccatcggctacaagcaacatacgtagagaggaaagcgatatatccttatgatctttagtagcgagtagtccccaatgtagatctcgactcttaaccaagcaacaagaagctcggtgttttgttattaattgcatccagctcgacggacgcagtttcattaatgcgtagggtatgaaaataacgtgcataccatttagaacggatgtcaagaccgaatgccataatccaacttcacgcttgaagtccaatacacatacaattgtctcgccttcggtataatggcaggccatagtcaaagcacggcaatgattaatcatcgctgcgcgagtaacagtgacacctgcaaagcagatttataattatttataaatatttggatgctgatatatgttgcacttacccataacactgccttccttatctgtcgtgtattctatataagctgctgccgaatcatcggcccgtaaattaccaacattgaattctttgggcggcttaggtaaatgctcagtcacaaaccactgcaagcgcggccagccctttaattttgctatttcccccgtggtggttgatttaggaagaccttttaagcaagcttctgaggtaagagctacagttatgccacaagaactcaataagaatcccacttgctgcggaggagtatccgagctagacagcggcaattctattggaaggggtactaagccccgaaacatacaaccataccaggctgtaatgaaactgtaatttatctgattaatattggatacaaatacatcaaagatttgtcttgttctttagaggttacgcaaggactggaaatgaaggaatttcgatagaataatcacataaacacacatactaaccttaaggggtcattattggggtaaaccagggccacacgatcgccgggcttcagtgttacttgctcaggacccttgctaaatatttttgtggacaaagcatgggcaatcttttgtgcgcgcgaaagtagcttgccatatgttaaggtagttgttacttttccattcggatcgagcactgtagccattggacttttaaacgagtttgttccataacgttggagtgcgcattcgagcgttcttggaagtcctgcaggtatggatagctgctcgccttgcacaggagtcattgtgctgccctctggtttgggagcattgggatctttcgtattggcagcaatctccagttcaatgtcgttatcctcatagaactccggtagtgggcgacgcttgggtcttttaagggtgttaagcagttgctgaatcttagccgacaccttccacttgccattggcatctgtctcgttcagttcattttgagaaacattaacatatcgagtcactcgatccgcagcacgatgtgcattattaaactgtgtgatgtcgggagcattgtctacaaacaaacgatgattaaaacaaaatcatacaaaaaacacataaactacactttagtggaatttactttattccgcggtgtattaaattacttacactgtttttgtttaaacgctttgtccgaaaagtcattttcccgcttgtatgcaatcggcgggtagtccgaacttaaaggttctgaagttggctgtgtaatgattatttaattaattaaaaaactacatttttatgcaatctgcctaagtttatataccctaacttcaattatacaaagcaatttaatagaaaaaaatcatagtctcgatgattcttatgataaaaagttttaaatttgtatacactagttaaagagtataattcttttaatacatatatttcggtcttagtctgttcacatctgaacagtatatatttactgcaataaatattcacaatcaacatattgtcgaagctagctttttttcctctttaaatgtattattattatattactcacaagtgggggtaagttttgcggtggtcgcctttctggagcgctattcggcgccgtatacttttgatttgtaatttggttctgtttcacgtctgtcctcgcatgctgctgtgaacccatcgatgattcacgaattggaggtttaattatcggttctggtggcagtatgctattgcttatatgatcccgtggataattgtactccttgtcgggggaaattgtctcctcgggtatggattcgtcatccgtcgatgagtccagctcatcattgcacccagggcttcggtttaatacagatgtgcgcttcgatggcattggaaggctgggttttggccgtcccttaagagctgcaagggcctgttgcacagcctcttgtcgtacttctaggggtcagatgatcagagataaaatgttgttgctgtaacttgttctactaaccagaatgataacgtttctcattgtgcgttactttgcgctgtgtgcgtcgttgacgatgctgactattattagttgactgttggttctgaaaagcacttggttcgcgagtgttctgatacccgggatcgccgactgctccaccctgcggtcgcatattttcgtagccaggagccccagcatttccgctctgtggtgccgatgacaagctcatggcggcttgctgatggaagtcaatttttttggaatgtctttgctgcgaggaggacagggagggcacttcagtcacataactgtagccctcgctggacacaatgacgccgtcgttattgatgtttccgtggttggtgctgttgttggcatttttaacgttgtagtatggcggtggcggcgtacttttcactttatcgcctgttcacaacaaaaggatcaagaactttctggtgacgaccaaacgaccaaatatcaatgttttcgaacataccttctggcttctttaggaacggctgcaacagcttcgcccttttcttttcgtagcctttctgcgtaatgtcacctagaaaagcagatggaattgttttcttaacgattaatatgtccgctgggcctcgtcgttttttgaaaagcgtggagtagcgactgaatcatgtattcatgctgaaagccacacaacacaacacacacacttttcttttaattggtcggtccccgactatatgtgggcagctttcagcgaaagaaaagccgagaacagcacttgtaatcccatttgggggcgacaagtatccaatgatttgaatcagaccagactacgtctgccacagttttcacgcgattttctacaactcagtcgccgcactttaacaacaatattttatttttgtgtgtattattcaaataggtataccttccgacagctctaagtccagttcggcgagcttctcgcggacgtagccaggcagcgaggcagtgtgctccatggcagatgaaaagtgtggctttagggttttgttctatcctcttccttggaggattcgtctaaactttggctggtcgcagtacacaaacacacccagacaccgctactttcccacttcgttgtcaaaaatcgatcgatttgccatttattctatttcacattttgccgacgcaaataaatacatccgtacttgcgcagcaccagtactttgggttagttagaaaacacgatattacgaatgtcttttacgaatttgcacaatgaaagtaaacaaagaaaaatagcagtacaaatcgattttatgaactagcgaaaaattgataactatttcttcatactcttgggacaacggcctttttcaattttcgagatgcggtcacactgcccaagtaatcgaaccacgaatttaagtgttatttttaatgatattaggcatagaaccattacaattaaaaagctctattatttattactttaatcgcttgtctcttaaaattcgattcaacaaaagcaattggtggcattttgctaggtagccctgaaatactgtagagactatcgatatctgcacctaaggcgcctattatcacattcggattacgaagacaaagacatgcgaaacctggatacgattagtggcgaagaaaagcaaagtcctgccaacttagtctaaattgtttctaagccggctgcctatacgcctgcgttttgagcaaagcggtagtatctttttcggaaccatcgatagcttgtcatctccagtaaaaatgcgtgagtttatttaaaaaaaacgctaggcatacaactaattattcttatgatgcagagaacttgaagatccaagaggaagtcaattcattgatgcgtctaggccagcacttcgatgaccagttaaagctggctagcgtcgagttgggcgatttctcggacgatgacctggcgctccttgacaaatgcgcccaatattattcacttttgcacattcacgacatcaatctgaactacttgcgcgacttctattgtgccaagaagagggaatgcatagaaaaccggcagaccacagtgcagcaacgcgtagagctgcagcgcatcctctcgtccatcgaggaggcgactagggacgtagttatgttggagaggtattggtgaacaaatccctttaatagttgaatccctgaccaaaaccattcttctgcagatttaatgctgctgcggaagagcggctcatcccggatatcgtcgtaatgcagcgaaacgcccaacagcttgcaacaaaacaggccttactg

SEQ ID NO: 15434 - DNA, 4329 bp, DROSOPHILA
tactgctatttttctttgtttactttcattgtgcaaattcgtaaaagacattcgtaatatcgtgttttctaactaacccaaagtactggtgctgcgcaagtacggatgtatttatttgcgtcggcaaaatgtgaaatagaataaatggcaaatcgatcgatttttgacaacgaagtgggaaagtagcggtgtctgggtgtgtttgtgtactgcgaccagccaaagtttagacgaatcctccaaggaagaggatagaacaaaaccctaaagccacacttttcatctgccatggagcacactgcctcgctgcctggctacgtccgcgagaagctcgccgaactggacttagagctgtcggaaggtgacattacgcagaaaggctacgaaaagaaaagggcgaagctgttgcagccgttcctaaagaagccagaaggcgataaagtgaaaagtacgccgccaccgccatactacaacgttaaaaatgccaacaacagcaccaaccacggaaacatcaataacgacggcgtcattgtgtccagcgagggctacagttatgtgactgaagtgccctccctgtcctcctcgcagcaaagacattccaaaaaaattgacttccatcagcaagccgccatgagcttgtcatcggcaccacagagcggaaatgctggggctcctggctacgaaaatatgcgaccgcagggtggagcagtcggcgatcccgggtatcagaacactcgcgaaccaagtgcttttcagaaccaacagtcaactaataatagtcagcatcgtcaacgacgcacacagcgcaaagtaacgcacaatgagaaacgttatcattctgaagtacgacaagaggctgtgcaacaggcccttgcagctcttaagggacggccaaaacccagccttccaatgccatcgaagcgcacatctgtattaaaccgaagccctgggtgcaatgatgagctggactcatcgacggatgacgaatccatacccgaggagacaatttcccccgacaaggagtacaattatccacgggatcatataagcaatagcatactgccaccagaaccgataattaaacctccaattcgtgaatcatcgatgggttcacagcagcatgcgaggacagacgtgaaacagaaccaaattacaaatcaaaagtatacggcgccgaatagcgctccagaaaggcgaccaccgcaaaacttacccccacttccaacttcagaacctttaagttcggactacccgccgattgcatacaagcgggaaaatgacttttcggacaaagcgtttaaacaaaaacagtacaatgctcccgacatcacacagtttaataatgcacatcgtgctgcggatcgagtgactcgatatgttaatgtttctcaaaatgaactgaacgagacagatgccaatggcaagtggaagttctatgaggataacgacattgaactggagattgctgccaatacgaaagatcccaatgctcccaaaccagagggcagcacaatgactcctgtgcaaggcgagcagctatccatacctgcaggacttccaagaacgctcgaatgcgcactccaacgttatggaacaaactcgtttaaaagtccaatggctacagtgctcgatccgaatggaaaagtaacaactaccttaacatatggcaagctactttcgcgcgcacaaaagattgcccatgctttgtccacaaaaatatttagcaagggtcctgagcaagtaacactgaagcccggcgatcgtgtggccctggtttaccccaataatgaccccttaaggttatggtttgtgactgagcatttacctaagccgcccaaagaattcaatgttggtaatttacgggccgatgattcggcagcagcttatatagaatacacgacagataaggaaggcagtgttatgggtgtcactgttactcgcgcagcgatgattaatcattgccgtgctttgactatggcctgccattataccgaaggcgagacaattgtatgtgtattggacttcaagcgtgaagttggattatggcattcggtcttgacatccgttctaaatgcactatcgcatggagttgtacgcgttgacagtgaagactcattaacatcgctcactttgcaggactgtggtcaagttatgccagctgcacaaatggtggttgttcgatcggaaggaccacctgtgctgtgcaaaaccgatcaagtcggcgaaatatgcgttactagcggatccacaagcgccagttattttggtctcgacggaatgacaaattcaacattcaaggttcagcctctattagaagaattggaacaaccaaaagatggaaatggcacggtgaacattatttccaaaccaattggcgaagacttttacgttagatcaggtctactgggctttcttggtccgggtggcttggtctttgtgtgcgggtcccgtgatggtctgatgaccgttaccggtagaaagcacaatgcggatgacattattgccacagtgttagctgtggaacccatgcggtttatttatcgaggacgcattgctgtatttagcattaaagttttgcgcgacgaacgcgtgtgcgtcattgctgaacaacgtccggactgctcggaggaagaaagtttccaatggatgtcacgtgttctgcaagcagtagactccattcaccaagtcggaatttactgcctggcattggttccgccgaatcatttgccaaagactcctcttgggggcatacatttatgcgaagcacggcgaaggttcttggagggatctctccacccagcgaatgttttaatgtgcccacatacatgtgttaccaatctaccaaagccacgggaactacatcaaggtgccatcgcgaaaacactgacatgctctgagttgcataagcgggcagagaaaatagcggcattgttacaagaacgaggaagaattgagccaggagaccacgttgatattgatgacaacccgaaacgaaaatatgccggcatagccacggtttcctttgactctagcgcctatttggactttagcgtatcaacttgtggacgtcttagcggtgttaacattacgcatcgatctctctctagtctgtgcgccagtttaaaattggcttgtgagctgtacccttctcgacatgttgctttatgtttggatccgtactgcggccttggatttgttatgtggactcttatcggagtatacagtggccaccattctatacttatcgcgccctacgaggtcgaagcgaatcccagtttatggctgtcaactctatcgcaacaccgcgttcgcgacacattctgttcatatggtgtaattgagttatgcactaaagctctcagcaattctataccttccttaaagcaacgaaacatagatttgagatgcgtacggacgtgtgtcgtggtggcagaagagcgccccagagtgcaactgacccagcagttctgcaagctatttcaagcccttggtctgaatacgcgctgcgtgtcaacttcgtttggatgtcgtgtaaatccggccatttgtgtccaaggggctagttctgcagagagtgctcaagtgtatgtagatatgagagcattgcgaaataatcgtgttgctctggttcaagctcctcacaacgcaaatggttactttacaatttatggtgacgaaactgactacaatgatcacttcaacgcgaaattggtaactggggccacctcagaactatatgcacgcactgggtatttaggattcttacgccgcaccgaatgctcgcaatcagcatcactgcttgacgagaccacaccaagtgtggcaagtcgcgatagtgatacagaatctttgaattcgataagtcaattgcaactaaatttttcaaatgtttccttgggtggaaattccgagcatagcctggtaggcggcgcaagcaatgctaatgatcaagaactacacgacgcagtgtatgtagtcggagctgttgatgaagtgatctctttacgtggcatgaactatcacccaattgatatcgaaaattcggtaatgcgctgtcacaaaaaaattgctgagtgcgccgttttcacctggactaacttattagtcgttgttgtcgagttggacggcaatgaatcagaagctttggatttggttcccttggtcacaaacacagtattagaagatcatcagcttatagtcggcgttgtagtggtcgttgatccaggtgtggtgcctattaatagtcggggcgaaaagcaacggatgcatttacgggatggttttctggccgaccaattggatcccatatacgtagcatataacatgtaa

SEQ ID NO: 15435 - protein, 1346 aa, DROSOPHILA
MEHTASLPGYVREKLAELDLELSEGDITQKGYEKKRAKLLQPFLKKPEGDKVKSTPPPPYYNVKNANNSTNHGNINNDGVIVSSEGYSYVTEVPSLSSSQQRHSKKIDFHQQAAMSLSSAPQSGNAGAPGYENMRPQGGAVGDPGYQNTREPSAFQNQQSTNNSQHRQRRTQRKVTHNEKRYHSEVRQEAVQQALAALKGRPKPSLPMPSKRTSVLNRSPGCNDELDSSTDDESIPEETISPDKEYNYPRDHISNSILPPEPIIKPPIRESSMGSQQHARTDVKQNQITNQKYTAPNSAPERRPPQNLPPLPTSEPLSSDYPPIAYKRENDFSDKAFKQKQYNAPDITQFNNAHRAADRVTRYVNVSQNELNETDANGKWKFYEDNDIELEIAANTKDPNAPKPEGSTMTPVQGEQLSIPAGLPRTLECALQRYGTNSFKSPMATVLDPNGKVTTTLTYGKLLSRAQKIAHALSTKIFSKGPEQVTLKPGDRVALVYPNNDPLRLWFVTEHLPKPPKEFNVGNLRADDSAAAYIEYTTDKEGSVMGVTVTRAAMINHCRALTMACHYTEGETIVCVLDFKREVGLWHSVLTSVLNALSHGVVRVDSEDSLTSLTLQDCGQVMPAAQMVVVRSEGPPVLCKTDQVGEICVTSGSTSASYFGLDGMTNSTFKVQPLLEELEQPKDGNGTVNIISKPIGEDFYVRSGLLGFLGPGGLVFVCGSRDGLMTVTGRKHNADDIIATVLAVEPMRFIYRGRIAVFSIKVLRDERVCVIAEQRPDCSEEESFQWMSRVLQAVDSIHQVGIYCLALVPPNHLPKTPLGGIHLCEARRRFLEGSLHPANVLMCPHTCVTNLPKPRELHQGAIAKTLTCSELHKRAEKIAALLQERGRIEPGDHVDIDDNPKRKYAGIATVSFDSSAYLDFSVSTCGRLSGVNITHRSLSSLCASLKLACELYPSRHVALCLDPYCGLGFVMWTLIGVYSGHHSILIAPYEVEANPSLWLSTLSQHRVRDTFCSYGVIELCTKALSNSIPSLKQRNIDLRCVRTCVVVAEERPRVQLTQQFCKLFQALGLNTRCVSTSFGCRVNPAICVQGASSAESAQVYVDMRALRNNRVALVQAPHNANGYFTIYGDETDYNDHFNAKLVTGATSELYARTGYLGFLRRTECSQSASLLDETTPSVASRDSDTESLNSISQLQLNFSNVSLGGNSEHSLVGGASNANDQELHDAVYVVGAVDEVISLRGMNYHPIDIENSVMRCHKKIAECAVFTWTNLLVVVVELDGNESEALDLVPLVTNTVLEDHQLIVGVVVVVDPGVVPINSRGEKQRMHLRDGFLADQLDPIYVAYNM

SEQ ID NO: 15436 - DNA, 3089 bp, DROSOPHILA
cctgaccgtagcctccatagtcttgtactccactatatccagtatatccttttcccgtcttccaggacttgaagaacagagcgccactcgaatccaggcagcacgcaatcagcaatgttaggatagtcaatcgggaatcgcgggatctcatcttgcttcgatttcgaatcacttccagttctgacagttcatctacgcagttccctctatttatacccttgtggattggagttgggcacattgtgatggtgacacattgtggtctagctcatttcaattctttttttttacgacttcttattcccataaacacagtcggaatctctggaagattagcgtggccaatgggcaagcgacttaatgcattatgctggatttattatagcacgcggattggcacgatcagcatgcggagcacgcttcatccgctggaagactgagctatcgcagatggtagatggtcagtatacaacggacatctcataccccaaccattatataaacttccatataaatacacactgctgagatcgtatgagtgtacttcaaataagaatttgaattaattaaaatataacactaacatacagagatctgtaaagactggacggatactactagtaagtcccttccatttattcctctattatggatttttcatcacttgaagtatctctttcatcgcctgtatctcttattcttttatacttcaatctgtatactacatactatatatgtatctcaatttttgttttcaagcttcaggtgtttgtttacttttcgtctgattattattatgatcatctctctgagacctattttggagagcggttaagatctctctggttgcggacactgattttcatcatgctctcactgatcgccggacaggttttcaatgtttaatcaagcatcaacgattatcgcataggcggagcgtaaaagttccccctcagttagagtccgccttttgtggtgatcactgctcgaacacccgaacatgacgcgatcttcgccagcttggtgtgctggccaggcctggctcgtctggcttttggcatccatctggatacgcacgtgtctcgcgcaatttgcagtctcctcgtcctccgccggcggagctgttgcctccgccggtggcgtcactgtggtggcccagctgcccggtttcggagttatcaatggactgatcaatgccatgcacaacaacaaccgcttcaaccagcagccgcagttcgagagactgcagcaaggaaggccggggatgggtccgaatcgaggaggaatgcacagaccaggatttgcaccacccaaccgtcagcaaccgacgcctcctggctggccacccggctggcagtggggagccggtggaaatcagaatcaacccggatttgactgggttcaaacaggatttgcaccaggctggaatggaggtggagggcaaggaccaggatggaatggtccaggatggaacggaggcggtggaagaggacctccaccaagaccaggttttaacggcggcggaccaccgccgccaagaccaggatggaacggcggcgggccaccaccaccgatgccaggctggaatggaggagggccaccgccaccaaggccaggatggaatggcggaggacctccgccaccaaggccaggctggaatggagggatggaacaggaatgggataactatccacgcctccccgatcagccggatcccaatgatccaaacacgaattggaatccagataatgagtctagcaccactccacaaacgccaataccaggacccatctttccaacgacaacacctaagccagagcccacctttcccacgatccagccacgtccaaccgctcagccaacgaaggatacgctcataataggaaccaatcgaccgccgttggtgccgccccataatccggatccacccacgcccacttttcccacttggatcgtgccggagccattgccaaaaccattggacgaactctccgaaaatcgtgctattatattccccagctctagcaaatatatccatgtgccaaacccggaggttccctcaattcccattgatgtgagacgaagatgaatcttctaagagggagttccccgattcacacttgttgtatatatattcgtagaccattgttcaattgctccacccgagatcgtctttgtcataagttcaaaacaggttctaaaagctcgttggaaataaacgaaattttaataaattacacataaacaaatgagacagcacatgattggatgagactggggtatctgacggatgaacgttagtaaccccgctgcttgtaaccacctccacctccgtaaagatcctgattcttgtgcggataatggacactggcaggatgagacggctgagagtagtatccaggcgaaggacgcactgaccaaggtggtggatagtagtcatttgctgccggaaccggtcgtggtgggtaataggcatagccacctggatgcgtctgctggtggctaccaccgtagccgtagcctccaccatagtgatagtcgtagccctgctcgtagccctcctggatgagtggacctggtccaggatgtagctgtggatcaactggccttgctggcggataatgatttgggtcgccgaacagaagctccgcaatcttatcgaaagtgggtctaccgtgggccaagctggccaggattagcactagaatcgcagccaacaactgcatcttgggatatgtagagcaattttgctgatagtcccaatgtccatgcggcttttatagccagcagcagcacatggcgataagaaagatgaatggaatcgagtggaagaaccttgggtaatggaacaaatgctatatgtacatatgtacttataatactaatctattgactggtaaacaaggttgactgggaaagctttcgttctctatataaagggaggatcataactcatgatcatcatctatgcaaagatgagttatgaattgcttgggaaatccctaaaccaaaaatgcgtctcaacttatctattacttggctttaggccgcaaatttatacattgcaagaaatttatatataacattta

SEQ ID NO: 15437 - DNA, 1089 bp, DROSOPHILA
atgacgcgatcttcgccagcttggtgtgctggccaggcctggctcgtctggcttttggcatccatctggatacgcacgtgtctcgcgcaatttgcagtctcctcgtcctccgccggcggagctgttgcctccgccggtggcgtcactgtggtggcccagctgcccggtttcggagttatcaatggactgatcaatgccatgcacaacaacaaccgcttcaaccagcagccgcagttcgagagactgcagcaaggaaggccggggatgggtccgaatcgaggaggaatgcacagaccaggatttgcaccacccaaccgtcagcaaccgacgcctcctggctggccacccggctggcagtggggagccggtggaaatcagaatcaacccggatttgactgggttcaaacaggatttgcaccaggctggaatggaggtggagggcaaggaccaggatggaatggtccaggatggaacggaggcggtggaagaggacctccaccaagaccaggttttaacggcggcggaccaccgccgccaagaccaggatggaacggcggcgggccaccaccaccgatgccaggctggaatggaggagggccaccgccaccaaggccaggatggaatggcggaggacctccgccaccaaggccaggctggaatggagggatggaacaggaatgggataactatccacgcctccccgatcagccggatcccaatgatccaaacacgaattggaatccagataatgagtctagcaccactccacaaacgccaataccaggacccatctttccaacgacaacacctaagccagagcccacctttcccacgatccagccacgtccaaccgctcagccaacgaaggatacgctcataataggaaccaatcgaccgccgttggtgccgccccataatccggatccacccacgcccacttttcccacttggatcgtgccggagccattgccaaaaccattggacgaactctccgaaaatcgtgctattatattccccagctctagcaaatatatccatgtgccaaacccggaggttccctcaattcccattgatgtgagacgaagatga

SEQ ID NO: 15438 - protein, 362 aa, DROSOPHILA
MTRSSPAWCAGQAWLVWLLASIWIRTCLAQFAVSSSSAGGAVASAGGVTVVAQLPGFGVINGLINAMHNNNRFNQQPQFERLQQGRPGMGPNRGGMHRPGFAPPNRQQPTPPGWPPGWQWGAGGNQNQPGFDWVQTGFAPGWNGGGGQGPGWNGPGWNGGGGRGPPPRPGFNGGGPPPPRPGWNGGGPPPPMPGWNGGGPPPPRPGWNGGGPPPPRPGWNGGMEQEWDNYPRLPDQPDPNDPNTNWNPDNESSTTPQTPIPGPIFPTTTPKPEPTFPTIQPRPTAQPTKDTLIIGTNRPPLVPPHNPDPPTPTFPTWIVPEPLPKPLDELSENRAIIFPSSSKYIHVPNPEVPSIPIDVRRR

SEQ ID NO: 15439 - DNA, 3873 bp, DROSOPHILA
taaattcgattttgagttgacgtttattccatttgatttctggctgacgatttaataagccatttttatggcatttttgccatttacattaaatgcgagcctaatttcacaaattaaatgattttattgcacaactcatggtgtaattcatacttcatattgaacacattaatagtttgttattatttgttattaatttgtttagattatttgcacatgtatgtttatgctcctcaatcaatcaatccacacactttacaatagaaaccaaaaaaacacacacacacacccgcagtgaaaagaaaagaaaaacaaaaaaaaaaagagtggactggcgacaggaaagacctcggttagcacgtgaagatcggcgaagatcaacgccagagcatcgcgaggagactgaatcccccgatcggtcatatcgactatattccccgcacaacgggcaggtgtgcgagcgagagggtgcggacgtgagagagggcgggtgcacagcgcgtggctctcatctcaaccgaacggtagagataagaccaagaagaataataagaagccatttaggcggaatgataaaatgagtgcaccgctctgatctccccacagatccgctcgattagccagccagttgccgccaaggagcgcgaaatggagcgcgttgctacaggtgtccgttagaaaaagctccaaacgctttgcccaaaagctctgaaaagtaccgtatcttttcataatctatgctttcaactttcaaactttcaatacaaatgcttatacttcaaatcaaaaagcaaaaaattaaaacgaaaactgcattactaatataattaattaatatatattttaagttcgccatttccaactcaaaacggaatcatactgtatatgttttacataaatttgcttgcgtcttttgggttcagaaaccagctaaagcactctggcgaaactttcaacttgctgaaaagctaacgatggtgttccattccgtgggggcatactactttttgggagcgggtggcgccttggtgggcggctgtgcggctggttttggcttcttatcgccatcgtcgccctcgcctttgggctgcttggcgtcggcgcccttcttgtcgccacctttaggttccttggcttccttggccttcttggcatcctgcttggccttcctttccttggccttggccacgtcaatctctgcgcccactggcacgtcgttgatctcgctggccggcgtcttcttcggcttgccaaagcacacctccgccagcttgatgtgctctaaatggaatccggacacgccgcggatcttaccatccacattcttggcatagatatcggtgtgcagctcatcaagttctacctccctgtcggtggtggctttcttgcaaatgctatccacctgcttcctagtcttatcatccagggccttcagctcctcctcgtcggcgagacacaaggcgatgatctgactgcgaaaacttgtaatcggatcgcgtttctccctcgtcgattggacttcttctctcgagcgatacgatgtacccggatcggacatggagtgacccacatagcgataggtgctcatctcgagcacaatgggtccgtgcttgagggcatggtccacggcgaattgggtggcgctacgcacggccagcacctgattgccatcgacccaaagaccagggatatattggccacgcatgtagaactccgtcatggcagaggcccgcttaacgtgggtgcccatgccgtagtgattgttctcgcaaacgaatatgcagggcaagcaccacagcttggccatgttgaaggactcaaagatctggccctgattggcggcaccatcaccataaaggaccaccgacacgccgttgtccttgcgataactgtgcgcgaggccaattcccgcgccgagcggaacttgggcaccaacgataccattgccgccataaaacttatcgctgtacatgtgcatagagccacctttgccccggctgcatccagttcgaactccgaacaattccgccattatttcgtaaagggaaacacccattaaataggtccaggcatgacaacggtatgccgttatgaccgagtcgcaggacctcaaacgctgcttcatgccaacagcgacggcctcctgtccgttatataaatggcagaagccgcggatttttcgctccttatagtagttgcccgccaccgtctcgaaccggcgcagttccagcatctgcgtgtacatcgtcagggcgtcctccctggacagctccacgtccattgtgggtccattctccaggtcgtagcacttgaacgtctgcaacgggcataacaaaatcattaaagtaacccatttcggaatgctgctctagtaggaacgcaagaagaatctatgtgttgtgcagcactgaaaaatatcagcagcttatgtctatattcagtgttggtctacgcgatgagcagattaagtcgtttctatgttagatttatatcagctatacttaacagcaaatatttaaacatttttcagagtacataatttaattcaaaatgaaaaatataacttttacgatatagcttttttcaatggtatttacttatccattgaccttcttgtgataatcaaaacacttacgttctccagggtcaaacagctacatttgtggcgccctattatcctgcagagcatatttctctcgaggatggagtgggctccactgcatctcatcgccacgcggacacaactgaacttcatcattggcccttgcccgaataccaattcccaaacaccggggcactaaaatgagcttgtagccaaatgggcaattgccacgcactaaaattttgaatatgatcggaaattgttgaaaaatggatttgtactcaaccgaaaagaaatcgacagtaaaatcataagcaaatcgacagagatggcaactgtcactaaacagaacgagaaggaaatataacgattttgggattgcttatggagctgacaactgctccttttcaaatactactttgattcgaactgtaattcttccacaaatcgaattatctattaaatctattccgtttattaatatcttataaatctatcaaaattctatagtgcaagtataggtgaaacagactgagattttcacatttcaaaagtacatacttgattcacttttgttaagaaaactaatttggattaatttttctagatttttatattttcaacaatttacacctcgctttatccttattgaacacgttcgcaatataatatccaatgcagtaccccagagttatgtggtgcgctacgatgtgtggttggagtgctccgattagctaagctttttgtgggtctcttcggatccgttccgttctacggggttctcatcgttcaactttcggcttatgatctagagatttcgcttgtgtccaagtttctgagttattgtgtcttcttgtctgtctgtcagtgatttgtgtttgctgttcggttttcttgtttcgtttaaggttcttgtgagttcccgaatcagattcgttggcccgatgacttagtgattgacgcccttgcgctcctggatgtgatcaatatcgtaggcgatggtgccgcgcagcttgggctccagattgttggagtacacgtccgtccagaggtggctcacgcccagctcggcatcggacttggcgaaggcggtggcctcgtcgacctccttgcgtaccttcagatcgatggcctggaagatgtttttttcttttagcaatcataactcataacaaaaataaaaccctataagccaaacccaccttaacttcatcggtggtaatcagacccagctcgatgcacagctccttgaaggaggtgatgggatcacg

SEQ ID NO: 15440 - DNA, 1555 bp, DROSOPHILA
atttttcaacaatttccgatcatattcaaaattttagtgcgtggcaattgcccatttggctacaagctcattttagtgccccggtgtttgggaattggtattcgggcaagggccaatgatgaagttcagttgtgtccgcgtggcgatgagatgcagtggagcccactccatcctcgagagaaatatgctctgcaggataatagggcgccacaaatgtagctgtttgaccctggagaacacgttcaagtgctacgacctggagaatggacccacaatggacgtggagctgtccagggaggacgccctgacgatgtacacgcagatgctggaactgcgccggttcgagacggtggcgggcaactactataaggagcgaaaaatccgcggcttctgccatttatataacggacaggaggccgtcgctgttggcatgaagcagcgtttgaggtcctgcgactcggtcataacggcataccgttgtcatgcctggacctatttaatgggtgtttccctttacgaaataatggcggaattgttcggagttcgaactggatgcagccggggcaaaggtggctctatgcacatgtacagcgataagttttatggcggcaatggtatcgttggtgcccaagttccgctcggcgcgggaattggcctcgcgcacagttatcgcaaggacaacggcgtgtcggtggtcctttatggtgatggtgccgccaatcagggccagatctttgagtccttcaacatggccaagctgtggtgcttgccctgcatattcgtttgcgagaacaatcactacggcatgggcacccacgttaagcgggcctctgccatgacggagttctacatgcgtggccaatatatccctggtctttgggtcgatggcaatcaggtgctggccgtgcgtagcgccacccaattcgccgtggaccatgccctcaagcacggacccattgtgctcgagatgagcacctatcgctatgtgggtcactccatgtccgatccgggtacatcgtatcgctcgagagaagaagtccaatcgacgagggagaaacgcgatccgattacaagttttcgcagtcagatcatcgccttgtgtctcgccgacgaggaggagctgaaggccctggatgataagactaggaagcaggtggatagcatttgcaagaaagccaccaccgacagggaggtagaacttgatgagctgcacaccgatatctatgccaagaatgtggatggtaagatccgcggcgtgtccggattccatttagagcacatcaagctggcggaggtgtgctttggcaagccgaagaagacgccggccagcgagatcaacgacgtgccagtgggcgcagagattgacgtggccaaggccaaggaaaggaaggccaagcaggatgccaagaaggccaaggaagccaaggaacctaaaggtggcgacaagaagggcgccgacgccaagcagcccaaaggcgagggcgacgatggcgataagaagccaaaaccagccgcacagccgcccaccaaggcgccacccgctcccaaaaagtag

SEQ ID NO: 15441 - protein, 479 aa, DROSOPHILA
MMKFSCVRVAMRCSGAHSILERNMLCRIIGRHKCSCLTLENTFKCYDLENGPTMDVELSREDALTMYTQMLELRRFETVAGNYYKERKIRGFCHLYNGQEAVAVGMKQRLRSCDSVITAYRCHAWTYLMGVSLYEIMAELFGVRTGCSRGKGGSMHMYSDKFYGGNGIVGAQVPLGAGIGLAHSYRKDNGVSVVLYGDGAANQGQIFESFNMAKLWCLPCIFVCENNHYGMGTHVKRASAMTEFYMRGQYIPGLWVDGNQVLAVRSATQFAVDHALKHGPIVLEMSTYRYVGHSMSDPGTSYRSREEVQSTREKRDPITSFRSQIIALCLADEEELKALDDKTRKQVDSICKKATTDREVELDELHTDIYAKNVDGKIRGVSGFHLEHIKLAEVCFGKPKKTPASEINDVPVGAEIDVAKAKERKAKQDAKKAKEAKEPKGGDKKGADAKQPKGEGDDGDKKPKPAAQPPTKAPPAPKK

SEQ ID NO: 15442 - DNA, 3385 bp, DROSOPHILA
gatcctgattcttgtgcggataatggacactggcaggatgagacggctgagagtagtatccaggcgaaggacgcactgaccaaggtggtggatagtagtcatttgctgccggaaccggtcgtggtgggtaataggcatagccacctggatgcgtctgctggtggctaccaccgtagccgtagcctccaccatagtgatagtcgtagccctgctcgtagccctcctggatgagtggacctggtccaggatgtagctgtggatcaactggccttgctggcggataatgatttgggtcgccgaacagaagctccgcaatcttatcgaaagtgggtctaccgtgggccaagctggccaggattagcactagaatcgcagccaacaactgcatcttgggatatgtagagcaattttgctgatagtcccaatgtccatgcggcttttatagccagcagcagcacatggcgataagaaagatgaatggaatcgagtggaagaaccttgggtaatggaacaaatgctatatgtacatatgtacttataatactaatctattgactggtaaacaaggttgactgggaaagctttcgttctctatataaagggaggatcataactcatgatcatcatctatgcaaagatgagttatgaattgcttgggaaatccctaaaccaaaaatgcgtctcaacttatctattacttggctttaggccgcaaatttatacattgcaagaaatttatatataacatttatatttataaatttgtatatgggtatttctttaaaaaattcatttatttgttcaaatttatggctagtatctatgcatatgcacattgttgtgttatattttcaacttttgctttcagtgtagactctctcattcaatttactagaaagaacactcaatgagacttaaactacatatctgggcattgagcccctgatgataaccccaaaaatagacactcagctaagctctcgtgtcatcagatctcaccatgaaatacacgcgccgtgagcttctgggctttagtgtacccaaagacgccatgttaagcaggagggtcatcgcattcgccgctctggccctcatccagatagccagcggtcaggcctcgcaattcagcagggacgaaagtcaggaggatcagaagacggagtttaacctggcctccactctgacgggaggcattaccagcagtcgccatcgccagcgggccaatctcaattcgcaactttatcctggccttggtcagctgggatcgggttatgcgggcgcaactggatccatcgacgatgcccatggccatgagcagggtggctctggcgtacgagtggccagtacgaactccgttgtttttcctggcaaccagtcaccaaatccggcactcacaattacaggaggtcaccagattcccgcttatccgcctccgggttttcctggacaacaggctccagttccgtacccagctgcaggaggctcttcaggaggatcctcatcatccggtggttaccaaagtgcaggtaggtccttctaataggtggttcatttatcttagtgaaatcagaaaactaatatcaagtcttaactcccaaaaaagttatacaaaatttaaaagattggtgaatagcaaatccacattttgaaatatatatgaaattatgatattaatgaaatgtcccctttttaggtgctgtttctcctcctggctatcctgttgctggagcagttcctgctcagtatccggtgggagttcctccccagcagccagtgggtgcaggagcacctggttacttcccgggaactggtgcctatcctggctatccctaccccggagtatacttgccacagtacccagcgtaccctcaaccagcccagttccccgcctatggagtgctacccggagctgtggctcaaccaggagttcctggagtagctggagttccgggagcacctggagtggcaggagtgcccggagcagctggtcaggctcctgccaccagcggcatgaactatcatcgctatccggctcacaatcccgctgatccgagccattgggaccatcatttctcgatgaacaccgagtacaaggaggatggcgtccacaagggaccatttggagtgctgaacaatcacaatgcctttggctatggcagtggatatgggggcggatacaacggtgccttcaactcgccggcctactgaagctggccgacatcatgggtggacctcggtggtggtggtagtggtaatggtgttggtggggcgtgaagtaatccgagtcgtagtcataacttcgctgctgcctccttggccagaggcagctgtctttgcctatcatcctgtgtgtccctgcgaaataaacttgatttctgcacacccaaccaagataattagcaatgctggccagttaccagttgcaccttgaaccggaaaaaataaagcacatgcactcggcattctgctcccatacagacagctaacccaagacattcacatcccatccttattcttttccttattcttatggcaatgccgcttcttttatccggcgtggacacaatcgaagacgacaggagctacctggctggcaggcagccgaaaaaaagggaacgcacaaaggcaggactctgggcgagccaaaggtggtggtagaaaatcagcgtcagagagagacgctgttactggtattggtactcctggtgcccttcgctggacccaactgcagcgacataaatcggctgggtttcgctgtgcagcggaaaagagagggccgaaggaaaggaaaggaacccaaccaagggacgacgtcttgatgtcttgcggcgcatgcgcagcctgccgcgcaaatccttaacaaatttttggcgctaaaatgacggacgagcgcgccaaaagcaaggaaccgcaggaaactcgagagaatcatgcccggggtatacagactacgagtatacagacagacacttacactcatggattatgaatgatttggacggacggtatcggtggtttttacctgtagcaaatcgaaccgattccagccagggtttgatgtccttaggtcatcagccatcagctgttctatgatgagcgcggagaaaggagcacagattcagctgagaggattcgaaacaaaggaattagaatgggtggggtaatgggtatactcacggcaaagaagtctagatgtgctaaacgttttcccttaacctttgacatctaggagtttatgctctgtttctaacaattaaagattgaactgcaacaaatacatacattccagattctaggaaattgaaaataatgccctaaattatttaatcccctaggaactaggatcatttccaacatgctggataaagacagctaatttaaaata

SEQ ID NO: 15443 - DNA, 1218 bp, DROSOPHILA
atgaaatacacgcgccgtgagcttctgggctttagtgtacccaaagacgccatgttaagcaggagggtcatcgcattcgccgctctggccctcatccagatagccagcggtcaggcctcgcaattcagcagggacgaaagtcaggaggatcagaagacggagtttaacctggcctccactctgacgggaggcattaccagcagtcgccatcgccagcgggccaatctcaattcgcaactttatcctggccttggtcagctgggatcgggttatgcgggcgcaactggatccatcgacgatgcccatggccatgagcagggtggctctggcgtacgagtggccagtacgaactccgttgtttttcctggcaaccagtcaccaaatccggcactcacaattacaggaggtcaccagattcccgcttatccgcctccgggttttcctggacaacaggctccagttccgtacccagctgcaggaggctcttcaggaggatcctcatcatccggtggttaccaaagtgcaggtgctgtttctcctcctggctatcctgttgctggagcagttcctgctcagtatccggtgggagttcctccccagcagccagtgggtgcaggagcacctggttacttcccgggaactggtgcctatcctggctatccctaccccggagtatacttgccacagtacccagcgtaccctcaaccagcccagttccccgcctatggagtgctacccggagctgtggctcaaccaggagttcctggagtagctggagttccgggagcacctggagtggcaggagtgcccggagcagctggtcaggctcctgccaccagcggcatgaactatcatcgctatccggctcacaatcccgctgatccgagccattgggaccatcatttctcgatgaacaccgagtacaaggaggatggcgtccacaagggaccatttggagtgctgaacaatcacaatgcctttggctatggcagtggatatgggggcggatacaacggtgccttcaactcgccggcctactgaagctggccgacatcatgggtggacctcggtggtggtggtagtggtaatggtgttggtggggcgtgaagtaatccgagtcgtagtcataacttcgctgctgcctccttggccagaggcagctgtctttgcctatcatcctgtgtgtccctgcgaaataaacttgatttctgcacaccc

SEQ ID NO: 15444 - protein, 346 aa, DROSOPHILA
MKYTRRELLGFSVPKDAMLSRRVIAFAALALIQIASGQASQFSRDESQEDQKTEFNLASTLTGGITSSRHRQRANLNSQLYPGLGQLGSGYAGATGSIDDAHGHEQGGSGVRVASTNSVVFPGNQSPNPALTITGGHQIPAYPPPGFPGQQAPVPYPAAGGSSGGSSSSGGYQSAGAVSPPGYPVAGAVPAQYPVGVPPQQPVGAGAPGYFPGTGAYPGYPYPGVYLPQYPAYPQPAQFPAYGVLPGAVAQPGVPGVAGVPGAPGVAGVPGAAGQAPATSGMNYHRYPAHNPADPSHWDHHFSMNTEYKEDGVHKGPFGVLNNHNAFGYGSGYGGGYNGAFNSPAY

SEQ ID NO: 15445 - DNA, 2368 bp, DROSOPHILA
agcgctggatgctctgctctgccgtcgccgactgcgctgcctttcacccatataaatttcttttcattgcaaattttttgccattcgtcggcgcattgtcaaaccttccagtcgcatttggagcccaagctttccgagatttcagagcgactctagagcgcactaaacaaaggcctaagaaaaaagttaaaaaggcgaaaaaagaaacagaggcaaagacgacaatacgaattgtacaaatcggatgcgagcgcgagtgtgttagtgcccattcattcattcattcattcgagaacaataaaaaagaagaaatgaaatacgaaatgcaatcgccgcagttgcagtcgcagtcggcgtcgcagtaggcgtcagcggaggcatcggccgaggcagaacagtagcagcagcatcgaaatccgaaagacagatcatttttcatatgcgaatcgaaactcgaagagcgcgcatcaaagtcaaattcaaacgacaaaagagtaacggacaaaagcgaattgttttgtgcgcataatagaaacgaaaaaaaaaagaaaaacgttataaaaagcaaataaaaggaaaataaagccttaccagaaccagtaattgaaatcaaattaaaggcgggccgtgcaaaaatccacaaaacatcaagaaaaagccataaagccaaggcgataaaaaagaaattatgctccattgtgcgattgtgtgaaaaggtcaagtgcccggcaggcaaagggaaaagcgaaagagacagaagacagcgtaagacacgggagcttgatgttgataggcaaacgaatgaactcgtaaaagggcgctaaagagagagagagagaaggcaacacaacgacatcggttaacaagaagagcaggaagaagaagaagaagagcaggccaggcccaaatgaccgcaagattaccgttaattcgaacagcttaagcgccattacgagcagttatatagtccatatactatatagcaccactatatctctatctccctggtagatcgaccgaggaagagaaaaaaaaactttcatccaccgtgagccgcagccgcataaaagtttgctactatttcaatttcaattgttaacgagcgaaagcgccgcacgcctcagtctcacatcacgcacgcatccgatccgagcggcaacaacaaatcatcaagcgtctaataggaaaagtgcagcagacagccagcgaaaatgcaccacaaacagcatctgcatctgcatctgcagccccccgccccaaacgccacccaaacacaggcccacggacttggccagactccaagccagatcgccagatgcagccataaccacagccccagtctgggcctcagctttggcggcaccaagagccagcgacagctgtttggcgcactcttggccatgttcacgttggcggcatttgcgtcaaccaccagtggtaagtcgtacactgcgagaaatcccaaaattggtgctacacgttgagtagaaagtcacaggaagtagtcttagatcattcgaatctctttcctggcattctcactattcaaattgtttaattgcctcaagaaatgaatcagctaaagaagtatacgttgattcagattcagcaaagttcctcctaactaaattaaaatcagattaagataaaactaggttccttaagcagagcattaagtccaatataatcataaaagagaaaactgactatggaactcttaagccattgctaaagtaaagaatgctctatttaaatccagattagttaacattacatttaaaagggcctaatacaagtttcaaagggtattagttttcctcttgctaaatgtactttctcctaactatcacatcgttattgagttgcagttaaaactgcggacagagttctagggaaacccgagttcttcagcggaaaacggcaactgatcttgagctaaatgaaagttgcagacagactggacaagtcccagtgagtgccgtctcaattaccgcctaatttctccgggtgttgaaacggagaaggtgaatcggggtccggatctaagacctacagctgtgcggtggtagaaaggccgtcgcagcagctattcaactatccatttctaaggtactactccgcacaaagtgaatgtaaactggcacacatacacgagcgcgaagcttccaatgccccaacacctctccccccaccggccccctagaccacgaactccccagtttgaggcactcactcctcgacgcacaacatgctcgtaaatattttcgtgcacaatttgtccaacattcgtataaattcattaaaagcacgaaggggccaaacagaagccgggggcctgaaaacgtaggggggggggggggctggtgga

SEQ ID NO: 15446 - DNA, 493 bp, DROSOPHILA
ctccctggtagatcgaccgaggaagagaaaaaaaaactttcatccaccgtgagccgcagccgcataaaagtttgctactatttcaatttcaattgttaacgagcgaaagcgccgcacgcctcagtctcacatcacgcacgcatccgatccgagcggcaacaacaaatcatcaagcgtctaataggaaaagtgcagcagacagccagcgaaaatgcaccacaaacagcatctgcatctgcatctgcagccccccgccccaaacgccacccaaacacaggcccacggacttggccagactccaagccagatcgccagatgcagccataaccacagccccagtctgggcctcagctttggcggcaccaagagccagcgacagctgtttggcgcactcttggccatgttcacgttggcggcatttgcgtcaaccaccagtgaaatgaatcagctaaagaagtatacgttgattcagattcagcaaagttcctcctaa

SEQ ID NO: 15447 - protein, 93 aa, DROSOPHILA
MHHKQHLHLHLQPPAPNATQTQAHGLGQTPSQIARCSHNHSPSLGLSFGGTKSQRQLFGALLAMFTLAAFASTTSEMNQLKKYTLIQIQQSSS

SEQ ID NO: 15448 - DNA, 4559 bp, DROSOPHILA
caaaggaaggtgagtctgcaaatgggatagcaaatccctcaaatgacgataaaaaggagctggccaatttcaaagccaccttcaattcctgggcccccgagaagaaacgcgagaagatgcacaaggtaggcgtcatcttaatatccaacatacccaaggacatggacggggactgcctgaaggaaatcatgaacttgcacagcgtcgtcggcagagtttacgtgcagccggaaacgctgtcaagtgagtggaccaagtggcatgcacaaatgacccactgattacccagtataaacttttatctcaattactttaggtttcaagacaaagaagaacatgcgtaagggctgggtggagttcatttcgaaaagtggggccaaaaaaatcgctctagagctgaacaataagcctataaccgatggcaagtcgtcccgattccgtggcttgctgtggaaaatgaagttcctgccacgcttcaagtggtactatctaaccgatcgcatggactacgagctggcggtttgcaaagttcgcgtatggtcgcaggcccgcaagcgggccaccttctggtacgatcccgaccagatggagtatttcaagaagcaagtgaagaagatgaagaagatgaagaaggtcaaggaagcggagatggctaccaggaatgcggagatggctgccaagaaagcggagatggctgccaagaaattgaagaagtctgcctgagttcacgctagacctttgcttccaatgtctacctgactgcaaatatacttcaataaagtaaatcaaatcaaaatcttttaatatttaggcgcgcaaaattatttgaaataagcgcccctgcattgcatatcgataactgcaaaactttcgagtgctggtttgtgtcaacactatttttggtatttaagttcatgcaggcgttagcacctttccgttgtcggtatttctacccgatagccgcgcgttatcgataacagccatcgactgtctccattttctttgtcgctttgttgcgcccgtgtggtatttgaaaattctgtgatcacaaatcgactaattacgcagagaaaatggtaaatttaaaagtaacaactatattattcgagtagtttacggtgcgggctattggcgttgcgtgaattcgcccacttttcattgataattgtggccaattcggcgttttcatttgccgggtgtgtgtgtgaacgaagcgcaagccattttgacaggcggcttgcacgtgagccatggactccgatttcgcctgccacttccagaaccttctcctgctgtccacgggatctgggtgaattggagctatcactagattgctggccgggatcggctcgggcagctggctgagaaccttcgagatgcattccacgccgtttttgctgccgatgaatcactcggcgccgctctccctcgtccgccactttttggggttaggtcgaggcgatatggctgcacagagcgaaaaaccataacaatctgacatagaatacatatacattttgaatattttcgcatcacaaacgcatctggtttgcagtgactgcggatttggccatgccaacagacaatcctcgccagaaattgcaacatattgggcagccgcctgccattgtcaagatagcattcttgatctgtcgatgagaatatcataatggtgttttgcaatgtcatcttggcatcatatcactttttcattatgctaaattattaaatgttaaaaaaaaaattttatttcgcaaaaaaagctataatataatttcctgcatgaatagtaattatgaattagctttacttgcttctgatgattaatcctccataagatctacgctaaaaaaaagtcatgccatttttgtaattaaattaagtctcaagaaatgtgcccttcttagaaaatttatacaatcaatcgaaatgattcacaccaattgatcgcgttttgtcttgcaggagatgtccttgaatcccgtgcgcgtgctcaagaatgaggcgcaggaggagaaggccgagatggcccgtctgtcctcgttcattggtgccatcgccattggtgatctggtaaagagcacgctgggtccgaagggtatggacaagatcctggtggccaccggacgcaacgccggtcatgttgaggtgaccaacgatggtgccaccattctgcgtgccgtcggtgtagacaatccggccgccaagattctggtcgatatgtcgcgtgtgcaggacgaggaagtgggcgatggcaccacctcggtcaccgttctggcatcggaactgctgcgcgaggcggagaaactagtcgaacagaagctgcacccacagatcatcgtctctggctggcgtcaggccacccaggtggcactggaggcgctcaccgccgccgctcaggacaactcgtccagtgacgagaagttccgcaacgacctgctgaacattgcccgcaccacgctctcctcgaagatcctgcaccagcacaaagacttcttcgccaatctggcggtggatgctgtgatgcgtctgaagggctccggcgagctcaagtccatacagatcatcaagaaatcgggcggcacactgggagactcgttcctggacgagggcttcctgctggacaagaagcccggcgtgcaccagccacagcgtgtaagtaatgtttccagttccatcgtgctaaacatcgtctacctctgctgtctattaacgcgtcaaaatgactgtgagctatgtggatttgacttcatatcacagccattttgacgagtttgttggacagccagcctcatcaacgtggaaatgttgcgcgtgcaagtgagtctttcaagaccaagtaaaagaatctcatgatctcatacatgggtgctcttctccatcgcagattgagaatgccagaatcctgattgccaacacgcccatggacaccgataagattaaggtgttcggcagcagcatcaaggtcgattcgctggccaagatcgccgacctggagatggccgagaaggagaagatgaaggaaaaggtggacaagatcctgaagcacaagtgcaacgtgttcatcaaccggcaattgatctacaactatccggagcagctgtttgccgatgcccgtgtaatgtccatcgagcatgccgatttcgatggcatcgagcgtctggcgtattgcaccggcggcgagattgtctccacctttgagaatccctcgctggtgaagcttggcgaatgcgatgtcatcgaacaggtgatgatcggcgaggatacgctgttgcgttttagcggcgttaagctgggcgaggcctgcaccatcgtgatccgcggtgctacccaacagattctggacgaggctgatcgttccctgcacgacgccctctgcgtgctggcggccaccgtcaaggagtcgcgcatcattttcggtggcggctgctccgaggctctaatggccaccgccgtgctgaagaaggcagccgagacacccggcaaggaggccatcgctatcgaggcctttgcccgtaagtcgctgaaatccacatcatatgctggagatggctcctaatgaaatgcttttattattcgtattacaggcgctctgctgtccctgcccacggccattgccgacaatgctggctacgattcagcccaactggtttcggagctgcgtgccggccacgcccagggcaaacagactctgggtctggacatggagctgggcaaggtggccgatgtccgtgaactgggcatcaccgagtcgttcgccgttaagcgccaagttctgatgtccgcctcggaggctgccgagatgatcttgcgcgtggacaacatcatccgttgcgctccacgccgacgcgttcccgacaggggctactgctaggcgcttaagtattcttgttctaggatcatattttttttaattatgaactctcgtttaacatcatcgctaaccttacacgttctgtttactacactaataatccacacacaacacattagcaattatatcacacgtcccactctcaaagtcgcacaatttctcgctaaatttgtccctgtcgtgtaatccttctacttaattgtgaaacaaattgatatgatgttgcaagctgagcttttgattcgaggatgagtgctgcgatcaaaccaaaacatttcaaaaatgtctaaaactccatcaaaccgacaactaaacgaacttgtaaatgaatacaattgttgtaaacatttgatgtgcgcaaattgaagaccattaaacagaaaaaaaaaaggaataaatgataaatcatatatttatgcttaacaaaactaaacaaactgccttcttatttggaccacaattatttcccgaatttttatgagctttttttaaacataacttggcttaaaatgatcataaagcgaaaagagtaacatttctgagcactggagaaccaatgttttcgacccacgccacttttcagccgatttgggaaaattaattttttggtcaaatttctcattttttgtaaggggtaacatcatcaaaatttacaaaaaatggccaaaaaatataattgccattt

SEQ ID NO: 15449 - DNA, 1438 bp, DROSOPHILA
ctttgtcgctttgttgcgcccgtgtggtatttgaaaattctgtgatcacaaatcgactaattacgcagagaaaatggagatgtccttgaatcccgtgcgcgtgctcaagaatgaggcgcaggaggagaaggccgagatggcccgtctgtcctcgttcattggtgccatcgccattggtgatctggtaaagagcacgctgggtccgaagggtatggacaagatcctggtggccaccggacgcaacgccggtcatgttgaggtgaccaacgatggtgccaccattctgcgtgccgtcggtgtagacaatccggccgccaagattctggtcgatatgtcgcgtgtgcaggacgaggaagtgggcgatggcaccacctcggtcaccgttctggcatcggaactgctgcgcgaggcggagaaactagtcgaacagaagctgcacccacagatcatcgtctctggctggcgtcaggccacccaggtggcactggaggcgctcaccgccgccgctcaggacaactcgtccagtgacgagaagttccgcaacgacctgctgaacattgcccgcaccacgctctcctcgaagatcctgcaccagcacaaagacttcttcgccaatctggcggtggatgctgtgatgcgtctgaagggctccggcgagctcaagtccatacagatcatcaagaaatcgggcggcacactgggagactcgttcctggacgagggcttcctgctggacaagaagcccggcgtgcaccagccacagcgtattgagaatgccagaatcctgattgccaacacgcccatggacaccgataagattaaggtgttcggcagcagcatcaaggtcgattcgctggccaagatcgccgacctggagatggccgagaaggagaagatgaaggaaaaggtggacaagatcctgaagcacaagtgcaacgtgttcatcaaccggcaattgatctacaactatccggagcagctgtttgccgatgcccgtgtaatgtccatcgagcatgccgatttcgatggcatcgagcgtctggcgtattgcaccggcggcgagattgtctccacctttgagaatccctcgctggtgaagcttggcgaatgcgatgtcatcgaacaggtgatgatcggcgaggatacgctgttgcgttttagcggcgttaagctgggcgaggcctgcaccatcgtgatccgcggtgctacccaacagattctggacgaggctgatcgttccctgcacgacgccctctgcgtgctggcggccaccgtcaaggagtcgcgcatcattttcggtggcggctgctccgaggctctaatggccaccgccgtgctgaagaaggcagccgagacacccggcaaggaggccatcgctatcgaggcctttgcccgtaagtcgctgaaatccacatcatatgctggagatggctcctaa

SEQ ID NO: 15450 - protein, 433 aa, DROSOPHILA
MARLSSFIGAIAIGDLVKSTLGPKGMDKILVATGRNAGHVEVTNDGATILRAVGVDNPAAKILVDMSRVQDEEVGDGTTSVTVLASELLREAEKLVEQKLHPQIIVSGWRQATQVALEALTAAAQDNSSSDEKFRNDLLNIARTTLSSKILHQHKDFFANLAVDAVMRLKGSGELKSIQIIKKSGGTLGDSFLDEGFLLDKKPGVHQPQRIENARILIANTPMDTDKIKVFGSSIKVDSLAKIADLEMAEKEKMKEKVDKILKHKCNVFINRQLIYNYPEQLFADARVMSIEHADFDGIERLAYCTGGEIVSTFENPSLVKLGECDVIEQVMIGEDTLLRFSGVKLGEACTIVIRGATQQILDEADRSLHDALCVLAATVKESRIIFGGGCSEALMATAVLKKAAETPGKEAIAIEAFARKSLKSTSYAGDGS

SEQ ID NO: 15451 - DNA, 5444 bp, DROSOPHILA
aaagcattgatatttggcttaactatgctttggatgactgatttcgaaatttattcgtaaaaaagaaacagagctggtcacaattagtgtagttgcataataggttttattgcaaaatgcgctttacaatttacaaatattcgatgtattactaagaaaccaaatgtccctcaggcaagaaaagctaatcggagcaaagttgttctaatacttttgccttggtttttaacattaggtgacagtctggattattgttaagttaataagcttaatgtgcttcctactcactatgtaatatttacttatatttaataaggtattcacacttttaggctaaatacatttttatattttttaaattatgtaaacaaaataaatatgacatatttaagtaattattcggtatcatgtatttttaaatatcgagctcctgtgtggagaattgcttgttgaataattattttgcaatagtaagccttggttcatatttcaataagtctgttgctgtacttggaaactataagttattgtttacagcttaggaatgtatacaaattaggaaacgcaatgtattcaattcatgttcattaaaatacaacaaacaaacaaattaggtgtaccaaacgaaacgtatagaaagtgcaagtgaagcagcgacatgccgctcgggttgaataaataaaaaacttaacttaaacgtaggatggaacaaaaaacaaattggcatttcggtcgagaatcagcaaatgcaaccctcacagtcctgttcctattcctcatttatacttttacattataattataactaaaaactactcacttgctgatgcgcagccgattggtgaacaggggttagaggaggtggctgtgattgaactgcattttccggctgtaccgccaagtatatttttgttgggcctagaacaccaagtttgccatttgactcttgagctaaaatataagtgggagatattaaaaggttacaaaatatattatagaattacacacccttcattagttgctgcttcacctgcgtttgcaccaattgcagttgttgtgcagtgaaatcgttgcccaccaggccttgcaatactatacgtggaccatgctcggtttgcaatacttgagcggtgacacatttaattactgttccaggcggctgattctgcagaagactttcctcaacactcaaggcttgctgttgggctggagcctggacagcctgggtgagaaccggctgctgagttattggggtaacgccactttcgaagtttgtgggtgactgttgatgtatttgctgctgctgcacaacgacttgttgtggactttgtggtgggagagcctgttgcttgactggtgaggtctgcgggttagcttgaggtactgcagtagctgaattacttgtaacgatgtgagcgttcccatcaccttggtgtttaatatgtgccacgatttgagcctgattatttcccaacggttttacgattacttgttgcccattcactgttgccacctgcaatttgccctgtgctaactgctgggctaaagttgaatttggaaccaagacttgttgtgtgccagtttcattgctatcagtcgtggtgatttgcgttttttcttcaatggtttgctgcgattgttgttgaaccacaagctgtttaaccagtttggtttgtgcacttggcgaagattgtacaatttggtttgattgaacaacgaattgttgctgaggctggacgacatgatgttgttgctgctgctgctgggtttgaatctgctgctgaaccatctgcaatgcttgactctgcggcacattcctctgagtaacaatagtttgaccggggcttaagataatccgttgaccgccaactactatctgctgctgcacgttgctggtattaacaatttgctgaattactttttgcgttggttgattaccgacctgtgtcatggagatctgttgtggtgactgctgaattggttgcgattgtactagttgctgctgttgaaccggtgatgttccttgctgttgtgccgccgatgtagatataataaccttttgcccttgtgcattttggcccactaccagttttgacccagactgtacgaatacttgctgtagagtttgcccagaggtactagtgttaaccactttcgacactatcttttgcacaggggatgatgaagttgctggtgatgaagatgttgattgctgctgctgttgggccagtaacaacttattcttaatttgagcaagcggtaaggctacgcgcgaggatgatgctatggattgggtcgcagaatttttcgtgacatgtttaactgcaatttgctttatcactggcgtcactggatttgtagtagtctgtgctgaactgattgccggtgacgacgaagtagaagctggcttaatgggaaccttcattttgtttcctagaaataaatggtaatacattacatttgtaatattagatttgagctttttaaaatataacccaccttgccccgccgaatttgaagatgttgtggtagtcagcacatggagttttccatccggcatttgaaccagctgctgcccaggattcaacccgcgtacgcttactttgccatctgggccccttataatttgtactttatgcggtgtagatgtggatggatttgattgagtgcttgtcgagcctcctacagtaggtgaagcagctgctgctgcagtattagctcctcctgttcttgaaacctgtgttactgcctgctgaataattcgagttgtgccatcagggtttttaacaatgacacgcctgctaccgataacttggcctttaactgaaatggtataatataatggtcagttcctccctatgaataaaacttaaaatagtttacctggtgtcacagaacgggttatttcgccagttgcaaccaattttctctgctgatgaacagcgcgctgtaattttaattgttgttccattttttctttaacatcttcactcaacttgggtgccagttggacgcgtccggcgacgccaagagctccattagttgaagtgttggaaccattactaccacttgcctccaattgacgggatgctacagatcgcgtaacagctgataggcgtgccttttcttgtttttctcccataaatttaatttcccataactccaatttatcttcgtcgacccattcctcggtaatttgtggctcggttggctgaggagattcagcacgctttcgttttcgcagtccggaccgtatggatgttacttctagaacgagaaataaataatttattttgaatgcctttacggaaatgcacattaattctcacctcttacagtcttcggcatttcaagtggaataacaacttttcgtcgcaaatagcttgttttttcaccatagcgtcctgagtgccgaagtttgagcaattccaatgttacaatttcagtatccgtagtaacctgatgcttcccatccgtggatgggggctttgctatcatgtcatcccagcggagacacgaccacaatattcgaagctgaagtgctaggctggataaggacgtggcattagatgttctgtaggaccagcaggttcggaagaggggacgcgagcactgatactgccaaattgtgttatttttcgcagcgtgatgaaaaccatttgtcgatgattttccacccagacgagccagcttcaggagctcaaatcgtggtagcactaaaaggctacgcttttttttatgagtaagaaaattggatataagtggataccgagagtatgatggctttttagttatcgttgacttatcctcagttttgacagcttgctcatacaacttggccgcatcattaaggaggtatacacgaccccgaggtgaactagtcgaatagacccgctcgtttccattctcaaatgtctctcgttcgtattttttgacacattcgcgcttaaccggacgtgcagtaataggaaatctgcggttctgtttgttaagtggtatatccttgtctaacgtctgatccaacacatctttagtgccgatgtagctttttttcgatttctggttacgctttcgccgccatccaggtgtcatatcgacatcttcagcgttaccagagtttaagcccgtaacaatggaatcttcggtactctcaatttcaacattactacaaacgtccatactctcaatatagtctattttatcggagtcttgtgtgttcgagtcaggagttgtattgcatccggaactggcattcacctcttgtttaattttcgtgttggttacgcactcctggtcaaccaggatgcattcggtcaataaagaatcgctaaaaggaacggcgtgcgctcgtgcatgttcccaatcttgaagtaaatccaacggcgcttcggattcagctggcttcccctcttcagaatcatccacggccacctgagtggattctcttttaccctccgtcagcttctgctcgagaatagatggctttttaacagcgcccaaaatagcggcaactgtctcttttgagccattaccggcagtatgcgcctttcgtaacaacaaaagaagttcttttttggcccgagctttttgaagacataagggagagtagcaagtattttgggttatttgagagacagcatttgaattggtgttacactcctttgtataacaacgaaaaactttagcaaatcgattaagctgactaaattgtaagcgcacggtttgaatttgtttagccagcgaattaacaagttccaagtttacgtttgcaggacccccctttgcttggacttcagtaaggcgaagtaaacgcttctctagaaacgtttgtttgctgttggctgtattattttgggaagaaacaagaagcggcttcatatcagaaggaattttagaagccatctgctcctcgacctcggccaactttaaacggcgatccaataagtcatctaatctagatttgcgagccacttttgaataataagtacggcctggagcatttagcgctttgctgacgtcgatgtgccctttgattttctccgtaacatcttctataactttcacatttttatattggtccggtaaataatgacacacctgaccatcgacattgcttgactcacattgttgcataaaccgttgggtgcgtgggtcgactaaaataatttcatttacgtcgttttcctctcccatggtgtaatgtacgtagactctattgtgtgttagaggttgggctcgacgtgcacgaacaccacagcgtcgactgcttgagagccaaagccagccccattgcccgtggacccggtattcttctcctttttgcttccagacttgatgtttgagacccagggtatactttatgtagttaaatgctaagcgattacgttcttcctcatcatcccgctcgcgcttctctcgcttttctagtttttttcgctcctctc

SEQ ID NO: 15452 - DNA, 3259 bp, DROSOPHILA
agaatccactcaggtggccgtggatgattctgaagaggggaagccagctgaatccgaagcgccgttggatttacttcaagattgggaacatgcacgagcgcacgccgttccttttagcgattctttattgaccgaatgcatcctggttgaccaggagtgcgtaaccaacacgaaaattaaacaagaggtgaatgccagttccggatgcaatacaactcctgactcgaacacacaagactccgataaaatagactatattgagagtatggacgtttgtagtaatgttgaaattgagagtaccgaagattccattgttacgggcttaaactctggtaacgctgaagatgtcgatatgacacctggatggcggcgaaagcgtaaccagaaatcgaaaaaaagctacatcggcactaaagatgtgttggatcagacgttagacaaggatataccacttaacaaacagaaccgcagatttcctattactgcacgtccggttaagcgcgaatgtgtcaaaaaatacgaacgagagacatttgagaatggaaacgagcgggtctattcgactagttcacctcggggtcgtgtatacctccttaatgatgcggccaagttgtatgagcaagctgtcaaaactgaggataagtcaacgataactaaaaagccatcatactctcggtatccacttatatccaattttcttactcataaaaaaaagcgtagccttttagtgctaccacgatttgagctcctgaagctggctcgtctgggtggaaaatcatcgacaaatggttttcatcacgctgcgaaaaataacacaatttggcagtatcagtgctcgcgtcccctcttccgaacctgctggtcctacagaacatctaatgccacgtccttatccagcctagcacttcagcttcgaatattgtggtcgtgtctccgctgggatgacatgatagcaaagcccccatccacggatgggaagcatcaggttactacggatactgaaattgtaacattggaattgctcaaacttcggcactcaggacgctatggtgaaaaaacaagctatttgcgacgaaaagttgttattccacttgaaatgccgaagactgtaagagaagtaacatccatacggtccggactgcgaaaacgaaagcgtgctgaatctcctcagccaaccgagccacaaattaccgaggaatgggtcgacgaagataaattggagttatgggaaattaaatttatgggagaaaaacaagaaaaggcacgcctatcagctgttacgcgatctgtagcatcccgtcaattggaggcaagtggtagtaatggttccaacacttcaactaatggagctcttggcgtcgccggacgcgtccaactggcacccaagttgagtgaagatgttaaagaaaaaatggaacaacaattaaaattacagcgcgctgttcatcagcagagaaaattggttgcaactggcgaaataacccgttctgtgacaccagttaaaggccaagttatcggtagcaggcgtgtcattgttaaaaaccctgatggcacaactcgaattattcagcaggcagtaacacaggtttcaagaacaggaggagctaatactgcagcagcagctgcttcacctactgtaggaggctcgacaagcactcaatcaaatccatccacatctacaccgcataaagtacaaattataaggggcccagatggcaaagtaagcgtacgcgggttgaatcctgggcagcagctggttcaaatgccggatggaaaactccatgtgctgactaccacaacatcttcaaattcggcggggcaaggtgggttatattttaaaaagctcaaatctaatattacaaatgtaatgtattaccatttatttctaggaaacaaaatgaaggttcccattaagccagcttctacttcgtcgtcaccggcaatcagttcagcacagactactacaaatccagtgacgccagtgataaagcaaattgcagttaaacatgtcacgaaaaattctgcgacccaatccatagcatcatcctcgcgcgtagccttaccgcttgctcaaattaagaataagttgttactggcccaacagcagcagcaatcaacatcttcatcaccagcaacttcatcatcccctgtgcaaaagatagtgtcgaaagtggttaacactagtacctctgggcaaactctacagcaagtattcgtacagtctgggtcaaaactggtagtgggccaaaatgcacaagggcaaaaggttattatatctacatcggcggcacaacagcaaggaacatcaccggttcaacagcagcaactagtacaatcgcaaccaattcagcagtcaccacaacagatctccatgacacagcagatagtagttggcggtcaacggattatcttaagccccggtcaaactattgttactcagaggaatgtgccgcagagtcaagcattgcagatggttcagcagcagattcaaacccagcagcagcagcaacaacatcatgtcgtccagcctcagcaacaattcgttgttcaatcaaaccaaattgtacaatcttcgccaagtgcacaaaccaaactggttaaacagcttgtggttcaacaacaatcgcagcaaaccattgaagaaaaaacgcaaatcaccacgactgatagcaatgaaactggcacacaacaagtcttggttccaaattcaactttagcccagcagttagcacagggcaaattgcaggtggcaacagtgaatgggcaacaagtaatcgtaaaaccgttgggaaataatcaggctcaaatcgtggcacatattaaacaccaaggtgatgggaacgctcacatcgttacaagtaattcagctactgcagtacctcaagctaacccgcagacctcaccagtcaagcaacaggctctcccaccacaaagtccacaacaagtcgttgtgcagcagcagcaaatacatcaacagtcacccacaaacttcgaaagtggcgttaccccaataactcagcagccggttctcacccaggctgtccaggctccagcccaacagcaagccttgagtgttgaggaaagtcttctgcagaatcagccgcctggaacagtaattaaatgtgtcaccgctcaagtattgcaaaccgagcatggtccacgtatagtattgcaaggcctggtgggcaacgatttcactgcacaacaactgcaattggtgcaaacgcaggtgaagcagcaactaatgaagggtgtgtaa

SEQ ID NO: 15453 - protein, 997 aa, DROSOPHILA
MDVCSNVEIESTEDSIVTGLNSGNAEDVDMTPGWRRKRNQKSKKSYIGTKDVLDQTLDKDIPLNKQNRRFPITARPVKRECVKKYERETFENGNERVYSTSSPRGRVYLLNDAAKLYEQAVKTEDKSTITKKPSYSRYPLISNFLTHKKKRSLLVLPRFELLKLARLGGKSSTNGFHHAAKNNTIWQYQCSRPLFRTCWSYRTSNATSLSSLALQLRILWSCLRWDDMIAKPPSTDGKHQVTTDTEIVTLELLKLRHSGRYGEKTSYLRRKVVIPLEMPKTVREVTSIRSGLRKRKRAESPQPTEPQITEEWVDEDKLELWEIKFMGEKQEKARLSAVTRSVASRQLEASGSNGSNTSTNGALGVAGRVQLAPKLSEDVKEKMEQQLKLQRAVHQQRKLVATGEITRSVTPVKGQVIGSRRVIVKNPDGTTRIIQQAVTQVSRTGGANTAAAAASPTVGGSTSTQSNPSTSTPHKVQIIRGPDGKVSVRGLNPGQQLVQMPDGKLHVLTTTTSSNSAGQGGLYFKKLKSNITNVMYYHLFLGNKMKVPIKPASTSSSPAISSAQTTTNPVTPVIKQIAVKHVTKNSATQSIASSSRVALPLAQIKNKLLLAQQQQQSTSSSPATSSSPVQKIVSKVVNTSTSGQTLQQVFVQSGSKLVVGQNAQGQKVIISTSAAQQQGTSPVQQQQLVQSQPIQQSPQQISMTQQIVVGGQRIILSPGQTIVTQRNVPQSQALQMVQQQIQTQQQQQQHHVVQPQQQFVVQSNQIVQSSPSAQTKLVKQLVVQQQSQQTIEEKTQITTTDSNETGTQQVLVPNSTLAQQLAQGKLQVATVNGQQVIVKPLGNNQAQIVAHIKHQGDGNAHIVTSNSATAVPQANPQTSPVKQQALPPQSPQQVVVQQQQIHQQSPTNFESGVTPITQQPVLTQAVQAPAQQQALSVEESLLQNQPPGTVIKCVTAQVLQTEHGPRIVLQGLVGNDFTAQQLQLVQTQVKQQLMKGV

SEQ ID NO: 15454 - DNA, 2606 bp, DROSOPHILA
tgctaatagttttgccgatagtgctacctgtagtttccacttgccatctctaaaaacgtgataaacacgcttgttttgtttttaaagttggatccacttgcctgcttgcaaaatatggctcttttgactgagaagcgtgttaaaaagacacatgctcctgcgagcgacagttctccggaggaatccgattccgagggcagccagaattcagccagcgaagcggagggcaacgccggctgggcggattccattcagaaggtcctgaagaccaccaagccgaagacccaaaaaaaaaccgtgctagctcgagccaaaaaaagccaggcggctgtgcgattccagaaagacgccgccaacaaaaagccaggattcgatttcgagatcgagaaagcagatgtcaaggaggaggacgaaggcgataaccatgaagacgagaagccgcaggcctctgccttggatgccacgctaaccaaacagcagcgtaagaatgtgcccctccagctgcgtgtgaagcccagtttccgggacatggagcgtgaacgaacgctccgcaaagttgccactcgtggagtggtgcagttctttaatgccgtgcgcattcagcagaaggatctgcagcagcagctggaggaagcgggtccgctggacagccgacaggatgcggtgctaaacaacatcaacaagcgaaagtttttggacgtcctgatgagcgggaagcgcgccaaatccacacccgtagataacgctgtaaagaaagaggaacaagaaacggatgacgacgacgaagacaagggctccagcggcaaaaagaagtccgaatggagtgtgctgcgcgaggacttcatgaccaacaagaagatcaagcactgggacgaggaagacgacgacgaggagggtcacaatgatgaagctgatgacagcgattacgatgatggggaagaatagctttaattaccaaataaatgttagcttttcaattaagtcgcgtttatataatggtctaattaatggtttccgccttggaggtcatgtagatggccacaatcaggccaaacagtccgatagccgagccaaaaatctccacaatgaggatcttgacgaagagcgccgagttggccgcatccgccagggcagcgccggatcccacgatgcccacagcaatgccgcaggccacgttcaccattccaacgcagagacctgccccaaaagtagcgaatcccgtaaacatattggtcgccatgaccgtgctgtcggtgatcagacgcacgctgctgaacttgttgacgttgccggacagcaggatggccgtgatcaggccatagatggccaccgcctcgcaaaagatgactgagatcaggttcttggtcttgatgcgaggcgatcgcactccgccgcccgccacactgcatccaatcatgtagattccactggcggcgcccagaacggacagggcgcaggcgaggaagatgcccatgccggaccacaggaagggattcgaggtgtacaggaaccagccgagccccatgcgctcacccatattgaccatcacgttggcgaagattatgccaaccgcgcccaacgaggcggcgcccagtacgaacagcataaagaataatccaaaactcatcttagagatcatcttttaagcgaaaagcttcgaattaacagaatataaagaatcgattttaagttggcacggtggaatgaaatcttttcgaactgacaggataatcatttcttatagaacatataaatgatatgtagaaatgaatgccaataaaaacagaaggaataaaatacatttgtgtatttagttagaagatgaaatgattacatagcaacttatgtaagtcggcatcaattcatggaaatgcagaaaatccgcagcttaacgattcgacttggccacgcgctccaactcgtccttcttcttgatggcgtaggagttggaggatcccttggcggcgttgatcagctcatcagccagacactcggccaccgtcttgatgttgcggaaggcagcctcacgtgctccagtgcagattagccaaattgcctgcaaaaaaacattcagttattaactttattgtgtcaagttctattttgacttattataatggataaaaataactttctgctactgctttctaattatttacattgaaatcggtatgtattgtacctattattttaaatttaagcagtgtccaagtgcctgtaagaattacgtagataactttcttaactacaagaagttccctgaaaatgactcattttaacttcatacgactttgtggaatgcgaacacgattacctggttgacacgacgcaagggcgacacatcgactgcctggcggcgcacagtgccggcgcgtccgattcgcgtggagtcctcgcgcggaccggaattgacgatggcgttgacggtgacctgaagcggattctccgaggttagcagatggatgatctcgaaggcgtgcttgacgatgcggcaggcgaggagcttcttgccgttgctgcgccccttcatcatcagcccgctggtgaggcgctccacgatggggcattgggccttgcggaatctcttggccgcatagcgtccggcg

SEQ ID NO: 15455 - DNA, 606 bp, DROSOPHILA
atgctgttcgtactgggcgccgcctcgttgggcgcggttggcataatcttcgccaacgtgatggtcaatatgggtgagcgcatggggctcggctggttcctgtacacctcgaatcccttcctgtggtccggcatgggcatcttcctcgcctgcgccctgtccgttctgggcgccgccagtggaatctacatgattggatgcagtgtggcgggcggcggagtgcgatcgcctcgcatcaagaccaagaacctgatctcagtcatcttttgcgaggcggtggccatctatggcctgatcacggccatcctgctgtccggcaacgtcaacaagttcagcagcgtgcgtctgatcaccgacagcacggtcatggcgaccaatatgtttacgggattcgctacttttggggcaggtctctgcgttggaatggtgaacgtggcctgcggcattgctgtgggcatcgtgggatccggcgctgccctggcggatgcggccaactcggcgctcttcgtcaagatcctcattgtggagatttttggctcggctatcggactgtttggcctgattgtggccatctacatgacctccaaggcggaaaccattaattag

SEQ ID NO: 15456 - protein, 201 aa, DROSOPHILA
MLFVLGAASLGAVGIIFANVMVNMGERMGLGWFLYTSNPFLWSGMGIFLACALSVLGAASGIYMIGCSVAGGGVRSPRIKTKNLISVIFCEAVAIYGLITAILLSGNVNKFSSVRLITDSTVMATNMFTGFATFGAGLCVGMVNVACGIAVGIVGSGAALADAANSALFVKILIVEIFGSAIGLFGLIVAIYMTSKAETIN

SEQ ID NO: 15457 - DNA, 5546 bp, DROSOPHILA
ttagtgatctgctgcggcactctgcactcccgtgatagctgcgtcggaatctttgaatgtgccttcgggctttttcgggaccccttggctgacaacaactggaaacccaaaaaagtgaagtgcttccttaaaagtgaagctcagcccccagagctgcactatctgtgctcgagcgaaactctgcagacagctctggagctgtcagtaccctctgatgacttgaactagcggactgttatgtatcagcccgtccacatgaagtataatttcaaaaagaactgaatacttacttggacagaactatattaatcaatttgctctatgaatgttctacttaatatactcacgagttgaaactgcaaggcgtggaacaaatgtgttgactgcacaaactgcaaaattaaagaaaacaaatttattaaagaagtgtgggttaaaaaatatgagctgaatctgacagttagtcactcagatttgagcttatatgcctgatactttcttcgaccaaccgaagatacgattttctattttaccaactaaattctttttgtttactatttaacaaattcatattataatcattgagatacttttaggacatccaatttacgcaagaaactatatacattaaaaaattgttattaatagtgttagttattggtaatattaggtaaatcggagggacatacagcgtttgaattgtgttaggtatcctctgctaaatcgtgagtgtaaattattaccagttcagccagccacaaggccaaagaaggctcgcccgtaacaagcggcacactgaaattttagtacacataaatacgattcacaaaacaggttgaaactgtacttatgtgtatttatatatacatacacacatatatacatatgtatacatatatatatatatgtatacacatatataatagaactatatagtgtttggcgaatccgttacatgcattttatacagtagcataaacatttacacacgcaggaaacattaattgaataccaatattttgtataattcggttctcaaaacgccatagagcttaaaaccacagaacatatttagatcgcttgtgtagatgtaatgatctagtgatttttggttgagcagatgtatctaaaataacaaacgataactagtagctaacggctgagttagggaattgttgtcttagaactatgcgaaattaaattacgtttcattaacttcgtcggtcgatttacatcttctcctgtatgaatggatgaactagtgcctggttaagggagatccgtttagccggatctaaggcaaacatgttctctagaagatccttgagctgggtgaccttgcgatgttgatcgtcgggtaagttctggtcagcaattagttcctgctgcaggctacgcgaaggtttgactacaggcattacaacaattttttcctgtggatatacaaaattggcattagattctcactttatcccaaaaacacttaccctctcagtgagcttatctatttcatggtagagaaagttgcagctttggtcaaaatgctgctctctaaactgaccttttctgataattcggtttggtatcttgccttttacgtccatgaaaaacttaagcatctgattgttacttttcccgctaaacagaatctttcccgtgtataactcataaattgtgcagcccgcagaccaggtgtcgattccgtagtcatagggaatacccaaaattatctcaggcgaacggtagaaccgcgataccaagtacggtgttatttcgttgtcgctgattgccgaagcagaaccaaaatcacacaattttagtatcagattattttcgtttaccaaaatgttatccggcttaatgtcagcatgcaaaatgcccgtcttttttaacaatttgagcgctaagaatagctgctgcgtgtagctacgcactgctttgatgtggagtcccacattcttgccatactttttaagtacttcccgcaaattcattgctaatggctcaaacaccatacaaagatgctatagtggaaatataaagattgcaattcagtcgacactaagttgtacaaacgatgaattacctgcttgtgaaagaagtgacgatacagtcgcaggcagtggaaacgatcctctggatcggcatcgttcagcttttttaatatttctagttcccgcaagccagttttgtgcctaataaaagaaacaaacggcataaataggcatacaaatacaaaaaattacaaaatacatacattatttcgttgttccgtatgatcttaatggctacattagcttgcccacgagcttggtctctgccacgcactacgttgctgaagacaccctggcctgtgtatccattcactaggtagcgattgtccaaaacttcaccgatacgaactcggtaataaccttcagcgtcgtcccaattgtctgtgagagcgggattttcgtgttgatgcttattttggacgattgtgttgggtgactggtgggatttgaactcggaattaataaatggaatgaagaatttgagtttgaaatttacaattttgcgactcacatcgaaattagagtccacgtcttggtcagcgaacatatcccactcgtttcgtttttccttcgcggagcaagtcttttggctagtcgagttatccatatcttcgcgatcctttggaatttccgagataagtggattcgggcacggcatcgtgggcgacggcgttcttaaaggtctttcgcgttgggatgacccttgtgaggtactccgagactcgtacgagaccgagttatgaggcgctggcgattcttgcccagtgcccagcttctgattacagttataggagaaaaacaataagtttacactaacaaatattaaaaacaaaatgtttccctaccttgagtagctcctcgcgcttctttctacgtagctcaatgatacgttcttcgtcatcttcctccaaaatgtcaatgtttacgttcacctcctcatcactgctctccttgtcgagcttattttgcccctcgctcagcgaacccttgtaccgatctctatccccgttgtctgtcccgctgcgagctcctacgcgcccgccaccacgatcccggtccttttgccgctcccgctctcgtcgcctgtctgattcaaacttactgcggctgtgcgaccgctgcatacgactcggccgaacgtctcgctcccgtgcacgacctggtctcatatcagtgggtggcggcggcctatccaatcctcgccgatcccggtctcgactatggtcccgtctttccctttgcttgtcgcgatttatttcctgtcgtaggtcctccatgttgcggttgcggctccgcgggcgaacctgggtctgctgatctgatgctcgccgacgtgggggtgaacggtcgcgatccctcgaacgacgatccctacggcaacggcttctcggagccgctgggagcggggatgcgtggcgccttcgtttctcgggtgtaggcgagggggttcgctggcctccgctagaatcatccaacaatataacatcggattcatttgagttatgcgtggtagactttttaatattagcatgtttactggttgcagtagccaacggcgctgcagacttgctgggttggggctgcggtacggatgtgacagctttgagcactgatttggtgtggacaaccagctgctgcgagtgtgtgtgtgggaggagatcgcccttatcctcagcctcgggatccgacatataggcgcccaggcgcgcctgcagaagggccttctgccgcatcaattcctccaaattaagctcgtcttcaataatagacaaaataataggactggcggcatcggcgggcctaaaatcaagaaagataagtgcgaacaccatatgaattacgaaatcgctcccctattttattccacaatacttacacatcgctttcgctgcttgaactggccacctccaggacaggcagcatcttattctgaatagttttggtgatttcttcaacaaggctgctcggatccgtcggaagcaggggtttgccgacacggaaatcggctccattccggctggccttctgcatgatttctgtgaacttgctgctcagcccgcaattttgtgatagctttaactttgcgttttccggggcgtccgattcgtttgtggattcgcttgttcggtgggggcgcttttttgccttcttctgcttcttgtggacatgcctgtccttctcggtcttgccagtcgaggattttttatgttttttgtgctttttagcctttttgtgcttggcccgacgctcttcggtctcgctgttgttgctggagtcgtagctattcggtacaagaggggagcagcccaggtcaatacacacacgtgcggtcggcttagtaaaattaacctaccttttgtcgtcagccattatttgattgtttaacaatgtaaactgcagatgcgcgcacactgtgcgttcataaggtgtgcggtaattctgcagatggctaatgaaacttgtaattttcctcttattgtattcttcctcttcgtagcttttttagtgtgactgcacgccggacaaaagtaaatacgttttaaaaatacctcctgggatttcggaattatttctagtatatatgcaagtaaaataaaaatatattaaaattaaattttataacccttaaatatcgtctttggcgcaagtctaaattggaaataaaaacgaaggaatttcgaaacaacagttgaatttgtatattatagttcatgacattttatttttttgtttttattgtacatgctagcgcttctaacctaattggcaacagctacatccacgtcgtgctcatctttgtcgatgcttagctcaagcaccgtgtcctcttctacggacatggctttagagtcctcagtagagactgagtgatatttgggctcgccgcgggctccgtcgaactttgtgggagtgctattgttgagatcgtcgtcttcatcgcttacctccatgatcccattgtcgtctaggtccggctcagagcgggcatcgcaatcgctggacgaggaggatgccgaggatgagctgtcctggtccagctgctgttccagctcgtgaatcgtgtacatcagcaaagtgaagtcattgcgtcgtttctgaaacttgcgctccatctttagcttcttttgcaccaagtcgtcaatctccctcctaatggtctcaatatgtcgctgtgtttcactgcggtccggttggtcctggatgagcgaggccagcaggtcgtactccatcttgttcttgcgaatctgcttggcagtgattagctcttttttactggattcgatttccgctttagccaaaacaatactttcttcgtggtgttcaactagttgtgtgtagttgtcacgctcaccggcgatcatctgcagagtttgtacattctttaacgcagtgagcttgcactgggcgaattgggccatcagtcggtcgtacatgatgggactgtaattcggaaaagaggagatatgtacaccatgttttgaatacacacat

SEQ ID NO: 15458 - DNA, 3075 bp, DROSOPHILA
aagaggaagaatacaataagaggaaaattacaagtttcattagccatctgcagaattaccgcacaccttatgaacgcacagtgtgcgcgcatctgcagtttacattgttaaacaatcaaataatggctgacgacaaaagctacgactccagcaacaacagcgagaccgaagagcgtcgggccaagcacaaaaaggctaaaaagcacaaaaaacataaaaaatcctcgactggcaagaccgagaaggacaggcatgtccacaagaagcagaagaaggcaaaaaagcgcccccaccgaacaagcgaatccacaaacgaatcggacgccccggaaaacgcaaagttaaagctatcacaaaattgcgggctgagcagcaagttcacagaaatcatgcagaaggccagccggaatggagccgatttccgtgtcggcaaacccctgcttccgacggatccgagcagccttgttgaagaaatcaccaaaactattcagaataagatgctgcctgtcctggaggtggccagttcaagcagcgaaagcgatgtgcccgccgatgccgccagtcctattattttgtctattattgaagacgagcttaatttggaggaattgatgcggcagaaggcccttctgcaggcgcgcctgggcgcctatatgtcggatcccgaggctgaggataagggcgatctcctcccacacacacactcgcagcagctggttgtccacaccaaatcagtgctcaaagctgtcacatccgtaccgcagccccaacccagcaagtctgcagcgccgttggctactgcaaccagtaaacatgctaatattaaaaagtctaccacgcataactcaaatgaatccgatgttatattgttggatgattctagcggaggccagcgaaccccctcgcctacacccgagaaacgaaggcgccacgcatccccgctcccagcggctccgagaagccgttgccgtagggatcgtcgttcgagggatcgcgaccgttcacccccacgtcggcgagcatcagatcagcagacccaggttcgcccgcggagccgcaaccgcaacatggaggacctacgacaggaaataaatcgcgacaagcaaagggaaagacgggaccatagtcgagaccgggatcggcgaggattggataggccgccgccacccactgatatgagaccaggtcgtgcacgggagcgagacgttcggccgagtcgtatgcagcggtcgcacagccgcagtaagtttgaatcagacaggcgacgagagcgggagcggcaaaaggaccgggatcgtggtggcgggcgcgtaggagctcgcagcgggacagacaacggggatagagatcggtacaagggttcgctgagcgaggggcaaaataagctcgacaaggagagcagtgatgaggaggtgaacgtaaacattgacattttggaggaagatgacgaagaacgtatcattgagctacgtagaaagaagcgcgaggagctactcaagaagctgggcactgggcaagaatcgccagcgcctcataactcggtctcgtacgagtctcggagtacctcacaagggtcatcccaacgcgaaagacctttaagaacgccgtcgcccacgatgccgtgcccgaatccacttatctcggaaattccaaaggatcgcgaagatatggataactcgactagccaaaagacttgctccgcgaaggaaaaacgaaacgagtgggatatgttcgctgaccaagacgtggactctaatttcgattcacccaacacaatcgtccaaaataagcatcaacacgaaaatcccgctctcacagacaattgggacgacgctgaaggttattaccgagttcgtatcggtgaagttttggacaatcgctacctagtgaatggatacacaggccagggtgtcttcagcaacgtagtgcgtggcagagaccaagctcgtgggcaagctaatgtagccattaagatcatacggaacaacgaaataatgcacaaaactggcttgcgggaactagaaatattaaaaaagctgaacgatgccgatccagaggatcgtttccactgcctgcgactgtatcgtcacttctttcacaagcagcatctttgtatggtgtttgagccattagcaatgaatttgcgggaagtacttaaaaagtatggcaagaatgtgggactccacatcaaagcagtgcgtagctacacgcagcagctattcttagcgctcaaattgttaaaaaagacgggcattttgcatgctgacattaagccggataacattttggtaaacgaaaataatctgatactaaaattgtgtgattttggttctgcttcggcaatcagcgacaacgaaataacaccgtacttggtatcgcggttctaccgttcgcctgagataattttgggtattccctatgactacggaatcgacacctggtctgcgggctgcacaatttatgagttatacacgggaaagattctgtttagcgggaaaagtaacaatcagatgcttaagtttttcatggacgtaaaaggcaagataccaaaccgaattatcagaaaaggtcagtttagagagcagcattttgaccaaagctgcaactttctctaccatgaaatagataagctcactgagagggaaaaaattgttgtaatgcctgtagtcaaaccttcgcgtagcctgcagcaggaactaattgctgaccagaacttacccgacgatcaacatcgcaaggtcacccagctcaaggatcttctagagaacatgtttgccttagatccggctaaacggatctcccttaaccaggcactagttcatccattcatacaggagaagatgtaaatcgaccgacgaagttaatgaaacgtaatttaatttcgcatagttctaagacaacaattccctaactcagccgttagctactagttatcgtttgttattttagatacatctgctcaaccaaaaatcactagatcattacatctacacaagcgatctaaatatgttctgtggttttaagctctatggcgttttgagaaccgaattatacaaaatattggtattcaattaa

SEQ ID NO: 15459 - protein, 907 aa, DROSOPHILA
MADDKSYDSSNNSETEERRAKHKKAKKHKKHKKSSTGKTEKDRHVHKKQKKAKKRPHRTSESTNESDAPENAKLKLSQNCGLSSKFTEIMQKASRNGADFRVGKPLLPTDPSSLVEEITKTIQNKMLPVLEVASSSSESDVPADAASPIILSIIEDELNLEELMRQKALLQARLGAYMSDPEAEDKGDLLPHTHSQQLVVHTKSVLKAVTSVPQPQPSKSAAPLATATSKHANIKKSTTHNSNESDVILLDDSSGGQRTPSPTPEKRRRHASPLPAAPRSRCRRDRRSRDRDRSPPRRRASDQQTQVRPRSRNRNMEDLRQEINRDKQRERRDHSRDRDRRGLDRPPPPTDMRPGRARERDVRPSRMQRSHSRSKFESDRRRERERQKDRDRGGGRVGARSGTDNGDRDRYKGSLSEGQNKLDKESSDEEVNVNIDILEEDDEERIIELRRKKREELLKKLGTGQESPAPHNSVSYESRSTSQGSSQRERPLRTPSPTMPCPNPLISEIPKDREDMDNSTSQKTCSAKEKRNEWDMFADQDVDSNFDSPNTIVQNKHQHENPALTDNWDDAEGYYRVRIGEVLDNRYLVNGYTGQGVFSNVVRGRDQARGQANVAIKIIRNNEIMHKTGLRELEILKKLNDADPEDRFHCLRLYRHFFHKQHLCMVFEPLAMNLREVLKKYGKNVGLHIKAVRSYTQQLFLALKLLKKTGILHADIKPDNILVNENNLILKLCDFGSASAISDNEITPYLVSRFYRSPEIILGIPYDYGIDTWSAGCTIYELYTGKILFSGKSNNQMLKFFMDVKGKIPNRIIRKGQFREQHFDQSCNFLYHEIDKLTEREKIVVMPVVKPSRSLQQELIADQNLPDDQHRKVTQLKDLLENMFALDPAKRISLNQALVHPFIQEKM

SEQ ID NO: 15460 - DNA, 10286 bp, DROSOPHILA
atgtcattgacagatggatattattaaatagatagaaataaaatagtaagattaatatagtaggtatagctggaaacatatatcgtacaattgaaatcactttttgagcctgcgctcaacagcataagctcgttacaaacgaaatgaaagttgccgcataaaatgcaaacaaaaccagatcttgcgattaaaaaaaccaaattaaaaactgcaaagcattcagtaatgaatttaaaggccatttggaaatttacaaatttctttccttgattttctccacttgttttccattcgggaagaggatcagcgtgagcatgaaaaaagcaacaaaaaaggatttattctaatgcacccggggcgtaatatcgattggatccgctcttgagcttttcaattattgtttatgggtatccaaattcatctcgtttttcctgcccagcttggtaacttttgcattgtttgctgctcgagtattgacagtatatatgccattttgcattgggtatagaaaatattttatacactttatcatgtttcctgtgggtagcaaagtcatctttgtcatttcatttcgaataggtagtggaaaagcgagtctacgcgcatatatatatatccatatatatatatatggatatatatatcgtttgtgtgtgtatatacatcaaaatatttgtttaatttacgcgtacttggcatatgtatagatttcattatgtatactttgtaaaaaaagaaaatttagctacttcctctcgcagtcggtcgctgctctgccgcaaataaggacaactaaatcaatcaaagataccagcacatctcgctatcagttctcgctccgtgatccctgatcgaatcatctcccatctaaatatcactttccgggccaatagtaactaagcaatcgagccgcacacaaagccttagtctagaattttacaatgttgcattgtttcttgttgttgaatatgttttgtttgctttcttctgtgttttccttaatggattttttgttttgttttgggtgtggtgtctgttgtctgccgttgactaattgggatgacttggacgcttggactcgtgtggacgctcaacgcactcgcgaggtgggtctgcaaaataatgtgggtattagcaacagtttgcgatcaaccaaatatcattactcaccggggcgactgggcaaccgcctgtcgtttgggcgtgtttggcgccgtaaccgccactcgatttgtgggcgtgcgtgccctggccgatgtgggtgttgtggatgtgggcgtggtcgcaccggcaagactataacgctttggctgcacaatcctgctgggcgatcgagtgctgaccttgttaccgccggctgcttcctgggcgctggtcagtctgctagggcggggggaggtaaagagaccgggtttgttgtggcttttagtgacagtcttgggagtggccggcctagccggtgagggcgtggccaaaacgggggcagtacgtgacgaagtgggcgtggaacttctgaacatcagggccacaaacaaaatcaacatcatgcaaaataataattttgacgcaaggatgtaaatttggtgtacggtttaccaaaaatgaaaagaaataaattttggaaacataacataaatgattcaaaacaattaattttgtattttcgatatagagaacttgcaagtcggaatgcaatacttttcgttataataatactttttccgacttgcacttcttagtttgagatgtgtgttttaaagactactgacctgcccgctgggtagctaacaggcctaggaatcctagaccttggcgctgagttggagccagtcgaattgcccgaggtgggcgtggagccgccgctcttggtggccgcctcgctggccagctccttgagcatactcgagtccttgctcatgagctcccactggatttgcaggcgcttaaagcgattgctttcgatcttgcgctgctccagcacatccactgtatcgcgtttcagtgcacccatggagatgttgggcgagttgggaggtgtggcgaaacgtttggcgtgttgctgcaatccggcagccacaccctcatcattgaatgacactttcttctgctggctaagcactcggctcacctcctttttcagggcagcagcatcgtaagtcacatgctcgccggaagactctagaatcgacgcgatctcggcgtaatacttgagctcagaacgcggcaaggaggccaggaagctttcagcccgtgccctggcatccagatccttgcgggaaagcctctgtttcaccggcggcgccggctgactgtgctcctcctcctcgaagacatcggcaagttcgtcggtggagcccaaaccgtagttgttcggtggttcctgcaaactgcgccgcttctccagcttggttagcttctgcgtctgctgtgcctcgatcatggaattgcgcttggagcgcgactgtgcggagtgtgccttgcgcagaatgcttcggggcatgggttgcggcggggtttgagttaactgactaccgggactggtttccacgcccgagtccatgcgctgctgatcgtactggtacacatacatctgcttcagcggatccacgtccagctcggagtcggtgagcagcgttgatgagccacgataaccggagctgggctgttgactggatcccgagctggatgcctcgtccgtttgggtctgctggccctggaagtacttggcacagtcgcagatgtgcgtgcgatttcgccggagcggcggcgacatacagaaaaggggacgttgtgatagctccgcatccagttgccgcaccaggtgcttcacctccggaatgtgctgcaaccgccttcggtattccgacggcagcaaggtggccagcgactgccagtcggcaacgtgcttgtagtccagcgtcttgaggatttcatcttcgctcacgctctggctgctgttgcgctgcttccttagagatcccgagctgctggtactaccagtcgctccatccattgtcatcttgtagttgaagggtgagaagatcacgtctgtgctggcattagtcttaacgaatcccaaatcgggcagggcatagtttggatagattacgtaaatgggcgcctgtcgctcctcacccaagttattgagtttctcgaggaacgatggcggcacacagcgatagcgatcgctcagactgctcctggtggtgctcagtgatccgcaggaggtctgcatggagcgcgtgatcatttcggagctggaggcacacgacaacggacgcgtactggttccgcaacccgcttctgcccgccggggcacctgggttagctgttccgagctggcctccgaggacatttgactgccagtggatacctgagcagccagttggtacagttgtggattccttagtggcatactgcgacgacgatgtgctggtgaattggtcgcagtcaacgatcccgtggaactggagctggcgacatcatcgtagaacactgcctccgatcgggccctcagctgacgtctgggcgtctccgtatctgggtagtgctcctcctcgtcatgccgactaactgccgatcccttgcccgagtcgttcatactcttcttgcgaagtcgctgctccaaggagccactactggagctggccgcatcgctggacggccagcagccggaagagacatccatacaggtgtgcgcacttgcctgggctcccaaatcctcctggccgccactgctgttgctgctcttctgcttaatgaacagcttgactagattgaaggctggcggattggaggagttgcccgaggaggccgagccggaaatgtggctctcctgcgagcaactgcagcgatgcttgtggcgatggtggtgcgagtggtgatgctgctgttgcggttgctgtgatgtgggtgtgatctgttcgctgggcagctgctgatccgcctgttgctgcagtcgctccgaaatcgacacactaatggatataggcatctggcacatgggcagcagattcctggaccttgacttgcccgcctccatggtggaggtgctgatcgcctgagagacattcagtggaaccgcctgtggcccactctcctccggtccctgctctttgtggcaactacccgccatggcttcctcgttctgcagattgggtagactgctgctcttccgcacggtgcactgtggtaggtgtctggttatggtgatggtctccgtgttattattccccgagggatacctgcgagcgggcgaaacaaggaataacgagcgtctttaccacaacagacacgtcgagggtttgggattacaattttgttggcggaaggttttcttttttctgggtttttaggtaggaagcggtgtgaggttttcggattggttgctgccacggtttatgacttctttacctgctggcgtctattttaggtttatttgcataatattttcgggttttctgttatcctggctaatcgttttgtgaatgagttatgcgggctaaacccataattgcccatcttcagggattaacttgcctgatcacgtttcgcgacccaaaaccaaaaacccttgaaggttagcatatgccggcgcggaatatacgccaaaaagacccagtacgcatttgaaattaccccccgaacgaagcgttcgttccatacgttaatattccagccggcaggcaaatggaactaaattgaattcaattgaaatgaccccacacgattgcaatgagagcagcctgcaagaagggggaaaatgtataacatccgccggtcttgatgatatcgtttggcattcagaagctggacaactagctatctcatatttagttcatatttttttatcttgattaatataacgctgtctctgagaacatgtggcgtaatgtttacttagtgactttaagtctagcaaagtacccgggcaacaaccaatccttaggatattgtgcgaatctggtgcatggaatcatgtgtttatcctttggaacctaccgctgtaacttggccgccgatgttgtggctgcctgtcccttgggcgacatgggacagaggggctggaaagcctgcgccgaacgcgacatggacacctccagggctttattgcgtttcactatgtcctccagattgctgtgcaagttgatgcagttctgtttgttcctggcggcaatgtcactgggatccgctataaaatgaacacagaatatataagtttggactaacacttaagtattcaaactactcaccatagaaactatcatccgagtagagaacactgccctcaaaggcgatcgtgtagttgtccttgttgcaggtgagtataatctcgccgtcatccggataggcgtccatatccagtgaatccaccgagatgtgcgactccctcaccggcgaaaagagcaactccgacttgcagaaggagttatcgatcagttcgtttgtggaggtagtcgacgtctgggacatgtgctgcaacatactgttgtgctgcagcacctgttgctgttgtagctgctgctgttgttgttgctgctgctgaagcagcaaagattgctgaaggcgactgtttgtaccgcccaagctcttgcaataggcaggcagatgcgagagcagggaatgtatgtcctccgcccgaaagctctccatgtccacctcggccagattggcgtccagattcttggccagatcctcatagtagatcagatcccccatcgcattgtacgatgcagagagggaactcaaaacgctgcgctgcattccgccgcagccatctcgatagccgtagtccaggaaccactggtaatcggaattgtcgtgagtaaagtcgtgcgacgaggccaacgagcagttgagattgttgccaccgccattagtagtttcccgcatcccaacaccgccaccgccaccaccaccacaaagcatcccacctaccccaagttgctgctgttgctgctgctgctgcaactgctgttcgctgctgcgacctcccggcgtggttgcattgctattgtagtccgactcgggcgtggctgccatcttgcccagaacaaagttattgttgcccttatgcttccttgagttgtcgttgtcgcagtagagcaaaccgctcgagtcctcgccaaacaggaggctgtcgctgggcgtgatgatgctgctgctcacctgctcattcaggataatgctgcgcaacgcgttgttataccgatccaaattgctcagcacaatggccacattctgcttgagactctcctcgctcagttcctccgcagccagatcctcctccacatcgctgctgcccagcgattgcagttgctgttgctggcactgctgcagatgttgctgctgcaacaggcgatcggtcagttgctgctgctggtaccgcttcccaatcgtcgtctgtgccgtattgctgaatggcgaattgctgggactgttcagcggattgcggtagctgagcggggaatgtggcgatgatccgggcagaatgtgggcagccgtgttgttgccgttgtttagctggctaaatggcaaactctgctgaaacttatggggacgctgatgctgctgttgctgctgctgctgttgctgttgggccaagcgttgaagcagatgtgggtgagtgttgggattggatggagtgaatgcttgctgatggatgggtgagttctgatgcggcttctgctgagatgcggtgaaatgcggtttgctgtgatcgttgtttgttgagaattctgtcatgccacgtcgaattttggtgcctgcaagcagaagaaaacaaatggtacatgttaaaatcaagttgcataccttcgtttaatatacttaaagtattctaataccactgatttaactaccttcacgataatcccacccatggtcacaaacaatgttaattgtctaatcagcattgacactgaacttggctcaattaagatgccacagcagcggggcgaaactaactccggctaatgatctatccccattttcatttgcactttccccccgctccctctaatggacattagcgtgccgcacacatttcggagcagtaaaaacctgactgacggaggcgcccatctattgttggcatgtttcaattaatttttacgatgccagaccctgctgtagcaaataaggatgacactattcggttgacagactcccgactcgcgactccctctattccacaaaactgaaaagctgtaaaaattatttttatacgcctaagagatttttacgagtcaacacccatggatcgcatcgcatcgcattgtcgcgactaaaaagttcaattggaaaatttgacattttcccatctagctaggctacccatcttcatgcaacatgcaacgcctgtccgccagcagcaattaaaggttaaacttgatggcgttgcatgccttaaggcgataattcagtgccgaggaaaaccttctcgtttgccgcattgctatcgattgcagttgctggctacgactttcaacttccaactttcttatgcaatccctgttatggtatatcgggcactgaatttaaatttaaaattaactccgcacataaacaaatcaggaaaatcgggcggataaaaaggggggaatagcgagctggggaacctccaagaaagtgcagacacaagagattatagttttcaaatagattctcccccgactcggtgaacttttcctacagccgacaagtggcaaagcacatgtttttcccgccccaccatctttcaacctcccccaccccgaaaaaaaagaaatacagaaatatgaaatggaaagccatttcatatttgggccagcgcaagattacggacaaataaaagtattttaatgcattttgtgtgtagatacgagctgcattcagcattcgcgccgagaggttgatctcctccagcatcggagcactggacagaggagtgccagtgacgaatgccgagcgctggcctctccgatcgcaattaaagttaattgaaactacaaaagcccgtctcgagatgctcaagtggttgcgtcagggctgagctgagaaagatgtgacgattttacgaggaaacaactttaatccacaactacagtggctaaacttgcttactctttattgctaatcattgtgatgctcaccaagaaagtaatgatagagtcataatatacctgaaaagaagtcatagtttagacttcctacaaaaataacccactttatatcttaacttttaggcttaaagcacctcagtaatctctcagtagttagaaaggtttaagctaaacttaaactttctttatatcttagacacttaaagtagtattggttttaattaaagacttatcaagagcgcaccttggcccaaaactctaccattgtttcgctggttaatgctgttgttcagatagttgttcagatagttgttattgtcattgttgctgttgttgtccacatattgctgctgctgctgttgctgctgctgcagttgttgctgttgcattcgctgctgtcgcaaatactgttgattgcaggtaagacccgctgttgtagttgttgcatttgccggaggcgaaggcacgccctgttgcagcagttgctgttgcaggcggcgacgctgcagcaactgctgctgcaacagctgcaactgctgctgctgcatgcgctgatagaagcgtatctgctccagttgttgcggactaacgccaatgttgccaggtttgctgtgcttggcaaccctttgccgctgatgttgcagttgctgcggcacatagtagttctccttggaggagctgttgctgtcgcagccgctgctggtgctgctgctgttgctgttgctgttactcgtgccaccggcgacatgttgccagcaggccgtgtggttgccattggcatcgctggcttgcggattgctctggccgctgtggtgggtgcaatcgatgccggccctggagcaggcggcacagcgtttggaaatgtctacgaatctcatgatgaaggcgagcagcagcaacaacatctagttgttgcaggcgtatgttgctgccgatttatttttggccagtccgctgcggaccaacgctgcgatgttgccaagatgttcttgggacagtgtcgctgcttctgtattgctgtatttttagttattggctcttttttttaagcggttcaactccattgattggttgcacattttgtttggatttttcctttcggttcttcttttctatgctgcacttttcattttgatttcttcgtagtctttgatggctatttatacatgttgttatgcttgatgcgtaagttttctcttctctatacgacacatggaccaagttttatatataaaaataacacagattgtttgtgtgtatgcgctacactgttcagcccacaaaaagttttgtgtctgttgatatgttttcggtgtgagaagcatataaaaataatttacgagttttctgcattcggttttcgggacttttatgttatttcttctatctaaactttaatgcggagtttcgacgaaaaacgtctaaaattaacccaccaaactaacaatgtggcataaacaaaagctgtgttcccaccatcgatttatgcccctgcggctttgggccaaactcggaatgcaattcctttggcctttcctgacgcgcaaattaactgcattcgtggctcgttagcaaaagcgttagcagcaaagcccccaaaaccctaaaggtgcctaatttatggcatcaaatttccgacacaaaaaacggaaatggccatccttgctaaacagagggcttttgaagccgtgtagctttggccaggctcgccacaggtgtctaaatttaaatcactggccgaaaagaaacttagccaagttcattaatattaacttgtcgtccgacattttggcgagcatgtgtcataatgtttgctattgaaatctatctagagcgcacatgagcttgccaaagaaaaatatctagatccaccaggtgcttggcataatgagattataggagatatatctgcatacttgatgcctgacatcagcaaaagatacaatatctttatatattttacaaaggggaaatgcaactaaatagcaatagcaaaattgctacaaaagtggtaagccagtagtaataaatgcaggagatatataaaacctctttttccttagtgtaagatgacagacaaaggatcgcaaaatggccaccaaccaccggggaaagcgtcgcgcacgaaaaggaatccctcaggactgcgtttttcaaatatcgagaaagggaaagtctgaggag

SEQ ID NO: 15461 - DNA, 5604 bp, DROSOPHILA
catcaagcataacaacatgtataaatagccatcaaagactacgaagaaatcaaaatgaaaagtgcagcatagaaaagaagaaccgaaaggaaaaatccaaacaaaatgtgcaaccaatcaatggagttgaaccgcttaaaaaaaagagccaataactaaaaatacagcaatacagaagcagcgacactgtcccaagaacatcttggcaacatcgcagcgttggtccgcagcggactggccaaaaataaatcggcagcaacatacgcctgcaacaactagatgttgttgctgctgctcgccttcatcatgagattcgtagacatttccaaacgctgtgccgcctgctccagggccggcatcgattgcacccaccacagcggccagagcaatccgcaagccagcgatgccaatggcaaccacacggcctgctggcaacatgtcgccggtggcacgagtaacagcaacagcaacagcagcagcaccagcagcggctgcgacagcaacagctcctccaaggagaactactatgtgccgcagcaactgcaacatcagcggcaaagggttgccaagcacagcaaacctggcaacattggcgttagtccgcaacaactggagcagatacgcttctatcagcgcatgcagcagcagcagttgcagctgttgcagcagcagttgctgcagcgtcgccgcctgcaacagcaactgctgcaacagggcgtgccttcgcctccggcaaatgcaacaactacaacagcgggtcttacctgcaatcaacagtatttgcgacagcagcgaatgcaacagcaacaactgcagcagcagcaacagcagcagcagcaatatgtggacaacaacagcaacaatgacaataacaactatctgaacaactatctgaacaacagcattaaccagcgaaacaatggtagagttttgggccaaggcaccaaaattcgacgtggcatgacagaattctcaacaaacaacgatcacagcaaaccgcatttcaccgcatctcagcagaagccgcatcagaactcacccatccatcagcaagcattcactccatccaatcccaacactcacccacatctgcttcaacgcttggcccaacagcaacagcagcagcagcaacagcagcatcagcgtccccataagtttcagcagagtttgccatttagccagctaaacaacggcaacaacacggctgcccacattctgcccggatcatcgccacattccccgctcagctaccgcaatccgctgaacagtcccagcaattcgccattcagcaatacggcacagacgacgattgggaagcggtaccagcagcagcaactgaccgatcgcctgttgcagcagcaacatctgcagcagtgccagcaacagcaactgcaatcgctgggcagcagcgatgtggaggaggatctggctgcggaggaactgagcgaggagagtctcaagcagaatgtggccattgtgctgagcaatttggatcggtataacaacgcgttgcgcagcattatcctgaatgagcaggtgagcagcagcatcatcacgcccagcgacagcctcctgtttggcgaggactcgagcggtttgctctactgcgacaacgacaactcaaggaagcataagggcaacaataactttgttctgggcaagatggcagccacgcccgagtcggactacaatagcaatgcaaccacgccgggaggtcgcagcagcgaacagcagttgcagcagcagcagcaacagcagcaacttggggtaggtgggatgctttgtggtggtggtggcggtggcggtgttgggatgcgggaaactactaatggcggtggcaacaatctcaactgctcgttggcctcgtcgcacgactttactcacgacaattccgattaccagtggttcctggactacggctatcgagatggctgcggcggaatgcagcgcagcgttttgagttccctctctgcatcgtacaatgcgatgggggatctgatctactatgaggatctggccaagaatctggacgccaatctggccgaggtggacatggagagctttcgggcggaggacatacattccctgctctcgcatctgcctgcctattgcaagagcttgggcggtacaaacagtcgccttcagcaatctttgctgcttcagcagcagcaacaacaacagcagcagctacaacagcaacaggtgctgcagcacaacagtatgttgcagcacatgtcccagacgtcgactacctccacaaacgaactgatcgataactccttctgcaagtcggagttgctcttttcgccggtgagggagtcgcacatctcggtggattcactggatatggacgcctatccggatgacggcgagattatactcacctgcaacaaggacaactacacgatcgcctttgagggcagtgttctctactcggatgatagtttctatgcggatcccagtgacattgccgccaggaacaaacagaactgcatcaacttgcacagcaatctggaggacatagtgaaacgcaataaagccctggaggtgtccatgtcgcgttcggcgcaggctttccagcccctctgtcccatgtcgcccaagggacaggcagccacaacatcggcggccaagttacagcgacgctcgttattccttgtttcgcccgctcgcaggtatccctcggggaataataacacggagaccatcaccataaccagacacctaccacagtgcaccgtgcggaagagcagcagtctacccaatctgcagaacgaggaagccatggcgggtagttgccacaaagagcagggaccggaggagagtgggccacaggcggttccactgaatgtctctcaggcgatcagcacctccaccatggaggcgggcaagtcaaggtccaggaatctgctgcccatgtgccagatgcctatatccattagtgtgtcgatttcggagcgactgcagcaacaggcggatcagcagctgcccagcgaacagatcacacccacatcacagcaaccgcaacagcagcatcaccactcgcaccaccatcgccacaagcatcgctgcagttgctcgcaggagagccacatttccggctcggcctcctcgggcaactcctccaatccgccagccttcaatctagtcaagctgttcattaagcagaagagcagcaacagcagtggcggccaggaggatttgggagcccaggcaagtgcgcacacctgtatggatgtctcttccggctgctggccgtccagcgatgcggccagctccagtagtggctccttggagcagcgacttcgcaagaagagtatgaacgactcgggcaagggatcggcagttagtcggcatgacgaggaggagcactacccagatacggagacgcccagacgtcagctgagggcccgatcggaggcagtgttctacgatgatgtcgccagctccagttccacgggatcgttgactgcgaccaattcaccagcacatcgtcgtcgcagtatgccactaaggaatccacaactgtaccaactggctgctcaggtatccactggcagtcaaatgtcctcggaggccagctcggaacagctaacccaggtgccccggcgggcagaagcgggttgcggaaccagtacgcgtccgttgtcgtgtgcctccagctccgaaatgatcacgcgctccatgcagacctcctgcggatcactgagcaccaccaggagcagtctgagcgatcgctatcgctgtgtgccgccatcgttcctcgagaaactcaataacttgggtgaggagcgacaggcgcccatttacgtaatctatccaaactatgccctgcccgatttgggattcgttaagactaatgccagcacagacgtgatcttctcacccttcaactacaagatgacaatggatggagcgactggtagtaccagcagctcgggatctctaaggaagcagcgcaacagcagccagagcgtgagcgaagatgaaatcctcaagacgctggactacaagcacgttgccgactggcagtcgctggccaccttgctgccgtcggaataccgaaggcggttgcagcacattccggaggtgaagcacctggtgcggcaactggatgcggagctatcacaacgtccccttttctgtatgtcgccgccgctccggcgaaatcgcacgcacatctgcgactgtgccaagtacttccagggccagcagacccaaacggacgaggcatccagctcgggatccagtcaacagcccagctccggttatcgtggctcatcaacgctgctcaccgactccgagctggacgtggatccgctgaagcagatgtatgtgtaccagtacgatcagcagcgcatggactcgggcgtggaaaccagtcccggtagtcagttaactcaaaccccgccgcaacccatgccccgaagcattctgcgcaaggcacactccgcacagtcgcgctccaagcgcaattccatgatcgaggcacagcagacgcagaagctaaccaagctggagaagcggcgcagtttgcaggaaccaccgaacaactacggtttgggctccaccgacgaacttgccgatgtcttcgaggaggaggagcacagtcagccggcgccgccggtgaaacagaggctttcccgcaaggatctggatgccagggcacgggctgaaagcttcctggcctccttgccgcgttctgagctcaagtattacgccgagatcgcgtcgattctagagtcttccggcgagcatgtgacttacgatgctgctgccctgaaaaaggaggtgagccgagtgcttagccagcagaagaaagtgtcattcaatgatgagggtgtggctgccggattgcagcaacacgccaaacgtttcgccacacctcccaactcgcccaacatctccatgggtgcactgaaacgcgatacagtggatgtgctggagcagcgcaagatcgaaagcaatcgctttaagcgcctgcaaatccagtgggagctcatgagcaaggactcgagtatgctcaaggagctggccagcgaggcggccaccaagagcggcggctccacgcccacctcgggcaattcgactggctccaactcagcgccaaggtctaggattcctaggcctgttagctacccagcgggcagaagttccacgcccacttcgtcacgtactgcccccgttttggccacgccctcaccggctaggccggccactcccaagactgtcactaaaagccacaacaaacccggtctctttacctccccccgccctagcagactgaccagcgcccaggaagcagccggcggtaacaaggtcagcactcgatcgcccagcaggattgtgcagccaaagcgttatagtcttgccggtgcgaccacgcccacatccacaacacccacatcggccagggcacgcacgcccacaaatcgagtggcggttacggcgccaaacacgcccaaacgacaggcggttgcccagtcgccccgacccacctcgcgagtgcgttgagcgtccacacgagtccaagcgtccaagtcatcccaattagtcaacggcagacaacagacaccacacccaaaacaaaacaaaaaatccatt

SEQ ID NO: 15462 - protein, 1744 aa, DROSOPHILA
MLLLLLAFIMRFVDISKRCAACSRAGIDCTHHSGQSNPQASDANGNHTACWQHVAGGTSNSNSNSSSTSSGCDSNSSSKENYYVPQQLQHQRQRVAKHSKPGNIGVSPQQLEQIRFYQRMQQQQLQLLQQQLLQRRRLQQQLLQQGVPSPPANATTTTAGLTCNQQYLRQQRMQQQQLQQQQQQQQQYVDNNSNNDNNNYLNNYLNNSINQRNNGRVLGQGTKIRRGMTEFSTNNDHSKPHFTASQQKPHQNSPIHQQAFTPSNPNTHPHLLQRLAQQQQQQQQQQHQRPHKFQQSLPFSQLNNGNNTAAHILPGSSPHSPLSYRNPLNSPSNSPFSNTAQTTIGKRYQQQQLTDRLLQQQHLQQCQQQQLQSLGSSDVEEDLAAEELSEESLKQNVAIVLSNLDRYNNALRSIILNEQVSSSIITPSDSLLFGEDSSGLLYCDNDNSRKHKGNNNFVLGKMAATPESDYNSNATTPGGRSSEQQLQQQQQQQQLGVGGMLCGGGGGGGVGMRETTNGGGNNLNCSLASSHDFTHDNSDYQWFLDYGYRDGCGGMQRSVLSSLSASYNAMGDLIYYEDLAKNLDANLAEVDMESFRAEDIHSLLSHLPAYCKSLGGTNSRLQQSLLLQQQQQQQQQLQQQQVLQHNSMLQHMSQTSTTSTNELIDNSFCKSELLFSPVRESHISVDSLDMDAYPDDGEIILTCNKDNYTIAFEGSVLYSDDSFYADPSDIAARNKQNCINLHSNLEDIVKRNKALEVSMSRSAQAFQPLCPMSPKGQAATTSAAKLQRRSLFLVSPARRYPSGNNNTETITITRHLPQCTVRKSSSLPNLQNEEAMAGSCHKEQGPEESGPQAVPLNVSQAISTSTMEAGKSRSRNLLPMCQMPISISVSISERLQQQADQQLPSEQITPTSQQPQQQHHHSHHHRHKHRCSCSQESHISGSASSGNSSNPPAFNLVKLFIKQKSSNSSGGQEDLGAQASAHTCMDVSSGCWPSSDAASSSSGSLEQRLRKKSMNDSGKGSAVSRHDEEEHYPDTETPRRQLRARSEAVFYDDVASSSSTGSLTATNSPAHRRRSMPLRNPQLYQLAAQVSTGSQMSSEASSEQLTQVPRRAEAGCGTSTRPLSCASSSEMITRSMQTSCGSLSTTRSSLSDRYRCVPPSFLEKLNNLGEERQAPIYVIYPNYALPDLGFVKTNASTDVIFSPFNYKMTMDGATGSTSSSGSLRKQRNSSQSVSEDEILKTLDYKHVADWQSLATLLPSEYRRRLQHIPEVKHLVRQLDAELSQRPLFCMSPPLRRNRTHICDCAKYFQGQQTQTDEASSSGSSQQPSSGYRGSSTLLTDSELDVDPLKQMYVYQYDQQRMDSGVETSPGSQLTQTPPQPMPRSILRKAHSAQSRSKRNSMIEAQQTQKLTKLEKRRSLQEPPNNYGLGSTDELADVFEEEEHSQPAPPVKQRLSRKDLDARARAESFLASLPRSELKYYAEIASILESSGEHVTYDAAALKKEVSRVLSQQKKVSFNDEGVAAGLQQHAKRFATPPNSPNISMGALKRDTVDVLEQRKIESNRFKRLQIQWELMSKDSSMLKELASEAATKSGGSTPTSGNSTGSNSAPRSRIPRPVSYPAGRSSTPTSSRTAPVLATPSPARPATPKTVTKSHNKPGLFTSPRPSRLTSAQEAAGGNKVSTRSPSRIVQPKRYSLAGATTPTSTTPTSARARTPTNRVAVTAPNTPKRQAVAQSPRPTSRVR

SEQ ID NO: 15463 - DNA, 5723 bp, DROSOPHILA
aggcagaacgtcttcctagcctacgaccacgaggccatggtggaggagttccccgatgtcctgtttggttccgtggagcagcggtggggtaacaagcagacatgggaccaactggagacctatttgcgcaacgtcaatgacttcgatgtgtcgtaagtggagattctcactaatgattagataagatgtggaacatgtatcgtttcgtttcttattcccacagtcgcttctccagtcgcccggtgtccgatatggcggagctgaccccagagacgtgggacgtcattttggacaagaccggcggactgcgcaagatggccgataatgtgaattggcgcatctctcagttgtatcgaaatgaactgggcacgaatgcgaatatagtatcggcggatttcataaggggcactactctagtggaaactgccattgaatacaatgctcgtaagatttacatgtagatcttaactatatgttcattagaagatgaatccttctaaaacttcaaagtaacagaccgaatttgcaataatacatttatttgctaagcggttatgtttaaacatcaatatgctccttattgtactgctagctgtgtagcttccctaaacatgttacatattcgtagtttgttcccatataagcgcattcacttatttcctgattgttttaacaaaggaattcggattgttgcacctaaccatagacataaaaagtaaacttttgtgggaagtgggccaaaaaggcgggggttttgcaaaaacctgttaactgaggggatcgctaaaaaaaaaataaatacgtacatacgataaaaactaaattctaatcgacgccaattttggtgatgagcaatgctaaaatatcatacaaacggcacttaaaacggtttcaaatttaacaagttttcagtttcacgtttttcgaatatcaattacgagtgtttttttttaactaaatgcataaattctacggttgtggtacacacatatatgtaggcctagttaatagcctcattcgattcgataatggtggtattgaagatggcccggcaaatctccactacggaattggacaatcggccgtagcacttgggcttcttttttcgggcgatgaaggcgtagtagaacggaatgccagccagggttatgccgatgccaatgagcagattttgtggctcctccaaattgggcagcagtacgagtgtcacgcagcttaccatgaaggtgatgggcagcgcaagatggactttaatgggtcggggcaagtcgggcctgaaaggaatacacattacacattgggttcagaagaagtcagtgatatcactcacctcttatgccggagccacaacattccggctatgctggccaccactgagagccagagcaccgagctgaagtagttgatcaactggtacacgttatccgtgagcagcatgagcagcgacataagacactgtgggaaaaatgcgcttacatcaatgcacaattctctgctgatagctgattggtgcaaaatgctcatgccaactcaccgtgaaaatcagggagggaatgggcgtctgttgtttcacgtggaacagctggaaaaacttgggcaaatgcccctcctgagccccagtagcgaaaaggcgcgccgatgtgaagagcaccccgttgacgccaccaaatgtgcttagcgccacgaaaatgggcaccatgaaggccagcggtccgaacactcggtttccaaaggtcaccgccacggccagcgaactgagcatctccggcttgtttaccacggcgaaataggccaagttgaccagaacatagatgctcgtgaccaggggcatggctatccaaatggcgcgcggcagattcctgcgcaatgagaaaacaaagaaaccgagatcagttttatacaaaacaaaaacttctaactactgtttttgcaaataactactatctttaatagttgactatgatgtttcattcggaactaaaacattaaaaagctttcaggtaaaataagagatatcttatcactttcgatgaccgttgatatagaaaacatttaccttatactcgaaaaaatcataattggtttgtaataactagaaacatcagaactaaaactaatctacgggctttactgcgcataagaattgagtttcctacttgaaatttgtttcagtgtgtcaaagaacgtgctattcagcgagaaagccacttggctgtgcagggagcgtagcacttaaattgattgcaaattgaattcgttagggatgaggcagcatcccccacccactgggtggtattctaggaggaatgacatcaaggacactcaacaagtttccacttgttgctgcctgcgcatgacgcacaaggaatgaatgaggcaaataaacccagcccaacccaaccatttatccttgtcaccactactcacttgtatggatcctgtagctcctccgtcacaaagtttaagtagttccagccaccaaaggcaaacagaccggagtagaaggcgtagccaatgttgcgggccgtgtagataccctcccacggatttctgaagttctccagctcgccagtggccatgtagtacagtccggacaggataatcatgatgagggccagcagcttgcccaccgtgaacacatcctgcactttcatggacaccttcaccgacaggcaattgattgtggtgagcagagctgggagagtgggagtttcaattaattaacattgagtggattgtttaaccaacttacttagacatatggcagccagcagtttcaccgcattctgtgggggatcgcattccggaaagaatggcttgaccgcataatgggcaaaagatagagccacaatggtctaaaaaaaaaaataaaacaatgtattcatactataaatcccacatgccatttgtttctagcggagaaagctgtcctactcgtaattgaattcaattccggtcgaaggtagccgcccattaataaatttctatttatttgcatcaacaacccatcgatcaatcaagccaaataagtaaacattccgtaattcaattgatgagtactataggaactgacctgcgtggttggccggatgatgagcagtgcgatccagaggcgaaggaatcccaccagcggtccaaaggacaccagcaggtaggcgtaatccccgccagatcttgtgatgcatgtgcccagttccgcgtagcacagagctccgatcgtcgataaaatgccgcaagtcagccaaatcaaaagggagcttcccacggatctgaaatgatttaaagtagtcatcgaatcaataaacaatttgaatgaaaataaacactcgtaaacaaatatggtcagggaatacatacatatatatatatataaagcaataaaaattataaatatagatctaatattaactcggtggcaaatatttgtaagcaataatagtaaaatggtatttaaacaaaacatctaaaaaaaacaagtgctggggattagctttcatttcgataaaatacttttatgaatttaacttcctggaatttttcgcagccgccttaagcttatgacgcacacctttttttgtggctcttatcaataatttaaatgtttggcgcgccttattgacgttattcttgtgactggagacaattcgcttaaaaaaaaaaaacactttaaaaagctgacgcaatatgtgggcagaatttcaaggttgaatctttgagggaaaatcgagaactaataaatgtatcttaattggtgctaaaggaatgcctgcgacaatctatccattaattaacagctaaattgaccttttttgtgcataaattgaattaaggaggatgctctgtatcaccactcactcggtgtaaataaagactcccgtgggagcaatgaagatgcccgatccaatgatggtgcccactatgatggccactccattgatgagtgttagcttccgcttgaggacaatcttctcctcgccatcagcgggatttggattacccggcgcggcgcatccatttgtgggctcgaccaggctggtggtcactccattggcatatcggtccgtcatgatgtctgcactgtgggattcttctgcttaccctcttctaatggcgaatagcgcacattgtcactggaatgaagggtaaaagttgaaatgtagaaaaaaaagccttcattactatcagcaaatggggcgcgagcacgtgttgcgcaaattgtaaacaaatgctatagtgctgattttagttactaattgctagtgaagaagacccgatttttgcctcgctggcagctaactaatctcccattgtcaggcataaacttgaatgtttccccgacgccactatcttcgatacacgaaatttagctttaaagtagggtgatttttggggttggcatgttgtggtgtgtagctgcctaatggggagctccacttttatggtgacgcctttgccgcgtgccaatttccacgatttcgtcatcaccttacgacgcgtggcaatgaattttgcagttgcagagttgcagtttttctggcaattgctcgattgcttttattcgcttctttttttttttgttggttattcgcaaggtttggaatgcagtttggctgattaatttcggtttatcttgttcccagcgactttgcacgtaaaacacgatttattttacctcgagagcgcggacacaacaaaacggctttgactgcgaacagcgactgtgcgttggcatcgagaccggcattttcatactaaaattaacgcaattttcaccctaaaacgcagtgagagagtgagagcagcaaacggagagagaaacagagagagagagagaatgagtgtaaagaaaaaaaatgagaaatgagtgctcaaaaccggaaattaatgtcaaatggttacttacaagaagaaaacattaaagctgtcctcttgaatgctagctaatgctaaatttatcttatggcataactattaagcatagttttcagttgaataatacaatttcttaaatgttcccgccaaaaatttcaaatttgttagctattcaccacgaaacgcgctcagctgttgcacacatcacttatcgatagcaaagcacttatcgctccgcgcccacctctatcctttttagttattgttttggtgcttgcacgtgttttaatttacttcgattaaaaagccaaataccagcaatgtcagacaagtgagtgattgaaaaactataaaaatgtgttgaccctaaacattatcttatacttttgatccctagatatgcggtgcccaacaaattgcccggcaaaacagtgtcggtgctaaagcatcgcaagaggagaattctgcaggatgaatctgttgttacgcagaaaagaaatgaccgcatcaaaaagagaaccgccaccaagaatcaccacaaattccgccgtgccgaatccttcgtaatgggctacctgaaagcagagcgcacgtccaagcggatcaagcaaaccattctgcgcaccaatgtcaccgaacaaagtgccaaagctgccgacgattccaatcccaaactgctcttcgtgatgcgccatgcgggcaagaagatcttcgacaagaccaccgcggatatattccgaaccctgcgcatgggctcgcgccacaacgccgtcttcatggagaacaccaaggagaaccagttgctgctgcgcgttatcgaaccctttgtagtctacggcaatccctcgctg

SEQ ID NO: 15464 - DNA, 1554 bp, DROSOPHILA
cacagtcgctgttcgcagtcaaagccgttttgttgtgtccgcgctctcgagatgacggaccgatatgccaatggagtgaccaccagcctggtcgagcccacaaatggatgcgccgcgccgggtaatccaaatcccgctgatggcgaggagaagattgtcctcaagcggaagctaacactcatcaatggagtggccatcatagtgggcaccatcattggatcgggcatcttcattgctcccacgggagtctttatttacaccgaatccgtgggaagctcccttttgatttggctgacttgcggcattttatcgacgatcggagctctgtgctacgcggaactgggcacatgcatcacaagatctggcggggattacgcctacctgctggtgtcctttggaccgctggtgggattccttcgcctctggatcgcactgctcatcatccggccaaccacgcagaccattgtggctctatcttttgcccattatgcggtcaagccattctttccggaatgcgatcccccacagaatgcggtgaaactgctggctgccatatgtctaactctgctcaccacaatcaattgcctgtcggtgaaggtgtccatgaaagtgcaggatgtgttcacggtgggcaagctgctggccctcatcatgattatcctgtccggactgtactacatggccactggcgagctggagaacttcagaaatccgtgggagggtatctacacggcccgcaacattggctacgccttctactccggtctgtttgcctttggtggctggaactacttaaactttgtgacggaggagctacaggatccatacaagaatctgccgcgcgccatttggatagccatgcccctggtcacgagcatctatgttctggtcaacttggcctatttcgccgtggtaaacaagccggagatgctcagttcgctggccgtggcggtgacctttggaaaccgagtgttcggaccgctggccttcatggtgcccattttcgtggcgctaagcacatttggtggcgtcaacggggtgctcttcacatcggcgcgccttttcgctactggggctcaggaggggcatttgcccaagtttttccagctgttccacgtgaaacaacagacgcccattccctccctgattttcacgtgtcttatgtcgctgctcatgctgctcacggataacgtgtaccagttgatcaactacttcagctcggtgctctggctctcagtggtggccagcatagccggaatgttgtggctccggcataagaggcccgacttgccccgacccattaaagtccatcttgcgctgcccatcaccttcatggtaagctgcgtgacactcgtactgctgcccaatttggaggagccacaaaatctgctcattggcatcggcataaccctggctggcattccgttctactacgccttcatcgcccgaaaaaagaagcccaagtgctacggccgattgtccaattccgtagtggagatttgccgggccatcttcaataccaccattatcgaatcgaatgaggctattaactag

SEQ ID NO: 15465 - protein, 500 aa, DROSOPHILA
MTDRYANGVTTSLVEPTNGCAAPGNPNPADGEEKIVLKRKLTLINGVAIIVGTIIGSGIFIAPTGVFIYTESVGSSLLIWLTCGILSTIGALCYAELGTCITRSGGDYAYLLVSFGPLVGFLRLWIALLIIRPTTQTIVALSFAHYAVKPFFPECDPPQNAVKLLAAICLTLLTTINCLSVKVSMKVQDVFTVGKLLALIMIILSGLYYMATGELENFRNPWEGIYTARNIGYAFYSGLFAFGGWNYLNFVTEELQDPYKNLPRAIWIAMPLVTSIYVLVNLAYFAVVNKPEMLSSLAVAVTFGNRVFGPLAFMVPIFVALSTFGGVNGVLFTSARLFATGAQEGHLPKFFQLFHVKQQTPIPSLIFTCLMSLLMLLTDNVYQLINYFSSVLWLSVVASIAGMLWLRHKRPDLPRPIKVHLALPITFMVSCVTLVLLPNLEEPQNLLIGIGITLAGIPFYYAFIARKKKPKCYGRLSNSVVEICRAIFNTTIIESNEAIN

SEQ ID NO: 15466 - DNA, 6846 bp, DROSOPHILA
cgtggcactgccatcaacgaactgattgcccgctgcctgtagagaccctagcctagtaaacccttaagtgattgttcaacctctataacccattctgtagctaagcccaatacacatctatatacaaacgtattctatttgagcgtacttatttaacgaagaaaatagatggtcaggtcagcactatcgtgagtttactgtatgcctataaaagcaatcctgcgactattaaggaaccacatgaaactgtctctaacgacattcctcattattctacatgtttatcaacatgataaacttcacccacgaaacaagttctttgcttcttggccttgcgtgtcccagccgagttcccaaattgaacaaaccagagaatcaactttctgcctcgaataataaataagtcataaccgaggtggctcctcgcaaacgaaaggtatgccaaactgaactacttgttgccatgaaggaggaactgttgtttttcgattagtcggagtcagtgccactaacctagtgcaactcgggtcgtcgtatcttttgttcggataaaactccagggactacacattggaattcaaaatccttagattcaattaattctcaatgaattcaagtttcaacagcgagcagttggacaccgaccgcgatggactgcaaaaaattctggcccgatctctcaaggaacccattcttggcaagcactttgccctgcctggccgcatagagcagagtccacccatcgaactggacaccagccagagctacattgccgtctacactcatctcaaagtgcacgccaccatgatgccggagagattgcccacgccggaggcaatcggacgaatacaggcggagaacttggaggcagcgcccaaggcacgaagttcaaagacccgcttggatccctgctcaaatataaattaaattacgttgggcatcaataaagaaagtattgttattttatcttttggtatcccttaaatttagtaaaagaatattaaaatttttttttttattttattaaatatacatgttcataatccttgtaggcataagcttcacatcaaattcgtgttgaatacatcctcctatcggtgcagatcttagtatcctttttcttgaaagtaattaatatgatgcttttcgtaggttgtttaaatcgctactaggttgataagtataagacaattaatgggaccgcatgtggtgctttaacaatcaatattgggttcattcttgaatccataaaaatcatgagagaaatgtaaaataaccaagtgtttatgtgtcatcctcactcctaattctgcaggatacgcacggcgttgtacatctggccaatgatgggcagctgcttggactcgcgccggcaaaggtatttgtaggcatgcgacaacagcctgtccagggcagccacatcgatctcgtcgggcttggtggccgcgatctgaatgttgttctccgtcatcggttccttctgcgtaagcggcgtgagaaatggatcagtactgcgaatgatatatgcgcttgcagcacttaccaggttgtctaggtaggccagcaactggtggccaacagaggcaatcttcaggaacgtggactgcgagctctgtgcgtaaagattaagtctacggccagcgatctccagcagcagtcggcccagctcctcgtcatcgctgatgtcctggagcaacacttgagcctccgcatcatacccaaaagcgtacagttccaccacctggaggagggaaaaatatttggaatatattttctattccattgtgtttcctctgttgtgctctctacggagcaaactaacgaactgatgttgaaaggcaaaagggattgtaagctccctgtcatgtgtgttcatgggttcctagattaggaattctgggatcatatatgtatgtacattcttacctgccgtcgtaggataggaagtttatcgacctcccaactgtcggctaaggcacagatcttgcccatgtagaaaacatgatcgagaatgtacagctgctccaaatcctctctaatcagatccatggtagcggtgacaaggcgacacaggaactcagtgcgctgctgttgcaggacaagatctggtgcaggcaaaacataaggcagttccttattgatgtccgccagcagagctttgttgctcatggagtcaaaaagcgtggtcagtggttttggaatgcgcagctggaaaaaggaaacgaagtgcagcacgctgcacagttctgtttgaagacggagcagctgcggcatggcatggtgctgctggagagccagaaactgcaatggcagggctccttcgctgagcgactgctcgaagtgcagttcacgcttatcgtgctccatggaagcggtgaaatgctgcaggaattcgaggctgagttctagaaactctggcactttacccgcagacatctcgagatcttgctggcacatcttgtccactggcaggcgtcccactttttgaataagcttcgccgccgcctgtagaggaaacttcagggtggcattccacagcatgcaacatattccatgcttcagggcccagtcaggtgtacggaattggtttaaacaaagtaatgctgcctttaggtggtccagcgatgagagctgcttgctccactggaccatgtactgccacgacatgagacttaagaggacgcccgattccaagctgaagggaaaatgcgcacgcagcagagccaatctttcaagaataggttcatgggcttctttactcgccgcgtacacttcctttgccatttccaaatcctcttctgattccgcgtcttcatcgactgactccttggtaggctcatcctttatcttaactttgctctcgtcgtctaactcgttttcgggaggcgatatctccaaaactttactcggatgcaattgtgcactgatcagccacttggctgtcagttcggtgacgatgcctttgccactgctcacaatgcttttgagactgcagtccggtggctcgtaggacatctctggaccaacaggatcccggcagatgagaggcttactgcgaaggaagcagtggttcataaaggagctaagtggaacgattgatttggcacttaccttagtatggctcctagcacggccacatcctctagcttgccagtgagcaatccccactgagcctcatcgtgggagatacgctcccagcgctcatcatcttcgttctgcgaggattcatcacaagatccctaaggaaaaagtgtttttcgcaaaagagtttttgattttaatgactaggagtagacctacctcttttctgtttcgccacaaattagtcgctaccgttttgcatacaatggccaccagcaagcccgaaaattgtttactctccaagagaagttcccgaacttcctgccaccacggtgaaatggcattgtaggcatagtcatggatgtgttcaccagccagatcacaaatggtctgcaccatagcagcaattctggacatgtcctccactacttcatcactaaagtaagaaaagtagattgcacataaattgagaacggaatttataaaatatgtttttctcaccagttgttgtacttaaagggcttctcaagccaaaaccaaataatcaatttaagcaaatctctgctgggcaaacacgcctgattgatccactgcttgaattggccaaagcatagaccttgggcaaagaactgactaaagagatcgatgcttacggcgccaaacttatctgacttctccggaagtagacttatcccatccggactatcgatgttaaagatgctcaggtaatcgacaaattcttcggtcttgtgctccgcctgcaacttgaagctcacttcacgagtggcggcgggtttatccttctcggtgccatcgtccaggagcagaaccaacttgttaatggtgacaagatcagcatcggaaagctccaagtattctacgggtggctcgttgtcttcacgctgattggcttgacttagggccaagtagagatcagtcaagcgtttatagttctcgatttggttgacaaactcctcggagcccgttgattcagaaagaggtttctttatgaaggcattaatgatggattgaaacacctgtggctgcagcttcttgctcttaagcaacatctccagacactgttgtcgcacctctaacgtctgcagttcacttgccagttcgccaatctcctgcagcgcttcatctttggcttggccatggtttatggttctgagctggtttctgaggcgcctcagcatatggatatcccgtgatgtctgggagctggtctcgctgagcgcgtagtgaaaaggaatgtgtatctccttcaggctgccatcgctggggtccaggaacaagcaatgattgatggctaaagattttcttgactgactactgctattaccagatccactgctgccgcctgagcctaggggactatgattgttgtacataagttgcccgctcttcgaaacattgaatgcagccaccttgggtccgttttgcaaagcccatatgtccaggcagcccattcgaggagcgtagatcaccaggaacaaagcctttcgcttgtgcgttttgataccgcgaacggatttttctttaactggcacgaatgcgcactgtgcatctcgatagcccttccaaacacgcaagataatagcctggtgcgtatccaccaacattacacggtcgagattatcggtaacgacagccaggcgtccaccaggtgccacagacaaggtcagtccatctctcttgccgtcatatagacgacagcgaatccgcatcggtgcttctttcgtgggcaccggcagtggtgattcctcgggcgatggcaggggctctggagcgcgtcgaaagattccgcccagcaggttcttgtaagctattccgattacgtctttggcaacctcacccagcgacatcgttttataaccctcctccgcctgaaagaagcccaaatagggttctgctccggcggccagaacctgtgagctcctcggcggcgtggcgtgcaccttggcgaaataaccgagaccgatggtctgctgaacaatgtagtcgtatgtgggaggtcgctgggtggtagagatggcagcatcattaatgacggcctctcgttcttgcttgaacttatacttctggaatggcaccacatcagcagtgggatacgaactacgctccaatgcacctctttgcacattgtgccggcaattgttcagcgtgggcaaaatgtcctggccctggatgaagcacaggcagcgaggatagatgatgtagagcagtgaatctgcctcagaatgtcgcggagcggactgcagcttgactccaattactggatcctcttggcaacttgaaaaatatagatggttaatgccgtagatacatttaattccacaactaaccattgcgagaagagttttacacccgagtccgtgtagaaggtaaccatgccagagcacaggccaactgccacgcaggtccattcgatggctccatcggtgcttttgttctgagtcatcggcaagcaggtgaggctagtcacgatttggttgggatcctccagctcgccgcaccagccaagaacgtaggtgttgccattgccatggctgctccagcaggtgctgaggaatgccaacttttcaccctgcgccatggcaatcagttccccagttggtgaaatggcatggtttatcgcgtttaaccagttgtcatctgcacggatcggtttagctatgaatacttgctgcagagacttgtcttatcttaccatgtccgagtccaaagtattcttggactttcttaaaatcacggatttctccgcagtgttttacttcgcaagccatcgccttttgttttcatcacacagctgatttgcagtggagttgacagtgcaggtaaatttagctatagccagatgtatcgattatcgattatgtatcgatttcaatgcaacaggtaactccaataataacgaactaatgaaattcattaaagtaattttctttgttgtacgtaattttaaaacattataaactgagaggatgttattcatctaatctgcccaaactaataaatacttggcttatatgcatagatgttaaattataagttagaatacaaaataaatcaaataattttttgataatgatcaaaatggtaaactgtgcacttactttgtaccaagctgaaaatctctatagctttattttaatgcatactccaatagtaagtttattgtactgcaacatattgtagttcgatctaagatctaatatatgaatatagaaggtaaactaaatcaaatccgactccacaccgctgtcgataaagtccttaagcatcaggccgcaatgatcgggcaggagtcgcgtccagttgttgatgtagaggaggcagctcgggatggttacctccatgaggtcggtgcgatgagcctccacgatccttttggccacctgcttgggatcgagcaggcccaggatcgatgggaacttcaccttgggatgcttgcagaggccagtgttggtcatatagggaaagatggtggtggttcgaatctgtaaatggattcacacatggatcacataatctagcacattcacatggttattctaccagatccctgaaaggtccctgtcgtaattcggcatgcagtgcctccatcagaccgcgtacagcgaatttggtggcacaatagggcaccaggttggagatgcccaccaagccggcaatggaggacatgcaaatgatgtggccacgacacttctcctgcatgtgcggcaagaaggcctggatggtccagaactgcgagaacacgtt

SEQ ID NO: 15467 - DNA, 4360 bp, DROSOPHILA
ggagaaatccgtgattttaagaaagtccaagaatactttggactcggacatggtaagataagacaagtctctgcagcaagtattcatagctaaaccgatccgtgcagatgacaactggttaaacgcgataaaccatgccatttcaccaactggggaactgattgccatggcgcagggtgaaaagttggcattcctcagcacctgctggagcagccatggcaatggcaacacctacgttcttggctggtgcggcgagctggaggatcccaaccaaatcgtgactagcctcacctgcttgccgatgactcagaacaaaagcaccgatggagccatcgaatggacctgcgtggcagttggcctgtgctctggcatggttaccttctacacggactcgggtgtaaaactcttctcgcaatgttgccaagaggatccagtaattggagtcaagctgcagtccgctccgcgacattctgaggcagattcactgctctacatcatctatcctcgctgcctgtgcttcatccagggccaggacattttgcccacgctgaacaattgccggcacaatgtgcaaagaggtgcattggagcgtagttcgtatcccactgctgatgtggtgccattccagaagtataagttcaagcaagaacgagaggccgtcattaatgatgctgccatctctaccacccagcgacctcccacatacgactacattgttcagcagaccatcggtctcggttatttcgccaaggtgcacgccacgccgccgaggagctcacaggttctggccgccggagcagaaccctatttgggcttctttcaggcggaggagggttataaaacgatgtcgctgggtgaggttgccaaagacgtaatcggaatagcttacaagaacctgctgggcggaatctttcgacgcgctccagagcccctgccatcgcccgaggaatcaccactgccggtgcccacgaaagaagcaccgatgcggattcgctgtcgtctatatgacggcaagagagatggactgaccttgtctgtggcacctggtggacgcctggctgtcgttaccgataatctcgaccgtgtaatgttggtggatacgcaccaggctattatcttgcgtgtttggaagggctatcgagatgcacagtgcgcattcgtgccagttaaagaaaaatccgttcgcggtatcaaaacgcacaagcgaaaggctttgttcctggtgatctacgctcctcgaatgggctgcctggacatatgggctttgcaaaacggacccaaggtggctgcattcaatgtttcgaagagcgggcaacttatgtacaacaatcatagtcccctaggctcaggcggcagcagtggatctggtaatagcagtagtcagtcaagaaaatctttagccatcaatcattgcttgttcctggaccccagcgatggcagcctgaaggagatacacattccttttcactacgcgctcagcgagaccagctcccagacatcacgggatatccatatgctgaggcgcctcagaaaccagctcagaaccataaaccatggccaagccaaagatgaagcgctgcaggagattggcgaactggcaagtgaactgcagacgttagaggtgcgacaacagtgtctggagatgttgcttaagagcaagaagctgcagccacaggtgtttcaatccatcattaatgccttcataaagaaacctctttctgaatcaacgggctccgaggagtttgtcaaccaaatcgagaactataaacgcttgactgatctctacttggccctaagtcaagccaatcagcgtgaagacaacgagccacccgtagaatacttggagctttccgatgctgatcttgtcaccattaacaagttggttctgctcctggacgatggcaccgagaaggataaacccgccgccactcgtgaagtgagcttcaagttgcaggcggagcacaagaccgaagaatttgtcgattacctgagcatctttaacatcgatagtccggatgggataagtctacttccggagaagtcagataagtttggcgccgtaagcatcgatctctttagtcagttctttgcccaaggtctatgctttggccaattcaagcagtggatcaatcaggcgtgtttgcccagcagagatttgcttaaattgattatttggttttggcttgagaagccctttaagtacaacaactgtgatgaagtagtggaggacatgtccagaattgctgctatggtgcagaccatttgtgatctggctggtgaacacatccatgactatgcctacaatgccatttcaccgtggtggcaggaagttcgggaacttctcttggagagtaaacaattttcgggcttgctggtggccattgtatgcaaaacggtagcgactaatttgtggcgaaacagaaaagagggatcttgtgatgaatcctcgcagaacgaagatgatgagcgctgggagcgtatctcccacgatgaggctcagtggggattgctcactggcaagctagaggatgtggccgtgctaggagccatactaagtaagcctctcatctgccgggatcctgttggtccagagatgtcctacgagccaccggactgcagtctcaaaagcattgtgagcagtggcaaaggcatcgtcaccgaactgacagccaagtggctgatcagtgcacaattgcatccgagtaaagttttggagatatcgcctcccgaaaacgagttagacgacgagagcaaagttaagataaaggatgagcctaccaaggagtcagtcgatgaagacgcggaatcagaagaggatttggaaatggcaaaggaagtgtacgcggcgagtaaagaagcccatgaacctattcttgaaagattggctctgctgcgtgcgcattttcccttcagcttggaatcgggcgtcctcttaagtctcatgtcgtggcagtacatggtccagtggagcaagcagctctcatcgctggaccacctaaaggcagcattactttgtttaaaccaattccgtacacctgactgggccctgaagcatggaatatgttgcatgctgtggaatgccaccctgaagtttcctctacaggcggcggcgaagcttattcaaaaagtgggacgcctgccagtggacaagatgtgccagcaagatctcgagatgtctgcgggtaaagtgccagagtttctagaactcagcctcgaattcctgcagcatttcaccgcttccatggagcacgataagcgtgaactgcacttcgagcagtcgctcagcgaaggagccctgccattgcagtttctggctctccagcagcaccatgccatgccgcagctgctccgtcttcaaacagaactgtgcagcgtgctgcacttcgtttcctttttccagctgcgcattccaaaaccactgaccacgctttttgactccatgagcaacaaagctctgctggcggacatcaataaggaactgccttatgttttgcctgcaccagatcttgtcctgcaacagcagcgcactgagttcctgtgtcgccttgtcaccgctaccatggatctgattagagaggatttggagcagctgtacattctcgatcatgttttctacatgggcaagatctgtgccttagccgacagttgggaggtcgataaacttcctatcctacgacggcaggtggtggaactgtacgcttttgggtatgatgcggaggctcaagtgttgctccaggacatcagcgatgacgaggagctgggccgactgctgctggagatcgctggccgtagacttaatctttacgcacagagctcgcagtccacgttcctgaagattgcctctgttggccaccagttgctggcctacctagacaacctgaaggaaccgatgacggagaacaacattcagatcgcggccaccaagcccgacgagatcgatgtggctgccctggacaggctgttgtcgcatgcctacaaatacctttgccggcgcgagtccaagcagctgcccatcattggccagatgtacaacgccgtgcgtatcctgcagaattaggagtgaggatgacacataaacacttggttattttacatttctctcatgatttttatggattcaagaatgaacccaatattgattgttaaagcaccacatgcggtcccattaattgtcttatacttatcaacctagtagcgatttaaacaacctacgaaaagcatcatattaattactttcaagaaaaaggatactaagatctgcaccgataggaggatgtattcaacacgaatttgatgtgaagcttatgcctacaaggattatgaacatgtatatttaataaaataaaaaaaaaaattttaa

SEQ ID NO: 15468 - protein, 1070 aa, DROSOPHILA
MSLGEVAKDVIGIAYKNLLGGIFRRAPEPLPSPEESPLPVPTKEAPMRIRCRLYDGKRDGLTLSVAPGGRLAVVTDNLDRVMLVDTHQAIILRVWKGYRDAQCAFVPVKEKSVRGIKTHKRKALFLVIYAPRMGCLDIWALQNGPKVAAFNVSKSGQLMYNNHSPLGSGGSSGSGNSSSQSRKSLAINHCLFLDPSDGSLKEIHIPFHYALSETSSQTSRDIHMLRRLRNQLRTINHGQAKDEALQEIGELASELQTLEVRQQCLEMLLKSKKLQPQVFQSIINAFIKKPLSESTGSEEFVNQIENYKRLTDLYLALSQANQREDNEPPVEYLELSDADLVTINKLVLLLDDGTEKDKPAATREVSFKLQAEHKTEEFVDYLSIFNIDSPDGISLLPEKSDKFGAVSIDLFSQFFAQGLCFGQFKQWINQACLPSRDLLKLIIWFWLEKPFKYNNCDEVVEDMSRIAAMVQTICDLAGEHIHDYAYNAISPWWQEVRELLLESKQFSGLLVAIVCKTVATNLWRNRKEGSCDESSQNEDDERWERISHDEAQWGLLTGKLEDVAVLGAILSKPLICRDPVGPEMSYEPPDCSLKSIVSSGKGIVTELTAKWLISAQLHPSKVLEISPPENELDDESKVKIKDEPTKESVDEDAESEEDLEMAKEVYAASKEAHEPILERLALLRAHFPFSLESGVLLSLMSWQYMVQWSKQLSSLDHLKAALLCLNQFRTPDWALKHGICCMLWNATLKFPLQAAAKLIQKVGRLPVDKMCQQDLEMSAGKVPEFLELSLEFLQHFTASMEHDKRELHFEQSLSEGALPLQFLALQQHHAMPQLLRLQTELCSVLHFVSFFQLRIPKPLTTLFDSMSNKALLADINKELPYVLPAPDLVLQQQRTEFLCRLVTATMDLIREDLEQLYILDHVFYMGKICALADSWEVDKLPILRRQVVELYAFGYDAEAQVLLQDISDDEELGRLLLEIAGRRLNLYAQSSQSTFLKIASVGHQLLAYLDNLKEPMTENNIQIAATKPDEIDVAALDRLLSHAYKYLCRRESKQLPIIGQMYNAVRILQN

SEQ ID NO: 15469 - DNA, 6979 bp, DROSOPHILA
tgaggtcacagtccggagaaaatcccctcataaatatgaatttcatttttagattgttttcagaacagctttatttaaaggcaagtgtctgtagccttattattatattactttccgtcttgagaaacacaattctctaaaccctcattcatattctactattttttattcccagtcccagctgtataaatagtcagctcaaaattacaaaatacccctttacagtttagtcaagatgcgtccacagattgcaatgttactattgataactgcttggaaaagtagcctatcagatccgataggtccccgttcctatgaaaactattcagtgtataaggttttcattaaaactcggtcggatcaacaggttatcgatggactgctgaaggacacagacaatgtgagtttcactggaatttagaggaaaaaaaagtcgaataatcccttaatattccagtataacttgtggcatcgtggcttaaatgtagttcacataatggtgagccctgtggaaaaggattctttcctagctgtaatgcaaaaggaaaatattgttgtggaagtacttataaaaaatgttcagacgtaagtatataagcattttaaaattataaaatgcgtaactgtatactctgttttcagacttattgatagatactgacgtgtcgttgtttttataaagtttaataattttcccatttaagcagtgatcttgaactatgcaatatcatgaacaaaacgtaaagctaaaatgtgaatgatacagcctaatggtatgcttcacatcttatatgatctggtattagatttgaaaaacttccaaaaatatattttgtatacctttgtgctctaacattatttaacaattattgtcgaatgtggtcataaagaatgttatttatttgaatgctcacaatatttgttttttatttaatattttcgaagggaggtctgttgatacttcttacaaatgtttacaccatcgtttcactctgggatctcagtcctttttgcagccctctccgcaatcggcgccttcgcagatgtcgcacagggaggacttcacctggtagtactcggtggccttgcgctccgtgtcatagtagtcgtatagggaaacggaggccggcttctgcttggccaccgcgtgagccttggaggcctctaacggcaagcaacgaacatcaccgggagttaagctgtcaaagtagacgaccaccgtggagtcggagttcttggtctctacgcgcttcacccgatccactgcctggattttgcccaagcttgtggagtcaccaacgaaccctgagggcagggcgatttccatcactgccatgttggagtccttgtccttgtcggcgtcttctaagggcacgtactcggcacagacgtccactattagtagctggttgggagtgtccttgaccgtgggtgttaccttgaaactgggcttcttctctttctccgctagattgtagcgataggagagctgaaccatggcagatcctgttcccttggctgtaaaatcgaccttgcgagtgctcttgggcaggtcatgggtctgcagaaccagggaattctctgggttaaccttaattgtattcttggattcacccgcagatgagaactcaatatccatggtgcctgagccagagcccgtcttgtatgcgaattttgtgagcgcctgaagaccaatcacagtatcctgagtggaggagaatcccccgttgctgttgcgctgcgatatcagccacttgataatgggcagggccttctcagccggatccttttcaagaagcgcaagcagaacataggaggtgatctcgacgtcgttactgcgaggtttccagtggaaaactcgtccatcctcaccagtcgattccgtggccttggaccaccacattcgatcgttttcctttcgggccacgctctccagcttagcaatgaccttctccgactgcgggtgcttggccagttggagggccacggcggcaatggccagggaatactggtcgtccgtcttgtcagcctcttcggccacatagcgtactgctttcttaatggcactttggtacttcgggatcagttcctaatgcaattaaggataaatctctggtcaaaatacataatcggtatgataataggcagctaactaggttacttacatgattctcgaagaaagccagcagaacgaacgaagttagagccaatgggttttggttcgcgttgtcgaagagtttgccgacctccgggaactcgccactctccttctgtttcgatacaaggaagtcaagaccagcagtaatgactttaggatcgatatccgtgtatgttccagcttgatggaaggaacgcatgacataggcggtaagccaagtgctgcccgaagcgtccgattttccaaatgcactatatgagccatcgtcgtgcttgtaggtcagttccctctggtagccgatctccaggaactttctagctttggactcaacggacggaagctttcgaccagtaacctccagatatttcagcaccagaatgttgggcacaaagtttaccatgttttgctctccgcagccgtacggcatacgcaccagattgtcgagattctggagcgtcggacccagaagatcaccaaccacagaaaactctataaattcagactggggcacgacctcgttgggaatatcagcatccagagactgagacatctctggctgatccttgaggttgataaagacagcccggttctcgaacaaagttacgccctctggctcaacctttaacttctggtgaatagcatcgccggccaaggcagaggtggctgtgattttcagggtcgtgaatcctacgttcttcggtcggatcataaatgaaacactcttgccactattggccggtatcgtgacccgtttgacccggcgcacctcatcgattgccttttccaacacctcattggtggcctcggtgaattcatattcctgatcagagttgtccattactacatctgcatcaagggtcttatccaggtagttgaagatgaccacgggaatagcaattacctcaccttagatatttttcaaatgttagtttgttaaataacgatattgcaattgcaatcacctcgctttacggaatacggcagatttgtggacacaaagaagggctggaatactcgaatcttgctcggattcttagttaaagcaattccggatgttgggttaagggagaaaccagtaaccacccatgaggtgatcgtatccggtatctttttggtcagggtgaattcctcttcacccacactgtataaagatgagaataattcgattagtttttaaaacttcatacaggatagaatcagtatatacacattgtacgagaaaacacaaagtgttaggttggcgtgtagagttagtaaacaattaaacatgcatgggaaaagttaaaaagcagtacggaaacaaattacttttttggtaagttttgaaattcgtatatcaaagacttcaaaaatgtggatattcttattgactctttccgcttcttaagatgattgcctcgctacgtgagtcggttttttggaatctttcgtattttcgcagaaccccccctttcatatgagtatatccgattttgaaaaatggcatgcagacatgcaaacaggacacaagaggaaaaaagttgattacttttcaaaaaaccacgtttctggaaactctttgcggattgtcgttcgttggggtgtttgttttaaaaggatttcttttagatttctatcatttaaactctgagaaagaaaagatatcctatctccagaatcacctcgtatgccaacacgatatcttgggcgggtaatccatgggtgtctcgacccttcaaatacataagacatcacgagaggacctatggtatccattagtttagaatgtttggttattgtttattgcgactaaaatgataatcagttttctatttaaatttttatgatcatataattttcatcttataaattcaatatatgtttgttaaattgtaataagccgggattttgttagtcataaacacaaatgtaacttgaattatgaaatttcaagtatcatacttttcgaagatgttaaatatccagttttccggaaactcttttcgaacctgtggttcaggaataacgtttggtggtaaggatccagcaactgttacgcggttaaatagtgggcgtgggaagccaatccctggtctaatgaatattcgtctttctagtaggtacataactttgtcagtctctgtatatatggattaatgggtaaggttagtaagtcaaactcttgatggaagcggaatttttccaagaaataaaccctataatataatttcaaacctgatctacgaaatccaaagcgtgtagttattagagtgttaatagttaagcgtaaagacgacaccccaagacattatacacagtgggatgacctatggataaggctagaaatctgtcatacttttcggcattataaaatatccagttttccggaaattcttttcgaatctgtggagcttgattaggatgtgaagctatcgatgaagtgccaggcattcccgctatggctgcctgcggtgccgcaagggaaaatgcaattgggaattctccattaagtatgagtgggtatattgaataggaatctgtattggggatatatgatgattattaacgggtctatgtacaatagtttacgatttggtctagacacacaaagtttttaagattaaagtttttaagaaaatattacatatcattggtgcttcaaatttttaagatattatgttcattaatgttcctgtgattttatgctacaaatatacttaaattttaatcccaaactgaccacccttaagaattgtcatacggatttagatcaatagcgagcatgcactctcgtattagtacaatcttgagttgatagatgatatagactctaaggatagttcactttacccaaaagtaaaaataaggaagcagagagagctgtacgataggttgcaaaacaaatagaaatagaagaaaatctaaaacccacctcccattgtcggatgttgtccacatccagacttctgcaaagttcgttcgaactaattcgatttttgtagatgaagttatagaaattgcgtccacttcgtcgtacgaaatcgaatcttctacttgatagtcaagactttcagggattgctttggctataaaattgatttcacagataaatacgaaagctgaatgtgacacatttgaaacctgacgatgatcacgaaagtgcccgggaagtaagcaaaatctattattagaacaatattattccgttgttgtattagtacactttgcattgatagcctagatagcctttgcatagacataaaaataagaaagcatagaagctgtgcgttagggtgcaaaacaagtggggtcaatttccagtgacccaccttcggccgatcgattgccaaatccagacatcggcaaagttcttacgtatctctaccggctgaacggtatttccggtgtcaggggggaaattagctatagcaggcattggaggcaatgcatcaagattgttttcgaatgcgtagatttccggatcgtcttcaacataatcgggaaattctgataaatgattcaattcatgttagcatacggcaactaatttcatattcatgttgctgaaacaaaaatattcttttccttaacgcccttgtcgacaataattcttagaagagttgaatgaaaaaaatacctgcttaattatgtagaatctgaatcttaagccgtattcttaccagtgttgtaaggataattcgcgttcgttagcgtcactagtccggatgtttgaccaggataacgcccatagccgttcatccagggtgttgatgtctgatatatgttgaggctattaaagatatcgtcttggcttagatcgttgcccgacttgagcagcaggacactctgatccacacccaaaagacccacaaaggaatcggcatcggttttaatccttagcttgacttcttcactcggtttggcattcgtcggagccgatacatcaatctataaaggcaaaaagctaattattaggtacaacttaaaggacattgaatgcgtaatcataccgagttactaaactccttctcgaagtcaatagttttctcctcgaactgtaggtcgttgtttacaacataataaacatagatcgttgccttcggcaccatgctaaatgttggtgtgaacttaaccgtgtaggttttctggccgtccggcacatccacgtaatcactgagtatcacattacctctggccacaatggtgtacacaaaatagggcagatcttcaatcgagacgacatcaaaagaaacttgttcgcctagtctaggcctaaaatatcaaagggttaaatacctgctaagccttcatgatagacttattcaactacttacttctttgtattcacctgaatcttcagcggctccctgctcattggggttggctcaaactttgagatggaaccgatggtattctccgacccatcgaatgatgcaaatatacgataatatctggaatcgctatcgggcagcctaacattaaaggttgcaatgccattctcattcacaggggcctcaaagttaatgcgtgtcttaggagatggctcatgaaaatagctgtacgacttgtcaaagcctatctttacgtttttcgcagagtttgtgactggcgatccatcaacattcttcaccacaacctgatagatgaacgacttattggcttcaaagtgttctggcctctcgtaaggctcaatcgagtatcgctgttggtgcagaacaactgtggcagtggcattctgcttgttaccagttagttcctccgtgacgacggcaaagagtttaatgggcggtaagtattgccctctttgggcccagtgaataatgtcgaactccacatgaccct

SEQ ID NO: 15470 - DNA, 2480 bp, DROSOPHILA
tcctgctgctcaagtcgggcaacgatctaagccaagacgatatctttaatagcctcaacatatatcagacatcaacaccctggatgaacggctatgggcgttatcctggtcaaacatccggactagtgacgctaacgaacgcgaattatccttacaacactgaaagacgaatattcattagaccagggattggcttcccacgcccactatttaaccgcgtaacagttgctggatccttaccaccaaacgttattcctgaaccacaggttcgaaaagagtttccggaaaactggatatttaacatcttcgaaaatgtgggtgaagaggaattcaccctgaccaaaaagataccggatacgatcacctcatgggtggttactggtttctcccttaacccaacatccggaattgctttaactaagaatccgagcaagattcgagtattccagcccttctttgtgtccacaaatctgccgtattccgtaaagcgaggtgaggtaattgctattcccgtggtcatcttcaactacctggataagacccttgatgcagatgtagtaatggacaactctgatcaggaatatgaattcaccgaggccaccaatgaggtgttggaaaaggcaatcgatgaggtgcgccgggtcaaacgggtcacgataccggccaatagtggcaagagtgtttcatttatgatccgaccgaagaacgtaggattcacgaccctgaaaatcacagccacctctgccttggccggcgatgctattcaccagaagttaaaggttgagccagagggcgtaactttgttcgagaaccgggctgtctttatcaacctcaaggatcagccagagatgtctcagtctctggatgctgatattcccaacgaggtcgtgccccagtctgaatttatagagttttctgtggttggtgatcttctgggtccgacgctccagaatctcgacaatctggtgcgtatgccgtacggctgcggagagcaaaacatggtaaactttgtgcccaacattctggtgctgaaatatctggaggttactggtcgaaagcttccgtccgttgagtccaaagctagaaagttcctggagatcggctaccagagggaactgacctacaagcacgacgatggctcatatagtgcatttggaaaatcggacgcttcgggcagcacttggcttaccgcctatgtcatgcgttccttccatcaagctggaacatacacggatatcgatcctaaagtcattactgctggtcttgacttccttgtatcgaaacagaaggagagtggcgagttcccggaggtcggcaaactcttcgacaacgcgaaccaaaacccattggctctaacttcgttcgttctgctggctttcttcgagaatcatgaactgatcccgaagtaccaaagtgccattaagaaagcagtacgctatgtggccgaagaggctgacaagacggacgaccagtattccctggccattgccgccgtggccctccaactggccaagcacccgcagtcggagaaggtcattgctaagctggagagcgtggcccgaaaggaaaacgatcgaatgtggtggtccaaggccacggaatcgactggtgaggatggacgagttttccactggaaacctcgcagtaacgacgtcgagatcacctcctatgttctgcttgcgcttcttgaaaaggatccggctgagaaggccctgcccattatcaagtggctgatatcgcagcgcaacagcaacgggggattctcctccactcaggatactgtgattggtcttcaggcgctcacaaaattcgcatacaagacgggctctggctcaggcaccatggatattgagttctcatctgcgggtgaatccaagaatacaattaaggttaacccagagaattccctggttctgcagacccatgacctgcccaagagcactcgcaaggtcgattttacagccaagggaacaggatctgccatggttcagctctcctatcgctacaatctagcggagaaagagaagaagcccagtttcaaggtaacacccacggtcaaggacactcccaaccagctactaatagtggacgtctgtgccgagtacgtgcccttagaagacgccgacaaggacaaggactccaacatggcagtgatggaaatcgccctgccctcagggttcgttggtgactccacaagcttgggcaaaatccaggcagtggatcgggtgaagcgcgtagagaccaagaactccgactccacggtggtcgtctactttgacagcttaactcccggtgatgttcgttgcttgccgttagaggcctccaaggctcacgcggtggccaagcagaagccggcctccgtttccctatacgactactatgacacggagcgcaaggccaccgagtactaccaggtgaagtcctccctgtgcgacatctgcgaaggcgccgattgcggagagggctgcaaaaaggactga

SEQ ID NO: 15471 - protein, 798 aa, DROSOPHILA
MNGYGRYPGQTSGLVTLTNANYPYNTERRIFIRPGIGFPRPLFNRVTVAGSLPPNVIPEPQVRKEFPENWIFNIFENVGEEEFTLTKKIPDTITSWVVTGFSLNPTSGIALTKNPSKIRVFQPFFVSTNLPYSVKRGEVIAIPVVIFNYLDKTLDADVVMDNSDQEYEFTEATNEVLEKAIDEVRRVKRVTIPANSGKSVSFMIRPKNVGFTTLKITATSALAGDAIHQKLKVEPEGVTLFENRAVFINLKDQPEMSQSLDADIPNEVVPQSEFIEFSVVGDLLGPTLQNLDNLVRMPYGCGEQNMVNFVPNILVLKYLEVTGRKLPSVESKARKFLEIGYQRELTYKHDDGSYSAFGKSDASGSTWLTAYVMRSFHQAGTYTDIDPKVITAGLDFLVSKQKESGEFPEVGKLFDNANQNPLALTSFVLLAFFENHELIPKYQSAIKKAVRYVAEEADKTDDQYSLAIAAVALQLAKHPQSEKVIAKLESVARKENDRMWWSKATESTGEDGRVFHWKPRSNDVEITSYVLLALLEKDPAEKALPIIKWLISQRNSNGGFSSTQDTVIGLQALTKFAYKTGSGSGTMDIEFSSAGESKNTIKVNPENSLVLQTHDLPKSTRKVDFTAKGTGSAMVQLSYRYNLAEKEKKPSFKVTPTVKDTPNQLLIVDVCAEYVPLEDADKDKDSNMAVMEIALPSGFVGDSTSLGKIQAVDRVKRVETKNSDSTVVVYFDSLTPGDVRCLPLEASKAHAVAKQKPASVSLYDYYDTERKATEYYQVKSSLCDICEGADCGEGCKKD

SEQ ID NO: 15472 - DNA, 4537 bp, DROSOPHILA
gaagttatagaaattgcgtccacttcgtcgtacgaaatcgaatcttctacttgatagtcaagactttcagggattgctttggctataaaattgatttcacagataaatacgaaagctgaatgtgacacatttgaaacctgacgatgatcacgaaagtgcccgggaagtaagcaaaatctattattagaacaatattattccgttgttgtattagtacactttgcattgatagcctagatagcctttgcatagacataaaaataagaaagcatagaagctgtgcgttagggtgcaaaacaagtggggtcaatttccagtgacccaccttcggccgatcgattgccaaatccagacatcggcaaagttcttacgtatctctaccggctgaacggtatttccggtgtcaggggggaaattagctatagcaggcattggaggcaatgcatcaagattgttttcgaatgcgtagatttccggatcgtcttcaacataatcgggaaattctgataaatgattcaattcatgttagcatacggcaactaatttcatattcatgttgctgaaacaaaaatattcttttccttaacgcccttgtcgacaataattcttagaagagttgaatgaaaaaaatacctgcttaattatgtagaatctgaatcttaagccgtattcttaccagtgttgtaaggataattcgcgttcgttagcgtcactagtccggatgtttgaccaggataacgcccatagccgttcatccagggtgttgatgtctgatatatgttgaggctattaaagatatcgtcttggcttagatcgttgcccgacttgagcagcaggacactctgatccacacccaaaagacccacaaaggaatcggcatcggttttaatccttagcttgacttcttcactcggtttggcattcgtcggagccgatacatcaatctataaaggcaaaaagctaattattaggtacaacttaaaggacattgaatgcgtaatcataccgagttactaaactccttctcgaagtcaatagttttctcctcgaactgtaggtcgttgtttacaacataataaacatagatcgttgccttcggcaccatgctaaatgttggtgtgaacttaaccgtgtaggttttctggccgtccggcacatccacgtaatcactgagtatcacattacctctggccacaatggtgtacacaaaatagggcagatcttcaatcgagacgacatcaaaagaaacttgttcgcctagtctaggcctaaaatatcaaagggttaaatacctgctaagccttcatgatagacttattcaactacttacttctttgtattcacctgaatcttcagcggctccctgctcattggggttggctcaaactttgagatggaaccgatggtattctccgacccatcgaatgatgcaaatatacgataatatctggaatcgctatcgggcagcctaacattaaaggttgcaatgccattctcattcacaggggcctcaaagttaatgcgtgtcttaggagatggctcatgaaaatagctgtacgacttgtcaaagcctatctttacgtttttcgcagagtttgtgactggcgatccatcaacattcttcaccacaacctgatagatgaacgacttattggcttcaaagtgttctggcctctcgtaaggctcaatcgagtatcgctgttggtgcagaacaactgtggcagtggcattctgcttgttaccagttagttcctccgtgacgacggcaaagagtttaatgggcggtaagtattgccctctttgggcccagtgaataatgtcgaactccacatgaccctttccatcgacgtcaatggttttctcctgtttgttgccgttcgcattgaggtccccaaagtatccatagctccgttccatggacactgtggccttgcccttgactggctttccgtatgtgtacttggcgcgaatcgtggccttgatcaccttgtctgcaatgaccacagccttgggtgtgtccacgattacctcgaacttcggtagaacatatttgtcaacctcaaaggacttggtttccctattatcgccatccacgctaacggatatcttccaggtacccaaaacaggctgttcggataactgaagttcaccagagaaaacacccttcgtcaacttgacgtcgcttagctgtttaattctgttttgagctccatctatgattatgacggatatgggcttttcaatctttgcaggtcgggtgttttcatccagaaagagaatacgaaattgaacgagatcggcgggcttataggtggccttatcagtttgaacaaagaccgatggcttcttatccgcatagtttaatttggtagaattcttaaacacaacaccggatacaccctctgcagaaagattatagttgccagtggccaatttgggcacctcgaactccacattctgggtggacatgggcggcagttcgatttgcttcgtctcgttgtacgagggtccatttagactgacttttatctgactcggaccatctgccttgtggacagagacgacgacattgtacttggagttggagcggagggtaccaggccccaccaccgaatagatgctgcaaaacgaaaattattctttaattgaacaatgatgattgtgtggctacgtattgacattaccggattttgaatacttaattgcaatttcatgtatatttttgataattaattatctgatagagttctgttgttctaagattgattctttttaatattctgtcaatgggaacacggagatgtctaacaattctgcgaaactactgccctcgcctaaacatggcaccatattttgacaatattaataataataaaatgaataataataaaacgaacgtaatcagtcggagtttttcaactttttgcgtgcactcattaaaattccctttagagagtgaatagagtgaatataaatatttttatggccaattagttagttaactctctgtggtttcccgtcttttatgcattaacggattttcattattttcattcgaataaaactgactatagcactgttatctatttcattaaccatcgtggttttccaaccggtttgaagggaatcggcaataaaatcagaaagacaccaacgttttcatacgtggcctgcgaacattccgatttttattggtgcctatatattcacaagattactttttggaatttctctcagactcgcatttcttttggaactgataagcgatcaatttgtttgtcatacttgtgtttattttcaatcaaactcacccagtggcattaactagcagggcgtattgtaaaataatcccggtcagaaagattctgaacatattgcaggaattgcaaatatatacgtgttgattaaatcaatgctcaaacttttgatcccgaacggttattgattgatattatttcacagtattttctttgtcttcgagttactggaagacaggcaaacaaatctgatcccgaaaaccgaccgatcgccagctagcgacgattcacactgagtcagtcttgatttgatgccggctttaagtagaatttaatctctcttcagatccactctctctctctctctcccaaaatgctcgttattcggggaattctccagccataaaaggggggacctgatagataggaacaacaaaaaacagccggtagaattcaattagttttttgtttgcgtcactgatgataaatttgtttgcgtctctctctctcgctctcacttgtgcttaaaatgtaaaactagaagcaggactctttcaattaaaaggaaacaaaacaaaaatgaagcttgcaagccgaagcttacatatccgtgcaataataataattatcagctaatcaaaaactacaaacattaataaacaattatagtttctgatcaaagagtgtttctatttggtatacattagattcttttatatataatttctgcaagggtaaatgtatcttgtaggacacatctttctgataagaatggaattaggaatttccaagtgtttcacttatgtatatgtatgtaagttaaattgaaaacaaattcctagaaatgcgcttgtcggaccggacttgtcttatcattaaaacactctttattccttttgtgcgtgattttctatggggatcacatatgttctagtcgagagatcgttaaccggttaattcgtgttgaacaatgcatccatgtgctaatttctatataaacagccattttacgttttccctacagttcgcttgttgtaaacactacaagcttgcgaaaatggaaataaagaataaatattaacagctggaacatggggaagattcaaagcggtgcctttgttgtaccgccaatcttatggatatctcaatataacatttttataaattcaataaaattttaaaatgctcaaattctcataaccatatgtacatgttcagtgattagatcagcattaacattcaatttaatcaatgattgtttttagtgaaagattaaaatt

SEQ ID NO: 15473 - DNA, 1784 bp, DROSOPHILA
ctagctggcgatcggtcggttttcgggatcagatttgtttgcctgtcttccagtaactcgaagacaaagaaaatactgtgaaataatatcaatcaataaccgttcgggatcaaaagtttgagcattgatttaatcaacacgtatatatttgcaattcctgcaatatgttcagaatctttctgaccgggattattttacaatacgccctgctagttaatgccactggcatctattcggtggtggggcctggtaccctccgctccaactccaagtacaatgtcgtcgtctctgtccacaaggcagatggtccgagtcagataaaagtcagtctaaatggaccctcgtacaacgagacgaagcaaatcgaactgccgcccatgtccacccagaatgtggagttcgaggtgcccaaattggccactggcaactataatctttctgcagagggtgtatccggtgttgtgtttaagaattctaccaaattaaactatgcggataagaagccatcggtctttgttcaaactgataaggccacctataagcccgccgatctcgttcaatttcgtattctctttctggatgaaaacacccgacctgcaaagattgaaaagcccatatccgtcataatcatagatggagctcaaaacagaattaaacagctaagcgacgtcaagttgacgaagggtgttttctctggtgaacttcagttatccgaacagcctgttttgggtacctggaagatatccgttagcgtggatggcgataatagggaaaccaagtcctttgaggttgacaaatatgttctaccgaagttcgaggtaatcgtggacacacccaaggctgtggtcattgcagacaaggtgatcaaggccacgattcgcgccaagtacacatacggaaagccagtcaagggcaaggccacagtgtccatggaacggagctatggatactttggggacctcaatgcgaacggcaacaaacaggagaaaaccattgacgtcgatggaaagggtcatgtggagttcgacattattcactgggcccaaagagggcaatacttaccgcccattaaactctttgccgtcgtcacggaggaactaactggtaacaagcagaatgccactgccacagttgttctgcaccaacagcgatactcgattgagccttacgagaggccagaacactttgaagccaataagtcgttcatctatcaggttgtggtgaagaatgttgatggatcgccagtcacaaactctgcgaaaaacgtaaagataggctttgacaagtcgtacagctattttcatgagccatctcctaagacacgcattaactttgaggcccctgtgaatgagaatggcattgcaacctttaatgttaggctgcccgatagcgattccagatattatcgtatatttgcatcattcgatgggtcggagaataccatcggttccatctcaaagtttgagccaaccccaatgagcagggagccgctgaagattcaggtgaatacaaagaagcctagactaggcgaacaagtttcttttgatgtcgtctcgattgaagatctgccctattttgtgtacaccattgtggccagaggtaatgtgatactcagtgattacgtggatgtgccggacggccagaaaacctacacggttaagttcacaccaacatttagcatggtgccgaaggcaacgatctatgtttattatgttgtaaacaacgacctacagttcgaggagaaaactattgacttcgagaaggagtttagtaactcggtatga

SEQ ID NO: 15474 - protein, 539 aa, DROSOPHILA
MFRIFLTGIILQYALLVNATGIYSVVGPGTLRSNSKYNVVVSVHKADGPSQIKVSLNGPSYNETKQIELPPMSTQNVEFEVPKLATGNYNLSAEGVSGVVFKNSTKLNYADKKPSVFVQTDKATYKPADLVQFRILFLDENTRPAKIEKPISVIIIDGAQNRIKQLSDVKLTKGVFSGELQLSEQPVLGTWKISVSVDGDNRETKSFEVDKYVLPKFEVIVDTPKAVVIADKVIKATIRAKYTYGKPVKGKATVSMERSYGYFGDLNANGNKQEKTIDVDGKGHVEFDIIHWAQRGQYLPPIKLFAVVTEELTGNKQNATATVVLHQQRYSIEPYERPEHFEANKSFIYQVVVKNVDGSPVTNSAKNVKIGFDKSYSYFHEPSPKTRINFEAPVNENGIATFNVRLPDSDSRYYRIFASFDGSENTIGSISKFEPTPMSREPLKIQVNTKKPRLGEQVSFDVVSIEDLPYFVYTIVARGNVILSDYVDVPDGQKTYTVKFTPTFSMVPKATIYVYYVVNNDLQFEEKTIDFEKEFSNSV

SEQ ID NO: 15475 - DNA, 3896 bp, DROSOPHILA
tggagaagacaatttactggcaacgatatgttattctttctttccgccagcaagctttgcccttctgcaacagctccgccgtccagtgcatatttaaaagcaatgctgtggcatacttttcactgaatggagctgggaactgggagctgggagatggaaaaaaataggggacagcagtcggtcccttggccaattcaatcgggcggcagcagcaaatcaaagcagagagctgcacaggtgacactggaagcgggccagcacgagcggcatgccggcgcgtagcgggacaacaaaggtgtgcacttaatttaattagagacggttacgatggaacaaggaggggggtgttgtatacccttcttggctaacttaagcgcccacttttccaggccgaactggcgatgtaatggtctggaaatggcatttggcagcctgcgaacagcggcggcgaacgcgcgagccttttgtgaagatgaatttcatttcattaaacacaaatttcattgtgtgcgcttaaagtgaaattaaataaatgaggagtaggtaggggtagggcaggcgttgggggtaaaaaggggttatgtccatgacaaatgcaccgtgaaatcgctgctaaaaacctcgtccttgcagtacgtgtatgtgcgagttgtgccttgccattttcccgattttcattcggtttccgtttctgtttctgttcccgttcgtgtttgtattttaatgcaaattgttgtaatgttaaatgagtcacaaaattgttgtacatcacggggattaaatgaattttaaaactcgacattaaaaatggaatacgaaatgtgcaaaactgcataatgttgttcgctttggtttgctgacacaaaaggctgggatgacgtggtggcgtatgcgtaatgtgcttataactataacgaaattcgcgtgctctggatgcaaatgagaggtgcagaaatgcagaaatgcaggatgggatttataaaagtgcacatcctagattctaccaccagctcttgaccttgtgcagcactgtcttgaagacgggcaccttcacgggaaacggcttgggcaccttgatgggcacatatttgaccacatgatagggcacatgcttctccaccggtactgggatgtgtttctccacgggcacaggaatcagtcgctccactggaacctttaattccttctccaccggcacgtgaacattcttggtgatcggtatgtgaatgggcactggcttgcgaaccggtatgatgaccgcatgcgatatgggtatcttcacctccttctccaccggcacgtgctgcttcttcacatgcttcaccggcacatagttaatgatatccacatgatgcgagtgatgggtgtgtccctggccatgaccacttgcctccgacaagtagttggagctctgctcctgcccagcatcgggatgctcctcaaagtcatcagcaccagatccgctcgaggcagatgaagccgatgatgcagcggatccagaaatggatggttcatggtggccgaaatacgaagagtgctgttcctgttcctggcgctgctgctgctgctgctgctgttggtggtacagttgctgctgttgctgctgcagctgctgcagatgctgttgctgttgctgctgttgttggtgttgcaactgctggtggtaaagctgcccctgctggtcatcgtatccagagtcctgcatgtacggcggcaggaaatttcccattgaaattttatcgtacgcatagggatgagccgcctgctgttccggctgctgctcctccggcgccgatgatgaccactgtgcgtagtcctgctcgtgaccagatccagctgaaccgtaggctggcaaaaatccaccattatgtgcggcaccgggataattgtaaatcggcgaatgttcttgattgttctccaatccaccgccagattgttcatttcccgagccaaaatcatgggctccagctgctgcaacggcagccaccgcggtggcatcttcattgtggtcctcgtaaatcggtatctcctgtttggtggagcccagggccagtgcctccgtatgggtgggcgccaccgagccatacccattggaaatgtgtcccaggcccgagagatttgttagtccgttgagcatatgggccaatccttgccgggagcctgaggaatggccgctgctaaaggccctcctttcacccgcatttgcccgtggaattttggacgagccataccgatgattgggatgatgctgcatcggctgatccattggcagccatcgattctcgaacaaagaccccatattgtgatacaatggctggttcttggccgtctctgtcgaggatgtggtgctggcggtggccccactgacaattgtcagtatggtggtggctgctgcaatcagcggcatctgctgcggacgataatacacaacgatttaatatgcaaaacacttcagtcgagctaggagcgaaggatagtaaaactggtaaggagtcgactaagcgatatctttacctaactttcattaaacaaaagtgatttttttttcaactattttacttgatatttaaactagtttgcaagtaagttctcattttgtttcaaaatttgccgatttaagtatcctttttatggatctcttagtttagaagggcttctttctttatattccattagtatcactagccgcaatatgaaaaaaaagtgctgaatagctgaagtctttgtattccagaatttttgcataatgcatttttaatatccttgacttcgaagcctgtcgctccttgcaatgccatccattccacactcaccaaattaacgttcgccattgggcctggtgggcttcgaactctggctgggattgggctaagacctttactgcggctgctggctgccgactgctgcgatggtaatgtggccaaagtcaagacgggacagcgtttttatatgaccagcacggatctgctgcgagaggaaaactcttacacaatttgcagcagcacaattttcagcattcggctctgttgatagaaggcggttggccaaaagtgagtgttagccattcgctgttgacctgttgccatttctctcgcgcttttgccatagcatttatgaattaagttacgcgatcaaatccaattgtacagcaagacggcagagaaagaaaaaaaatagaaattgtaataaccaaatcatgagcagaaaaaaaaaaaaaaaaccggatctcaaacacttggaaaaacaataaagttcaaagtcattttcactgacaaacgacaaggaattagtcgacctggcacgcgcctccatcgcagtgcagctccatggtgatcttgccacgatccgctggtggccttcaccaggtgcgcttagcaaacctgcactccttcagtcgagtggagtgccgcagattcgagtggatggccaaaagtggttggaccgctttggtgaaaaagtgctggacaaaagctgatggctacgattcattccattgctttggccaaaggcaccatgcatttctatttgccattgtgttttcggacttgccttcacctttttaccaaaaaggttagttttaattgtttcaacagtgatctttttccatttctccctttttttttttttttaggccattgttcgttttgggttgcagttttttcttagttttcttggtccagcaatggggcgtggcgggcggaaaagtgaacgccttttaagtgcacctgcagacatgatgctgctgattatatttttcttgccaagcgtaacagctcgttagtattttcaagtgattttcatttattttccctgccttttgctgctgctgctgctgctgcagagcaaccgatggaggaaaggccagggcaaaagaaaaaaaaataaaaaaggaagtg

SEQ ID NO: 15476 - DNA, 1493 bp, DROSOPHILA
cagccagcagccgcagtaaaggtcttagcccaatcccagccagagttcgaagcccaccaggcccaatggcgaacgttaatttgcagatgccgctgattgcagcagccaccaccatactgacaattgtcagtggggccaccgccagcaccacatcctcgacagagacggccaagaaccagccattgtatcacaatatggggtctttgttcgagaatcgatggctgccaatggatcagccgatgcagcatcatcccaatcatcggtatggctcgtccaaaattccacgggcaaatgcgggtgaaaggagggcctttagcagcggccattcctcaggctcccggcaaggattggcccatatgctcaacggactaacaaatctctcgggcctgggacacatttccaatgggtatggctcggtggcgcccacccatacggaggcactggccctgggctccaccaaacaggagataccgatttacgaggaccacaatgaagatgccaccgcggtggctgccgttgcagcagctggagcccatgattttggctcgggaaatgaacaatctggcggtggattggagaacaatcaagaacattcgccgatttacaattatcccggtgccgcacataatggtggatttttgccagcctacggttcagctggatctggtcacgagcaggactacgcacagtggtcatcatcggcgccggaggagcagcagccggaacagcaggcggctcatccctatgcgtacgataaaatttcaatgggaaatttcctgccgccgtacatgcaggactctggatacgatgaccagcaggggcagctttaccaccagcagttgcaacaccaacaacagcagcaacagcaacagcatctgcagcagctgcagcagcaacagcagcaactgtaccaccaacagcagcagcagcagcagcagcgccaggaacaggaacagcactcttcgtatttcggccaccatgaaccatccatttctggatccgctgcatcatcggcttcatctgcctcgagcggatctggtgctgatgactttgaggagcatcccgatgctgggcaggagcagagctccaactacttgtcggaggcaagtggtcatggccagggacacacccatcactcgcatcatgtggatatcattaactatgtgccggtgaagcatgtgaagaagcagcacgtgccggtggagaaggaggtgaagatacccatatcgcatgcggtcatcataccggttcgcaagccagtgcccattcacataccgatcaccaagaatgttcacgtgccggtggagaaggaattaaaggttccagtggagcgactgattcctgtgcccgtggagaaacacatcccagtaccggtggagaagcatgtgccctatcatgtggtcaaatatgtgcccatcaaggtgcccaagccgtttcccgtgaaggtgcccgtcttcaagacagtgctgcacaaggtcaagagctggtggtag

SEQ ID NO: 15477 - protein, 475 aa, DROSOPHILA
MANVNLQMPLIAAATTILTIVSGATASTTSSTETAKNQPLYHNMGSLFENRWLPMDQPMQHHPNHRYGSSKIPRANAGERRAFSSGHSSGSRQGLAHMLNGLTNLSGLGHISNGYGSVAPTHTEALALGSTKQEIPIYEDHNEDATAVAAVAAAGAHDFGSGNEQSGGGLENNQEHSPIYNYPGAAHNGGFLPAYGSAGSGHEQDYAQWSSSAPEEQQPEQQAAHPYAYDKISMGNFLPPYMQDSGYDDQQGQLYHQQLQHQQQQQQQQHLQQLQQQQQQLYHQQQQQQQQRQEQEQHSSYFGHHEPSISGSAASSASSASSGSGADDFEEHPDAGQEQSSNYLSEASGHGQGHTHHSHHVDIINYVPVKHVKKQHVPVEKEVKIPISHAVIIPVRKPVPIHIPITKNVHVPVEKELKVPVERLIPVPVEKHIPVPVEKHVPYHVVKYVPIKVPKPFPVKVPVFKTVLHKVKSWW

SEQ ID NO: 15478 - DNA, 2593 bp, DROSOPHILA
cgaatctctggaggaacaagatcaggatttactgctgcggacaccacaaatttatgggcaggcttccaagtatcaaacagccaagctgccacctttgcttatctatgcgggcggcaattccggcgatgatgacaagtcctttgtgcaaagcgaaccgctggaggagaccgtctatcgctattccgagccggatcctttatatgtccaccagaaccccatcgatgtgctgcaggataagcagccgccggaggaggaaaccgataagggacagcatcaggagcaggcaagtgaccaaaagcgaggggaacagcgcccagtggtcagtttggagcagcccgaactgagcacaactgtttcagcgccatcttccaacgctggcacaaccactgagactgcaagcactgagagatccacacacgtcatccccaccacgatcgccagttttgtgtccacctccacgcactttagtccattgcgctccattagtaggtatcgcaccacgccaaagataacagctggacgatccaccacaaccactacatccaccagcacggaaccaccgctgaataagtgggccaagcggcgaaaggagcaggacagcaaggccaagagcagtcaccgccacgaagccttcgttagcaccacttcgtcaaccagcacgacaacttcaaccacagcaactccgccgtccacaatcgctgcatccactggcgttccattggcgtcgccactgccaccggcaccatccaaggaagtggtggaggtgctcacccagaaatcggttagtcgatctgtgagcatcaaggtgggcgagaacggcgaggagatacccatcattgtggacgacgaggagaacgaggtgaagccagtgctgactaattagctgcctacccatctatcttaaatcctaattatcctatcctatatttaagcctagccgtaagcacacttaatcccacaataaattcaagtaatccgtacggcacggggtcagactcacctgcctcctcgttggcgtacttgtaattgggcactggcgtcaagggaatcaacttggcataagtcgttggcatcatttccgtaatgcgctgatgatacgaaaggtcagcttgatcacgtgcttgttcatcttcttgatcgtcagatggagaatttcccagagatacagtttcgtgaactcgccggtcatctccttggagaaaatccacgtggccaccgccgaacaatcgacgatttgcagtttgagcagcttgtcgattaggaccaccatcatttgctggtgcgaggaccacagttcgaaaatgttgtgcagaatgcagatctgcgcctcctccgtttcggccagtgcacggaataccgaatggaatttcgatatggccgcaaagctgtgcgaaaacgatttcgagcccaaattcagcaacgtctggacgaaaacatcgatcttcaaagcattgaagctgccgtcggacatctcctcgccgctatatccgctattcggtatatccttcaatatgttgaccacctcctcgggcgtgcacttctgccggatggccaccaccagttgatgggccaccgttgttcccggcaagttggctattgttgaggaaatgatttagataatttgtttatacatgctccgttgcaatcttttggcttttagggtatattggctagcatattagcttaactttaatcctttaatccaagttgtcaacaggaacggtcagtcaacttattcataattttctggtactgctatcctcttctaattcaattcaattaggacttaagccccaagtttagtgggtaattgcttgtcgttagactttctagaccatgcgattgccgttgttcctagttaggtgacactttcgttgcaattcgcatttcattgcttggttatgtggttcatggcgtggaaccaagcggcaccactccacacacacactcattcaacacgcatccaaagccaaacatcgagcaaatccaagctctgcgtggtgcgttactaatgacggttgtgctccagctcaggcaaaccacccgccaccggagtttccctgcctgctccccgattacgtgcagtttattggcacttgcgtcaattatgtcaaagtggagatcggacgggatgggttcccagtcgtgcaacttaggggctaattatgcggccgtttggcaagtcaatgtattggcaaataagcattttattgttcacatacggatggcaatttgtgttggtcataaaagcaaactaaaaagggaactctaggaaagagaaaaatgtggcaactcatctatctacgttccgtaccttcatctagcccgatttaacctttggctcaaatcagttttggccaagaattccaaatgcctgtagacaatgtcaatggtttgggagtttcggatgtgtcaagatcatgcgatgctttttgtttagctgccagtggaaaaattcgcacatactgtggcctcataataccaacaaatgactgcttatgttacctaccaaaaaaaaaaaaataataataataataaaaaaaacaaacaacccgcctatccatgccatcgcctccaaataacttcacttaaa

SEQ ID NO: 15479 - DNA, 3224 bp, DROSOPHILA
tttggcaaaaaaaaaaaatagcatcgcatcgcgttttttgtgaaaattgtgacaaagctgttttgaaagttggcaagctaattgacgctcgcagtgaaatactagacgcaccaacaaggcccatccgtcaagcgtatcctgtccaggatccccgaaaaagtccaggtccaagaggtgtacccatcagcgtgcttttctgtctgccggtggccaaggaccaatcggtaatcggtgttttccgcaaaattcacagaaaattcacgggaagatgagtcgcaggagggctcacgacacggaggatgagggctatgatcatcggcgcaacaagcgtagacgtgtgtccgaaaaccaggagatcgaggatcgtctggagtcgctgatactgcgggtgggcgagcgtagcacctcctccgtggaatcgaacctagagggactcgtctccgttctggaggccgatctgggcacgtttcgcctgaagatcctgcgcatcctgtccgactgcgccgtgcgaatgccagagaagtgtaccgtttacaccacgttggtgggcctgctcaatgccaagaactacaagtttggcggcgagttcgtggatcacatggtgaagaccttcaaggagtccctcaagatgtgccgctgggatgccgcccgctactcgctgcgctttctggccgacctggtcaattgccacgtcatttcggccaccagtctcctccagctgctggacaccatgatcgatgtctccaacgaggatacagtgccccaggtgcgtcgcgattggttcgtctttgctgtgctctccacgctaccctgggtgggtcgcgatctctacgagaagaaggagtctgccctggagtccctgttgcttaggatcgaggtctatctaaacaaacgctcaaagaagcaccataatgcgctgagggtgtggtcctcagacgctccgcatccacaggaggagtacttggactgcctgtgggcgcagatacgcaagttgcggcaggacaattgggcggagaagcatataccacgaccctatctcgtattcgattcaatactttgcgaggcactgcagcacaatctgcccacgattgtgccgccgccgcatcacgacaactttgagtatcccatgccctgggtggtgtaccgcatgttcgactacaccgactgccccgatgggcccaatctgccgggtgcccactcaatagagcgctttttgattgaggagcatctacaccatatcattgaaacataccatcacgagcgaaaggattgcgccgcccagctgcttagctttccgtacaagcacaagatcccgctggagtactgcatcgtcgaggtggtcttcgccgagctctttcatatgcccacgccgcgctatctggacatctgctacggctccattttgatcgaactctgcaaactgcagccggccacgctgccccaggttctggcccaggccaccgagatcctctttatgcgcatcgactcgatgaacacgtcatgtttcgatcggttcgtcaattggttctcctatcatctgagcaacttcaagttcacatggtcatgggacgaatgggacagctgtctgctcctcgacggcgagcatccgcgtcccaaattcatccaggaggtgttgcagaagtgcctacgcctttcgtatcatcagcgcattacggaaatgatgccaacgacttatgccaagttgattcccttgacgccagtgcccaattacaagtacgccaacgaggaggcagccaacttgccgggaacaacggtggcccatcaactggtggtggccatccggcagaagtgcacgcccgaggaggtggtcaacatattgaaggatataccgaatagcggatatagcggcgaggagatgtccgacggcagcttcaatgctttgaagatcgatgttttcgtccagacgttgctgaatttgggctcgaaatcgttttcgcacagctttgcggccatatcgaaattccattcggtattccgtgcactggccgaaacggaggaggcgcagatctgcattctgcacaacattttcgaactgtggtcctcgcaccagcaaatgatggtggtcctaatcgacaagctgctcaaactgcaaatcgtcgattgttcggcggtggccacgtggattttctccaaggagatgaccggcgagttcacgaaactgtatctctgggaaattctccatctgacgatcaagaagatgaacaagcacgtgatcaagctgaataccgaattgagcgaggccaaggagaagcttgcgaaggcggactcttcgtccagcgattcggaggatgattcttcgcataaaaggaagaagccgatcacacacgctgacaagccatccgaggaggtggttgagcgcatggaggagaaattggaagcagcgaatgtgaaccagaagcgtctgttcctcatcgtcttccagagattcattatgatactctccgagcatctgctgcgctccgatacggacggccgtgatccagacacggattggtatcgctggacaatcggacgactgcagcaggtcttccttatgcatcatgagcaagttcagaaatacagcagcactttggaaacgctgctattcacatccgacctggacacacacatcttggaagtgttccaacagtttgtggccctgcgtgcctaaagatggagctgagaaggcgcagcccaaaataccccccccattttacatatatcgatgatgaatttgagtttgtaaagttcgcccagttagatcgaactgtcgacatatgatttcgggaaattagccgttgcatacccatgcaccaccatacaagaaaaacacactagataaggaataatttttttatgttttgtaaacgacgcgaaaagttaacaacaggaatgagaaaagctcagaaaaataaagtcgaataggcagtttctttataaggataaagaccaagatggacatcaaaatacaatgttaattcgaagtatcttttgggtggttcacatacgtaagataagttattgaaaataaactatttgtcataccacaaaatatgctatgaaaaccatttgaagaagccccatcaagtgaatacttttgggcgctagaaaaacactttattgtcatggtaaatatatttatttatatgtacgtttttgtgtgtatacatatatatacatttatatagatctgttttgtatgcattcaatatatgaaaatatat

SEQ ID NO: 15480 - protein, 800 aa, DROSOPHILA [sequence omitted]

SEQ ID NO: 15481 - DNA, 2813 bp, DROSOPHILA
agctaatggttatttcccttacgaggacaccattaccaacgaaaaaccgcgacaacattgtttgcaagcacagagaaagtgggattagcacgaacgggaacccacctagtggatattgcgccacatggatctccgggaaggcgccgccatcgccaaagtccgcatccgtatgtggtacccaatccttacgctgtccgtacggcggagcagcgattttggcggagaccagggctccgatctttggtgctccgcgggcgaccaggcgacgctcgtcctcccgatcccagatcgcgttcgtcggcgtgggcagcaggcttgatagcgacatagcttatctgttatttgtggcgaatcaattcttatgtgaaatcacttttcaatatgcaagccacaaaaactataatggaaaagtcgaaaaaaaaaacacgcacgcacacggacacacacaagcgtacgggtgtgtagggttgccagactgctaataagaaaatgctatagagtatggtcccttttagggatggattgcatatattgcgtttttcttaagacgtaagaaaaccaaattggtagaaataacaaagcgatagctttttccaaatttgaacgcgaatcggtagtggattggtaatggtcatcaaacatcatcaaaatttgcaaaaaatggtcaaaaaattgaatttgcatttttgaacacagtttgatttgaaattttattacgagcttaacgaggtatgacattccatatttggaccattatttcgaatgttcttatcaaaatactacaatatggtttataaaaatcaggggcaatcagagaaaatttgaataatttatttttattaccttaacagaactgtgcaatacttaaaaatataatttatagacatccccctaataattagatagatataagtgacacttgcccgatcgatactatcgcatcgccctagccgctggcagtgccatcgctagcagttcagtcaacaatttaagtttttgtttttgttggccaaaaacacaatacaatgtacacattgatgcacggcttctacaaatacatgactcagaaggacgactactgcgtggtaatcctgggcctggacaatgctggcaaaacggtaggcagctgaatcatccaatgaaagcctcatgtccaatcggaaactaacacctgtgcccacgtagacttacctggaggccgccaagaccacgtttacgcgtaactataagggcctcaatccgagcaagatcacgacgacggtgggcctcaacatcggcaccatcgacgtgcagggcgtacgcctcaacttctgggatcttggtggccagcaggagctgcaatctctctgggataagtactaccaggagtcgcatggcgtcatctacgtgattgattccaacgacagggagcgcatggaagagtccaaagcgatatttggtaagcgaaaacagtcttcgaactaatcccttgaacaaaactcgttttgatctattctgatgatctctggtaaaaggaaaaaggttcacctaaaatgtgttattctctttccccacagacaagatgatcaagaacgaactgctgtccggagtgcctttgctaatcctggccaacaaacaggatctgccggatgtgatgggcgtgcgggagatcaagccagttttccagcaggcgggtgctttaatcgggcggcgagattgcctcaccattcccgtatccgcgctgcacggcgagggcgtggacgagggcattaagtggctggtggaggccatcaaacgacatgcggtggtgcggccgccgcgggaaaacgattagaagatcaagcagaagacatctgggcctggtagtcggccctccactggctttaattagacatgtacttttgtaagttaggggcttaggataacgcttatttgtaattagccagacgagattgcgagataccaattgtaaagatgcgttgtcattatttgcaaagacctttcttttcggttaactactgctgagaaaatgaggaaaacaatgttagaaagctgtgagacttctgcataggacaacgaattacaaatactattgttagaataacaaagaacgcaatgcttattagccaattaagtgcaagaactataaattcagaagtacttgaagatgtatttgaagaagtactttgttctgttaataacccagatacatgggtatttggatgccaaaaatgtaataaaactgaatccattcgcagctgttatggttaatcgttagccacaaagtgtgtgggcgattcgaggtccaccaaaatcgggagagtcgcttctttatctaacagcactgcactcgtagtacacctcgatatggcggttgtcaatggggctccgcttatccgaaccgaacgacaccgaaccgcggaaagaaacaaccagcaaacagacgggattgtggtgttctcacggcggggggagcattattattaccattatcagtccgatagataagtgctgtgtgtgccaccaaaaagcaaaggcggaggaaaatgaaaatgaactaaaaacaacacctggtgagtggcactggaatcgtcagtcttccgcaggagtttccaccgctcggactggaaatgatcggccgccagcaagggctagatagctagacctcgagccagagctagagaaaagaagagcgttacctgttaattattagtgtacattagataaggcctatgtgaagcactcgccgcttatcgctgccattcccatacccgaacgcgctcccgctcccattccattcggtttagttccgtgctccagtgagaagccaccat

SEQ ID NO: 15482 - DNA, 628 bp, DROSOPHILA
ttttgttggccaaaaacacaatacaatgtacacattgatgcacggcttctacaaatacatgactcagaaggacgactactgcgtggtaatcctgggcctggacaatgctggcaaaacgacttacctggaggccgccaagaccacgtttacgcgtaactataagggcctcaatccgagcaagatcacgacgacggtgggcctcaacatcggcaccatcgacgtgcagggcgtacgcctcaacttctgggatcttggtggccagcaggagctgcaatctctctgggataagtactaccaggagtcgcatggcgtcatctacgtgattgattccaacgacagggagcgcatggaagagtccaaagcgatatttgacaagatgatcaagaacgaactgctgtccggagtgcctttgctaatcctggccaacaaacaggatctgccggatgtgatgggcgtgcgggagatcaagccagttttccagcaggcgggtgctttaatcgggcggcgagattgcctcaccattcccgtatccgcgctgcacggcgagggcgtggacgagggcattaagtggctggtggaggccatcaaacgacatgcggtggtgcggccgccgcgggaaaacgattag

SEQ ID NO: 15483 - protein, 196 aa, DROSOPHILA
MHGFYKYMTQKDDYCVVILGLDNAGKTTYLEAAKTTFTRNYKGLNPSKITTTVGLNIGTIDVQGVRLNFWDLGGQQELQSLWDKYYQESHGVIYVIDSNDRERMEESKAIFDKMIKNELLSGVPLLILANKQDLPDVMGVREIKPVFQQAGALIGRRDCLTIPVSALHGEGVDEGIKWLVEAIKRHAVVRPPREND

SEQ ID NO: 15484 - DNA, 4429 bp, DROSOPHILA
tataaacatttttaagatcgcaaatgttcggaacaaataaaaataattactagataagccaattggacatgcaacctacaattgccgagtgatgataataaattgtaatttgtgctttcagtgaacttacatcgtcatctacaggcacatggcgtcgactacttgcaattctcatttcgctggatgaacaatctgctgacacgcgagctgccgctgcactgcaccatccgattgtgggacacatatctcgcagagtctgacggctttgccctgttccacttgtacgtgtgcgcggcattccttctgcactggaaggagcagctgatgcaacaaaacgatttccaggtgagtctccagacgaaaagatcttcccttcctgcaacgtctactaatcattgccatcttgctatgtgatagggcctcatgttgctgctacaaaatctgccaacacacaactggtccgatcgacaaatcaacgttctgctggccgaggcattccgcctgaagttcacgtatgcggatgcgcccaagcatttggagacgaagagttgacaaaagcaacacaaacaacgcatatacgtaacttagaagttagtttattacgatttgcggaatatacctacacaatacacgtacgctacatacatctaataattatatacaatttgttatttagacgttcctctccgtttgttttcattctatgtcgttttcgttttgtatttatcaacaatccgtacgtaggcaaccgctaaagttctgcgctttttgtacataagaatcaaaaattcaaaatacaattttacacgttcaacgggtcgagctgtttcaattgaaatttgtcttttataaaaacaaatcgaatcaaatgtaatgagaactaaatactttttccatgtgaaaattcaaattagcctaaacaataaagatgaaaagctatagtttatgattacacgaattcaacaaggacttaaagcgactaactacaagcctgatatttctaattctgtctatcggcaatgtgcttaagctgcttgagcaccgtctccaaaagcttcttcttgtcattctttcgcaccaacgagaaaattggctttttgtccgcctcgcggatcttttccagtatcacaataatggactgcggttgcaccagatggtagcggttctcttgcttgccatagtcatggaaatacgtgctccattcctctagaatgagcaggtccaacagctgacggttacgtaggaagtacttgctcagctctccttcctttagaccaggcacaggttccgaggccgcaaaaaactcgcactgcatcagatccaagttgatttgtgtgagtgctcccgtggaaatctgcttcacatcctcgtcatacatgatcgagtaaatcttctctgcaatgtgctcgaaggtgcgtcggcaggccgcctgggcgatgtggggcagcttgaaggcaaagctgtcaaaggtgctcttaaggtaggaaatcatgtccgtaatgaaggcggaggctattcccggcggctctactagtaaccagtcataggcgcttagttcgaagaactcatcgatcttcgagcaaatacgtaggcccacctgcttctcggcatcttgccgggccacgtggaacatggccgatggtgtctgagatacgctcctctccgtgttggtcatgtgacacacgaactcgtccagaaacggccctgccttctccaagtactgcgtgtcgattatgatctgaatgagctgcgtcagcgtgatgctcggctggcggaacaccacagatagacagccactgaaacttcgtgtgagcagcagattggccgccttgcgcaccatggcggccacctcgttgggcgatagggtgagctcctcggcgaacttcatgcaggcgtacatgaattccttggcctggtgataaacctccggcaccattctcgaaaaggggaatttcttcggaaacggagcattttcaagctgttccgagtggaaggggaatcgttcgatgatgcattcatactcttccgtgttttgtacaaccatgggcaggaactgttccttgtcgagaatttcgcggaacacatgtacccagcgttgcagtaaaacctggaaaggaaagccaagagttttacaaacaacagaatggcttatagaatttcttaacgttcacctcattataatgatcccgcatgttgtgcaatagttcccagaggatgttcacggtgtaaccgtagcacttaaaggtgttgatggacagcataatgaggttcttaatgcgcagaaggatattaggatcggtgcaggacgaagaactcatgctgatttcgttgacaaacttggttaacgagctggaccacagatcctccaaataactgctggtcacgacatcgcccgccgtgtttttaacgtgatcctcaaccacgaagaagccaacgatggcacagatgtacgttttgtaggcctccaaattgtcgtgcatgttgggcggcggttgaagcaccagtttggcctgatccctgcgctgctgacgatagtccttctcgaagtactcccgctgacccagcaccatgtagatgtgtaggcagcggtagatgggggagaagtcaatgagatcctgggcactaacgttggcaccatcatcatccccgccagcacctgctccgccggcttcgccgccattcatctgctgcatgtgctcggcaatgatggcgttgatatcacgcttttggagctgttttgtgtgtgtgatggccagctcgccgatgcggggtgaaaacttccggatgttctcgaggaactctcgaaagtccgaggcggaagagcgacggatgttttccttgattatgggaatctgtatctgcatctgggtggcgaatcggtagttgtgtgtcttcaagcgcgttaggtgctccgtctccagagtctccagagttctcagcgcctggtagtactgcttgttctttgcctgctgtgtgaacttcatgtagcactccaatgcgggcagacaggatttgagtgcctcgatggcgctggccagattggattcgatctgacgggcccgcactagatcattgccctgctgaatcagcgaggcgctgatctggcgaagggacgtgtccaaggaatgcacttcgttgtgcagctgttgggcctgcgtgcgcacctggagcagctcctgaattgaatcgatgaagccctggtagtacagattgcagatccgctcgatctctttgtcatggctccgtatccgctgctccagttggtcgccaatctgcttagtgttgttgcctgtccgggaaaaaaggaaaatgggcgtaaacaaagtgtgccaattgcttctattcgcagtcaccttcaaggatcgaacggaatgttggtccccagtagtcgtccaccgcctcaatgtcttgcacggtcactttggacatcttataacgctcttttttctcttctaaacaactttttaccaaactttaatgagcaattatttcgccgacttatcggtatggtatatcgaatatttactaagtgttatcgaggtttgactttcgatactaggcgataacaattttaagcggtatgttttaaattataatacaaagttgtgtcagagaatatctgactgcattatcttttaaaaagatattatcactaggattgtaataaaataaataaatcaaataggcgaaaactaccgaatcataaacttaatttatatatgtatatcaaaatccggttcttaactatttaagcaggaaacaatgatttgtaaaatatttataaattaattaaatatttacaacttaaacctatgctattagtaatgttcaccaacataatattcgttggtaattttgataagaaaagtaattaattacagatgtttgaataactcattttggcgcccttatttcaaatatccgcagcaagcaacaggttggaatgccgtctgctcgttataggccgccttggaacagctgttgctgttcagctttcactttggcttcgctttggctggccgcttctcgagagggccaagagttgtcggtggagttgtggttccgttgatacagttatgttgcagtaacacccgtacacgcacgcaatcacggcacaagctaaacacccgaaatcagcaaagatggccgacctacggagtcgccacaatggaaccgctgccatggagaagcaaagccacagccaaaccggaagccaccatcacaacaacaataaagcgctggataaggaagcatcggagaatggaaagccggagaagagtgatcccatgatatacataatcttcgtatcgctgctcttcgacttactggccttcaccatcattctgccgctgctgccctcgctgttggagcactatcgccagaacgacagctccggcttgtatgccgtgctcacggatcgggtgcgctg

SEQ ID NO: 15485 - DNA, 2301 bp, DROSOPHILA
atgtccaaagtgaccgtgcaagacattgaggcggtggacgactactggggaccaacattccgttcgatccttgaaggcaacaacactaagcagattggcgaccaactggagcagcggatacggagccatgacaaagagatcgagcggatctgcaatctgtactaccagggcttcatcgattcaattcaggagctgctccaggtgcgcacgcaggcccaacagctgcacaacgaagtgcattccttggacacgtcccttcgccagatcagcgcctcgctgattcagcagggcaatgatctagtgcgggcccgtcagatcgaatccaatctggccagcgccatcgaggcactcaaatcctgtctgcccgcattggagtgctacatgaagttcacacagcaggcaaagaacaagcagtactaccaggcgctgagaactctggagactctggagacggagcacctaacgcgcttgaagacacacaactaccgattcgccacccagatgcagatacagattcccataatcaaggaaaacatccgtcgctcttccgcctcggactttcgagagttcctcgagaacatccggaagttttcaccccgcatcggcgagctggccatcacacacacaaaacagctccaaaagcgtgatatcaacgccatcattgccgagcacatgcagcagatgaatggcggcgaagccggcggagcaggtgctggcggggatgatgatggtgccaacgttagtgcccaggatctcattgacttctcccccatctaccgctgcctacacatctacatggtgctgggtcagcgggagtacttcgagaaggactatcgtcagcagcgcagggatcaggccaaactggtgcttcaaccgccgcccaacatgcacgacaatttggaggcctacaaaacgtacatctgtgccatcgttggcttcttcgtggttgaggatcacgttaaaaacacggcgggcgatgtcgtgaccagcagttatttggaggatctgtggtccagctcgttaaccaagtttgtcaacgaaatcagcatgagttcttcgtcctgcaccgatcctaatatccttctgcgcattaagaacctcattatgctgtccatcaacacctttaagtgctacggttacaccgtgaacatcctctgggaactattgcacaacatgcgggatcattataatgaggttttactgcaacgctgggtacatgtgttccgcgaaattctcgacaaggaacagttcctgcccatggttgtacaaaacacggaagagtatgaatgcatcatcgaacgattccccttccactcggaacagcttgaaaatgctccgtttccgaagaaattccccttttcgagaatggtgccggaggtttatcaccaggccaaggaattcatgtacgcctgcatgaagttcgccgaggagctcaccctatcgcccaacgaggtggccgccatggtgcgcaaggcggccaatctgctgctcacacgaagtttcagtggctgtctatctgtggtgttccgccagccgagcatcacgctgacgcagctcattcagatcataatcgacacgcagtacttggagaaggcagggccgtttctggacgagttcgtgtgtcacatgaccaacacggagaggagcgtatctcagacaccatcggccatgttccacgtggcccggcaagatgccgagaagcaggtgggcctacgtatttgctcgaagatcgatgagttcttcgaactaagcgcctatgactggttactagtagagccgccgggaatagcctccgccttcattacggacatgatttcctaccttaagagcacctttgacagctttgccttcaagctgccccacatcgcccaggcggcctgccgacgcaccttcgagcacattgcagagaagatttactcgatcatgtatgacgaggatgtgaagcagatttccacgggagcactcacacaaatcaacttggatctgatgcagtgcgagttttttgcggcctcggaacctgtgcctggtctaaaggaaggagagctgagcaagtacttcctacgtaaccgtcagctgttggacctgctcattctagaggaatggagcacgtatttccatgactatggcaagcaagagaaccgctaccatctggtgcaaccgcagtccattattgtgatactggaaaagatccgcgaggcggacaaaaagccaattttctcgttggtgcgaaagaatgacaagaagaagcttttggagacggtgctcaagcagcttaagcacattgccgatagacagaattag

SEQ ID NO: 15486 - protein, 766 aa, DROSOPHILA
MSKVTVQDIEAVDDYWGPTFRSILEGNNTKQIGDQLEQRIRSHDKEIERICNLYYQGFIDSIQELLQVRTQAQQLHNEVHSLDTSLRQISASLIQQGNDLVRARQIESNLASAIEALKSCLPALECYMKFTQQAKNKQYYQALRTLETLETEHLTRLKTHNYRFATQMQIQIPIIKENIRRSSASDFREFLENIRKFSPRIGELAITHTKQLQKRDINAIIAEHMQQMNGGEAGGAGAGGDDDGANVSAQDLIDFSPIYRCLHIYMVLGQREYFEKDYRQQRRDQAKLVLQPPPNMHDNLEAYKTYICAIVGFFVVEDHVKNTAGDVVTSSYLEDLWSSSLTKFVNEISMSSSSCTDPNILLRIKNLIMLSINTFKCYGYTVNILWELLHNMRDHYNEVLLQRWVHVFREILDKEQFLPMVVQNTEEYECIIERFPFHSEQLENAPFPKKFPFSRMVPEVYHQAKEFMYACMKFAEELTLSPNEVAAMVRKAANLLLTRSFSGCLSVVFRQPSITLTQLIQIIIDTQYLEKAGPFLDEFVCHMTNTERSVSQTPSAMFHVARQDAEKQVGLRICSKIDEFFELSAYDWLLVEPPGIASAFITDMISYLKSTFDSFAFKLPHIAQAACRRTFEHIAEKIYSIMYDEDVKQISTGALTQINLDLMQCEFFAASEPVPGLKEGELSKYFLRNRQLLDLLILEEWSTYFHDYGKQENRYHLVQPQSIIVILEKIREADKKPIFSLVRKNDKKKLLETVLKQLKHIADRQN

SEQ ID NO: 15487 - DNA, 12039 bp, DROSOPHILA
cagtactgttttagatggcatcttgcttcggcctgttttgtgtgatttcgctcgaggctgcaggcacctttgcttatagaaaaccagtgttcttttgcctacgttactattgctttaacatcatacaacgcaaaacaatcattaactttcctctggagttcttcgatacgttgcattcttaaacgctaaaatacaaacaattccctttcggaaatgatagggaatttagttattcaatttttgtttttctctctacgcacatgtttgggaacagggactattatatgcacttagattgcggtcagggtcaaccgactttgattttcgctaagaactacaattaatgactatagctacaattgttgaaattgttgttactttttgcacgcatttaacactttttgctaatattttacgattattttacacattttattaaataattattaataaatagtgtttattatatatgctggggtttatcaatcatgcttagtgagtaggaggcgtggaaggatttttaggtgaatggaaactttataaacctaaaccgagagcatttttggattttttttaggctagacaacacaactgtgtctgcttttttgtttcttttatatctttaatacaatattttacaaagccttaaatgtacaatctgcttctaaaaatgtacaatttatattttttgtttctcgcataatgtgctatatgcatattaatattatataggtgtgtagagataatatcttctttacgctgatgcgattacaacaaaccagttacagacagatagaagaatggttaaggggcttacaagctaactgtacactttaaagttcgattaaggacctgcagttcgctcatgtactataaaagctaacactttaataggggcgagggcaaggaaccaaatcacaaagggaggggattatcgaaagcttgaatgaacgaagttacaggatacgcttacatgcgacgttttcgcgttctccgattatcatctaacctcacagtcttttttcaatggaagtaagccgccttccccgctggcgcgtcctcctccactgccgttgttgttgatcgagttgctattgcaggagttgctggaagccgatccggtgccactggctgatggcaatgagttgttgctattctcgtagtttcccacgttgacgcacaaaggtgtggtcgcattcacaagggacgactgcacgcccatcgcagcctccccgctctcgggcagggatgtggagtcgtgcacgtctgcacttttgctagagtctatcaccaagcatggcggggatggggtacccgtgtccttaccaagcagggctggtgacgtattagcgttctgggagtgcggtgtaaaactgttgagcagtctgccctgtggtgacgcctctctgagaggtgatataagtggcagctccgtaatcggagacgtgttgtctgccgtagactcatcctttttttccgccttcgtgccgattatgtatccgccgccagatgagttccgggctattttaaatcgcaggggtgctggagcctccaaggtaggaggttgctccagactggcggttcttgtcgtggtctccgcctttcgtttgccaaaacgtaggatcagcttaggcttatcacctggcgacgcactggccgtgttctcaattaacgtagtggtcatggtggttgtactgctgcttaagataagctgttgctgtttttggcgtttcttttccttcttctcctttttcggcttggaagacttaggtcgttttgtgggaggctggggcattatgagcgactcgccatctttgacaactacccctctcttgttgctgtcctcgcccttgacaaagtcctgcatgactttcttgcggtaattcatcgagtccctcttgatttcctctagtgtaagagtgctaaaattacttgtcaaacgctttttaggtggacaagcccttcgggtcatttcataactgtagttttggccctcgtcaacgcttgaaacacctgaaggtgtctcgttggccgtcaaacccctgattttgatcttcagcttaggggcctggtggtcatcctcgctgctttcgagagtcttactgcgtcctcgcctcttacctgcactactagctgctccagtcttcccgttgttgtcgttattgctacctgagctacaagcgctacgccgtctgccgtcacccgatgatcctcctccacaggctcctgcaccgcttgaaagcaattgttcctccacaagggctaagttcgcatcaagagcacgcaattccctgctactagagttcttcttaaaccttttcgtaccgttgccacctgaaagttcgtcttcctcctcagactttcgcaaattctcaaggggcaaagtgtcggatgcggctggcagtccgcatgagctatcgtcattgtgattatctttctgtaccacataaagactaagaagttccttctttcgcatgcgacgagagttgccgctaacggctgatgacgcactgactacagtcgacgtggatacggtggtttgcactacatttgacgactgcaccagagtgctggtaagagtcagactgctgctgttcgtcatggcgttatagtgttctggataggccatcgggctcttgatcttaagtttaatctgacttcgggcatctgaagtcgaggtcttggagtgtggtatcgtgctgtctgagtcaatcgatacctcctctgaagtggcctctagagatgcttcaaccagcgagccttcgaccaaatgcgtagcagcacctgtagcagccacattgggtgccatttggtttgcttccgtgcaatgtagaagaagatttggtgcaggtgtgggattgggaccagttggaggtgcaactagtgccgttggtcctgaatgctgtttgctgggcgaggttccagtgccagttgctcgcagtgccgactggaactggcgttcgtcctcctcgttgaactcgctgagtgtctgatcggcggttcccgagtcaaacgcacccagaagattattctggtaggcctcttgagatgctgtactgtgcggtgcctcaaatccgagattgtatgttctcatgtccacaggtcccggcagcactggatggaggagaggatttgtggttgttgcagttgtcggtgtagtggttggcttgttttgaactcgtggagctcgaagctcaaaacttcttcgccgatcccttagcgattgcagattctccacaccaggtcctgccatgtcgtcaaactcgttgttgaactcaaagggagttccgaccaaattattgactatatgagtattgctcccgtaatctgacattggcggtggcagtaccatagccatcccactggtaactcctcctccacgtcctctaccccttcctcgtcccctgcccctgcctggtgctccagagccgccgctaccgcgcggtgcacgctggcgcggctttccctgtaatgtgtgcgtctgggggtcatatttagtcggcggcaatgccaccacgggaactggtgcaggaggcgttggtggctgcagaggctgtctgggcgactttcctggcgattttccttgcggaagttggggcgatttgtgcgtctgttttttagataagttactaccgctgacgcttgttctcttgcttggcgagtcctttgctgtagctgtaaccggtggggttggtggcatcatcgacgcaacgactgcttctgcacagctgcttagaagctgagccggatatgtcggcatttttccatcaatcggcgaagtcagagtaaacggattattgggtgtagttgcagtttgaacgggaactgttgaaagcgcaggctgttgtacagaaatcatacccaaagtagtcgcggaataaggtgttccggggtactggttgacctgagccggtggaggtagtgtagtggactgcacagcgcctccaactcccccattgccgtataagcttgaaggcggttctgtaggagttgtctgtggatgcatgatacccgctagttgggggtagatagttccgttgtactgattgtttggagttctctgctgttgctgttgatgagctggcgtcgtcggttgatgctgagtcgtattagtattgttgaacattggtatggaatcaataccgttcaccattggaggatggttaaagggcgctgtagcgtttgctgcagtgccaggcccggcattaccgcttggatagctgttgaaaaagtttttacagctctcaagctgagcgagggatcgagccgttgttgctgttgccgtaacgactggaggtggctgaggaggatcattggattcggacactgaactaggcgagctgcttcttctctcagcgataagatcgctttcgttccacggcattcccccgaacggcgactgcattcgtgtgctctcatcgtagtcgttgatcttcgcattgactcccgttccggattgcgtgggaacggttgctgctccgcgaaagcttccgagagtgttctttaccgctgctgctgccaagtctacaaagtcaggagtgggtgcaggttgccctacattagctcctccgttgctggataggggacaagcccctttttggtggggtgatttttccaggaagagacctaacgttggaggtggctgagagttcggaaaatttacttgatacccaagattgttcattgttgcgttggtgggtgtagcatttggagtgttggtgagactgtttgcatagcttccactgttggctgtcataggagaatccttgatagtcaatgatgcaacagagttaggtcctgatgagtttccataaatacatgtttgagatgattgcagctgttgttgctgttggtgctgctgttctttttgcgcatgaatgatatcctctgggtccgccgcattgtgaaaaggaaaaaccgatgggatggctggagttggaggtaatagatcgaccgcctccttgctactgcagtcatcctgcgccttgcgctttgttttgcgcagtttctctaagagatttcgggttgcttggatgctatcctcctcacttatttgcttactcctgtctatactagacccgattagactcatctgattgggaggatttaacacactggctaagtttgacgcgaagttgttagcaaacttactgtcctccatctcaagtattgtctcaacgatgggtaagtgctcgacaggcagttgctcgattagaggccgttgtgagggcagcagctgttgctgcataactgttggtacaacatctgcagcaggggattgtacaacaagcggaggcggcaggggttggtcatgtagatgctgctgttgctgctctgcagaattcgagtccagttcaattatttccggcggatcgggcggaatcacagtgactgctggagaggatgtagacgccgagtacttactcgcatttgcaagcagctcgtttttacgttcctcttccagctccctagccatttccatctcgttgaggagatgttgggtgtgatgagtgtgttcctcgtctggctcgtgactacgtctccttcttctccgtcgggatcgccagcgcatacgccgccgttcgctgagatcacttccagcgtcagacatctcgtcattagaggtaggggtaggagtgggcgaggcgggaagcggagccgccggtggacgctcatcatcgattatgtctgccagtttactcgcgctcgcagatagttgggttcgcgttggagcagtggtaagctcctcatcaatatccattggtagttcaccagcttctgccgcagactctgggtccagatcgggttcgggttgcgcatctgctcccaagttaatctgttggatggacacctcatcgggtttaagatcacattgatcttttacgatacgtgtttcagaagcaggtggagttggtgaaattggtgggggtgtagcttgagcagaatggttcatctgctgctgtttcttatttaacagcttgtccaacgaactagtcccttttccgctagctacttttctctggcttatttcttgttccaaatttgcaaccttcttaggagattcttccgctcgagatttacatctggatactgtcttttctggagacgatttagcagtaggcgagggcggtcgcgacttggaaccgcgagtcgctcttttggtagcctgttccaactggacctgctttccacattcgtccatagagccctgcagacgatttgttttcggcgtacatttgacgtcatcctcaactgattgcactgccttctgcagtgctacctttgtcgattttgttgtagagttctgacgagaccgcgtagacggtatgttcaatacattgaccgatgctggcgcaatagttaatgctgaaggcttatccatagacttgcggggtgaacgttttggcacaagagaggaatcagatggcactttcgcaggggctacaggaggctccctactagatgggttttccgaattgctggcctgagactcgctgtccgagtcgctgccgccactgctggaactacttcctgagctgctagaggagctggaactttcactgtcgccagaactagaacttgaaagatttgggacaactacgcggcgcttaaccaggggagttgtttttataggtgtcgccagcaaatcttcttttgattttcttctgccacttaagggttcctttggagtaattggtgcttctttaattgaggaccgtctggtaggcttaactggcgtgctagccgctggaacagatgatcctgatccggatatcgttgccgacgtcactgtttctttgtccgaaatgtcgttccccgttgagaaagattctagaacgggtttgctactctttaattgctccgctgccttcttagccgcttgccgttgaggaaccaatgagactgcaaagttcgacttggctgagactggggtagcgacgacagatgggggcttgctttgagtatgcgttgggagggcaggcttgtcattttccgtaatagatggcggacgtgcatcctttgggacctttggtggccttccgcgctttccacgttcagcaggtgcgctttcggacgtttttccaacagtcttctgtaagtgttcttttggtcgtactttttcaagacttgatttatccgcttcattcgacacacgagagcttgaatccttcaccttgctctttgcagttcctgaaatggagtttatgtctggctctctgactctgtcggacacatctggctgtagcgtcgtggcgagatttgtggatcgcatgttctcagaagcctttttggctgcctggcgctgtggcaccaccaaaagatctgccggatacaacttggcattcgggttcggtttggtttttgtactgttgccgatactggcagccccttcctttccttcccgcgtgttcttcgctttactagttgaggacgctgcttgggaagtagaggatgttgtggctgctgttcctggcacaaactctttcatagctgcctttgttctaatcgtctgttggttttgtgagtcactaacattactttccacggtggcctgctcctcctggtctttttcttgttcagaggaactgctctcagagtcggagtagatatgctgtcccaagtttctaccaatggccgaaccagtcgtggctagtccggaagtcgttgtgctctcacgctgtcgttcccctcttagaggcaacaattcctcactttcgtcgctcgatacgctctcatcggcatctttatccatttgggcaagtcctcgtgttgtcgtagacaactttcgtcttgcagaggctccagttccctctccaacgtctgcttccgttgtaggttttgacctacttgcctggctcctattaggtactgatttgctttgaattggcccccgtctcgcaccgcgctctggttcttggcggtttctacatcgctcgtcttcaccgtcgctggagctgcttgcagacctggaatccggatacgttgcagacgcacccgcaactgcttcattttgacgtcgctgtcgctgtttttgccgctgctcaacggaccgagcgtagctttgctttttaaggggacttcctgaggaagactttcgcttggagactccgctacccgcgctagagctaccgctttcactacccgaatcacttcctgaggaactatcggagctgctggtaccattcgccgagctggaattacctgatgatatagtgccgcttgacgaatgggaggtcgtgctactgcggatatttgagtggaattgacttttgttgtgggtcgacgtcgccgccgccgcgctgctcttcgaggcacgcctccctgtaggattcttccctggcggagaccgtaccttggatgtagtcgttcccaccttactccctgccacagtcttctcaggcgatgacgtgcgtgaactaagaatgccattattaagcttcttgtttggcgaagctttagcaggctgcttgcgtttgttaggagactgcgaggcacggccacggccctgtttaccactctgcagcttacccataagctgttcaaggatgtatttcaaatcctggtactgcgccggcacagtttgtcctcccacagagctgtagaaacggtcatacaaagtaggtccgtcgttggcgtagattacagcgttcagatccatcacaggttgttgctgctcttgtttggtctgctgcttctccaagcgcatctcatccagaactcccagctgcttgtagaatacctgctcacgtagcttaaagagagagcgcgaaagcttttctcttcgactaaccatatagcagagattacgaactcgctccaaatcctgtcgcaaatgcaccaccaacttatgattttccatgtcctgttgctcctgcttgcgggctatcatctccacatcttcggacttgggcgggataagctcgcgattgtgtcgagactttctcttaagcttccaataattgtatatggcaacaatagcatcgtcgtcgacatcaaatagatggcaactgatgtcattaaagttaacatgcttatcgaactcagcttccacctcctgaaaatcaatgggaaaagttagcaaccgaatgcatgcagaaggcacaacggaaaagaaactactaacctggaggcgctgagctctggcttggttacgttcctcggaggtcagttcggttttacggtgatttttccgcctgcgtggatcctctccagttgtcccgcacgcgttgttgccgtcgtcggctcctccaccagccccactgccgtatctgtttgctttctgcatggcgcttgcgactgaggcactgcctcccccatgactaccagcattttccttcttacccttgctcatactgtgtttctgacaataagagcgcagcttcacgccgtcctcagcattaccttcctctatgattgcacgcatttccaggccatgctgaaacgcgcaagtcacatggtatgctgttttgcagggctttactgagcactggatgcagctgccaactcgctttcggcagagtacacagatcagggaccaacgcgactgaggaatgctagagattttcgtgatgggttccatgcgatccacacacccaatgctgacctcgggtatccacagagcgcaagagacgtgtgcccagtgcttacccgacttgttggatttcatagcgccgcccttatttggacagaggacacagtccggcttaattcccatcgaacaagtgcggcatagccattgtcctgaaacaaaagtttacatgagcacactaacatttccactccactaggtgctgcttacctgatggaattgctgtaatgccataacacgcctggtgcacacagatattgcaattatcacagaataccatttcgttcgcctcctcggagtcgggcgatcggcaaacatcgcagatgacattctcatcgaattcgatgcccaagccttcttccagtttaagtatgacttgaatctgttcccagcaacgaacctagaacgcaaaagtcaatatattggttcagcatggggtctagtgagcttacctctagctcctcaatgacgcgctcaaactgcgtcgcgtttatgggaaaagcaccacattgggcacgatcgctgttgtagagacgcaaccaggcctcgtcaataggatctatatcataggcacatgtgttctccgccaaggcaacaacattcgtcaggtaatgcagatccggcgagtagtgctcgtctttggtaatgcgcagatagcgatttttcgggctgtaaacgagagccgcagttcagtacagaaattcacaagtacgaaaaaaaaatatgctaggtattaacttacagcttaaagtcgtgcgctggagacacaacaggctcgggcagaacatagacgcatggctcaggaagggagtctgggttaacgggcacttgcacacccttttcccattcctgcttccatgggtctgttactattaaatactcgtagttggccaacggctcagagtctggcaatttcattgcgctaatgagatccttgctgcaattaaaatttgaatattattgaatcgtttctaattggtttgctggtctgttaataccggtaaagttcagctggagcttccgttgagcttcgattgtagatgctcgacatcttgatgtccgctacagaccgcgcctgccaggagctactagaactcgccccctgcgacttgcacttgcttgccgactttgccagtttcgttgacttcgatttgctagtgctggtagcgcctgccgcggctcttccttgtcctcctccccccgcttccgcccctggctcttcatgtttgcttttgcacaaaggcagaactggcacacgctccgatcctgtagctggacccgatccagtcacttcagctactgctgccgtagtggctccattaggtggcctacctttgcgccgcttggtgggcggcggctgcggctcaacatccttgcgctgatgctgttgcggcggcggatggtgcgactggtgatgctgctgattaccgcgcttacctctttgtgacatttttcattggtgttgattggatatttgtgtgtttttgcttcgattggtaccttgtcccttgtgtcttgtgcttgttagagaacgggttctttgctgcaagacctagaagtaagaaggcaaaagcagcttcaatacgtatttcacgcgatttatttactaaccaaatttacttactacatgcttaaggccacagttggcgacaccacaccggctgctgctgctgcgctctcctggatgtggtgcggtcgtgattcttggtggtccaccctttgtgccccgtggacatggacgccgctgctgccccagccctaatatccagtagcgacgccactttgcagtcctgtgtgctccgcacttctccacgggcgagttagtccacttccactgccaccttccgcttgctgccttttgttattgttcgttgtttatccacagacttttgcaagtttttctttggcgtttggctcactggtttggattctcgacgagcattcgctagtctggtgggagagaaggcatatgtttgtgggttattcgcttatattaggagcgttcccagtaagtgtccacattttctatgctttccgaaaatacacaaaaaatatagaaaaacgttcaagctgccaataggtgactggtgcaaaacccacaggcgccctcccgctcgcacatagcacgctcgtttaagggcgcgcttactatgcgcgtgagtgcaagcaggaggcaagcaggtggcgttcgtgttgcatccgccagcttatacacggcacccagcatacccctccgacacttcactactcagaagcaatcaaagtttttgcacttttttttacacttttattataacaacttatttgttattgctatccgcaaacctagacagccactctgctcgtcgctagcgcttccgcacgcgacacgcccactcagggcgccactttcgcactgcccattcttgggggagttgggattttgttatatattttacatttgggttttt

SEQ ID NO: 15488 - DNA, 9606 bp, DROSOPHILA
atgtcacaaagaggtaagcgcggtaatcagcagcatcaccagtcgcaccatccgccgccgcaacagcatcagcgcaaggatgttgagccgcagccgccgcccaccaagcggcgcaaaggtaggccacctaatggagccactacggcagcagtagctgaagtgactggatcgggtccagctacaggatcggagcgtgtgccagttctgcctttgtgcaaaagcaaacatgaagagccaggggcggaagcggggggaggaggacaaggaagagccgcggcaggcgctaccagcactagcaaatcgaagtcaacgaaactggcaaagtcggcaagcaagtgcaagtcgcagggggcgagttctagtagctcctggcaggcgcggtctgtagcggacatcaagatgtcgagcatctacaatcgaagctcaacggaagctccagctgaactttaccgcaaggatctcattagcgcaatgaaattgccagactctgagccgttggccaactacgagtatttaatagtaacagacccatggaagcaggaatgggaaaagggtgtgcaagtgcccgttaacccagactcccttcctgagccatgcgtctatgttctgcccgagcctgttgtgtctccagcgcacgactttaagctcccgaaaaatcgctatctgcgcattaccaaagacgagcactactcgccggatctgcattacctgacgaatgttgttgccttggcggagaacacatgtgcctatgatatagatcctattgacgaggcctggttgcgtctctacaacagcgatcgtgcccaatgtggtgcttttcccataaacgcgacgcagtttgagcgcgtcattgaggagctagaggttcgttgctgggaacagattcaagtcatacttaaactggaagaaggcttgggcatcgaattcgatgagaatgtcatctgcgatgtttgccgatcgcccgactccgaggaggcgaacgaaatggtattctgtgataattgcaatatctgtgtgcaccaggcgtgttatggcattacagcaattccatcaggacaatggctatgccgcacttgttcgatgggaattaagccggactgtgtcctctgtccaaataagggcggcgctatgaaatccaacaagtcgggtaagcactgggcacacgtctcttgcgctctgtggatacccgaggtcagcattgggtgtgtggatcgcatggaacccatcacgaaaatctctagcattcctcagtcgcgttggtccctgatctgtgtactctgccgaaagcgagttggcagctgcatccagtgctcaaaacacagtatgagcaagggtaagaaggaaaatgctggtagtcatgggggaggcagtgcctcagtcgcaagcgccatgcagaaagcaaacagatacggcagtggggctggtggaggagccgacgacggcaacaacgcgtgcgggacaactggagaggatccacgcaggcggaaaaatcaccgtaaaaccgaactgacctccgaggaacgtaaccaagccagagctcagcgcctccaggaggtggaagctgagttcgataagcatgttaactttaatgacatcagttgccatctatttgatgtcgacgacgatgctattgttgccatatacaattattggaagcttaagagaaagtctcgacacaatcgcgagcttatcccgcccaagtccgaagatgtggagatgatagcccgcaagcaggagcaacaggacatggaaaatcataagttggtggtgcatttgcgacaggatttggagcgagttcgtaatctctgctatatggttagtcgaagagaaaagctttcgcgctctctctttaagctacgtgagcaggtattctacaagcagctgggagttctggatgagatgcgcttggagaagcagcagaccaaacaagagcagcaacaacctgtgatggatctgaacgctgtaatctacgccaacgacggacctactttgtatgaccgtttctacagctctgtgggaggacaaactgtgccggcgcagtaccaggatttgaaatacatccttgaacagcttatgggtaagctgcagagtggtaaacagggccgtggccgtgcctcgcagtctcctaacaaacgcaagcagcctgctaaagcttcgccaaacaagaagcttaataatggcattcttagttcacgcacgtcatcgcctgagaagactgtggcagggagtaaggtgggaacgactacatccaaggtacggtctccgccagggaagaatcctacagggaggcgtgcctcgaagagcagcgcggcggcggcgacgtcgacccacaacaaaagtcaattccactcaaatatccgcagtagcacgacctcccattcgtcaagcggcactatatcatcaggtaattccagctcggcgaatggtaccagcagctccgatagttcctcaggaagtgattcgggtagtgaaagcggtagctctagcgcgggtagcggagtctccaagcgaaagtcttcctcaggaagtccccttaaaaagcaaagctacgctcggtccgttgagcagcggcaaaaacagcgacagcgacgtcaaaatgaagcagttgcgggtgcgtctgcaacgtatccggattccaggtctgcaagcagctccagcgacggtgaagacgagcgatgtagaaaccgccaagaaccagagcgcggtgcgagacgggggccaattcaaagcaaatcagtacctaataggagccaggcaagtaggtcaaaacctacaacggaagcagacgttggagagggaactggagcctctgcaagacgaaagttgtctacgacaacacgaggacttgcccaaatggataaagatgccgatgagagcgtatcgagcgacgaaagtgaggaattgttgcctctaagaggggaacgacagcgtgagagcacaacgacttccggactagccacgactggttcggccattggtagaaacttgggacagcatatctactccgactctgagagcagttcctctgaacaagaaaaagaccaggaggagcaggccaccgtggaaagtaatgttagtgactcacaaaaccaacagacgattagaacaaaggcagctatgaaagagtttgtgccaggaacagcagccacaacatcctctacttcccaagcagcgtcctcaactagtaaagcgaagaacacgcgggaaggaaaggaaggggctgccagtatcggcaacagtacaaaaaccaaaccgaacccgaatgccaagttgtatccggcagatcttttggtggtgccacagcgccaggcagccaaaaaggcttctgagaacatgcgatccacaaatctcgccacgacgctacagccagatgtgtccgacagagtcagagagccagacataaactccatttcaggaactgcaaagagcaaggtgaaggattcaagctctcgtgtgtcgaatgaagcggataaatcaagtcttgaaaaagtacgaccaaaagaacacttacagaagactgttggaaaaacgtccgaaagcgcacctgctgaacgtggaaagcgcggaaggccaccaaaggtcccaaaggatgcacgtccgccatctattacggaaaatgacaagcctgccctcccaacgcatactcaaagcaagcccccatctgtcgtcgctaccccagtctcagccaagtcgaactttgcagtctcattggttcctcaacggcaagcggctaagaaggcagcggagcaattaaagagtagcaaacccgttctagaatctttctcaacggggaacgacatttcggacaaagaaacagtgacgtcggcaacgatatccggatcaggatcatctgttccagcggctagcacgccagttaagcctaccagacggtcctcaattaaagaagcaccaattactccaaaggaacccttaagtggcagaagaaaatcaaaagaagatttgctggcgacacctataaaaacaactcccctggttaagcgccgcgtagttgtcccaaatctttcaagttctagttctggcgacagtgaaagttccagctcctctagcagctcaggaagtagttccagcagtggcggcagcgactcggacagcgagtctcaggccagcaattcggaaaacccatctagtagggagcctcctgtagcccctgcgaaagtgccatctgattcctctcttgtgccaaaacgttcaccccgcaagtctatggataagccttcagcattaactattgcgccagcatcggtcaatgtattgaacataccgtctacgcggtctcgtcagaactctacaacaaaatcgacaaaggtagcactgcagaaggcagtgcaatcagttgaggatgacgtcaaatgtacgccgaaaacaaatcgtctgcagggctctatggacgaatgtggaaagcaggtccagttggaacaggctaccaaaagagcgactcgcggttccaagtcgcgaccgccctcgcctactgctaaatcgtctccagaaaagacagtatccagatgtaaatctcgagcggaagaatctcctaagaaggttgcaaatttggaacaagaaataagccagagaaaagtagctagcggaaaagggactagttcgttggacaagctgttaaataagaaacagcagcagatgaaccattctgctcaagctacacccccaccaatttcaccaactccacctgcttctgaaacacgtatcgtaaaagatcaatgtgatcttaaacccgatgaggtgtccatccaacagattaacttgggagcagatgcgcaacccgaacccgatctggacccagagtctgcggcagaagctggtgaactaccaatggatattgatgaggagcttaccactgctccaacgcgaacccaactatctgcgagcgcgagtaaactggcagacataatcgatgatgagcgtccaccggcggctccgcttcccgcctcgcccactcctacccctacctctaatgacgagatgtctgacgctggaagtgatctcagcgaacggcggcgtatgcgctggcgatcccgacggagaagaaggagacgtagtcacgagccagacgaggaacacactcatcacacccaacatctcctcaacgagatggaaatggctagggagctggaagaggaacgtaaaaacgagctgcttgcaaatgcgagtaagtactcggcgtctacatcctctccagcagtcactgtgattccgcccgatccgccggaaataattgaactggactcgaattctgcagagcagcaacagcagcatctacatgaccaacccctgccgcctccgcttgttgtacaatcccctgctgcagatgttgtaccaacagttatgcagcaacagctgctgccctcacaacggcctctaatcgagcaactgcctgtcgagcacttacccatcgttgagacaatacttgagatggaggacagtaagtttgctaacaacttcgcgtcaaacttagccagtgtgttaaatcctcccaatcagatgagtctaatcgggtctagtatagacaggagtaagcaaataagtgaggaggatagcatccaagcaacccgaaatctcttagagaaactgcgcaaaacaaagcgcaaggcgcaggatgactgcagtagcaaggaggcggtcgatctattacctccaactccagccatcccatcggtttttccttttcacaatgcggcggacccagaggatatcattcatgcgcaaaaagaacagcagcaccaacagcaacaacagctgcaatcatctcaaacatgtatttatggaaactcatcaggacctaactctgttgcatcattgactatcaaggattctcctatgacagccaacagtggaagctatgcaaacagtctcaccaacactccaaatgctacacccaccaacgcaacaatgaacaatcttgggtatcaagtaaattttccgaactctcagccacctccaacgttaggtctcttcctggaaaaatcaccccaccaaaaaggggcttgtcccctatccagcaacggaggagctaatgtagggcaacctgcacccactcctgactttgtagacttggcagcagcagcggtaaagaacactctcggaagctttcgcggagcagcaaccgttcccacgcaatccggaacgggagtcaatgcgaagatcaacgactacgatgagagcacacgaatgcagtcgccgttcgggggaatgccgtggaacgaaagcgatcttatcgctgagagaagaagcagctcgcctagttcagtgtccgaatccaatgatcctcctcagccacctccagtcgttacggcaacagcaacaacggctcgatccctcgctcagcttgagagctgtaaaaactttttcaacagctatccaagcggtaatgccgggcctggcactgcagcaaacgctacagcgccctttaaccatcctccaatggtgaacggtattgattccataccaatgttcaacaatactaatacgactcagcatcaaccgacgacgccagctcatcaacagcaacagcagagaactccaaacaatcagtacaacggaactatctacccccaactagcgggtatcatgcatccacagacaactcctacagaaccgccttcaagcttatacggcaatgggggagttggaggcgctgtgcagtccactacactacctccaccggctcaggtcaaccagtaccccggaacaccttattccgcgactactttgggtatgatttctgtacaacagcctgcgctttcaacagttcccgttcaaactgcaactacacccaataatccgtttactctgacttcgccgattgatggaaaaatgccgacatatccggctcagcttctaagcagctgtgcagaagcagtcgttgcgtcgatgatgccaccaaccccaccggttacagctacagcaaaggactcgccaagcaagagaacaagcgtcagcggtagtaacttatctaaaaaacagacgcacaaatcgccccaacttccgcaaggaaaatcgccaggaaagtcgcccagacagcctctgcagccaccaacgcctcctgcaccagttcccgtggtggcattgccgccgactaaatatgacccccagacgcacacattacagggaaagccgcgccagcgtgcaccgcgcggtagcggcggctctggagcaccaggcaggggcaggggacgaggaaggggtagaggacgtggaggaggagttaccagtgggatggctatggtactgccaccgccaatgtcagattacgggagcaatactcatatagtcaataatttggtcggaactccctttgagttcaacaacgagtttgacgacatggcaggacctggtgtggagaatctgcaatcgctaagggatcggcgaagaagttttgagcttcgagctccacgagttcaaaacaagccaaccactacaccgacaactgcaacaaccacaaatcctctcctccatccagtgctgccgggacctgtggacatgagaacatacaatctcggatttgaggcaccgcacagtacagcatctcaagaggcctaccagaataatcttctgggtgcgtttgactcgggaaccgccgatcagacactcagcgagttcaacgaggaggacgaacgccagttccagtcggcactgcgagcaactggcactggaacctcgcccagcaaacagcattcaggaccaacggcactagttgcacctccaactggtcccaatcccacacctgcaccaaatcttcttctacattgcacggaagcaaaccaaatggcacccaatgtggctgctacaggtgctgctacgcatttggtcgaaggctcgctggttgaagcatctctagaggccacttcagaggaggtatcgattgactcagacagcacgataccacactccaagacctcgacttcagatgcccgaagtcagattaaacttaagatcaagagcccgatggcctatccagaacactataacgccatgacgaacagcagcagtctgactcttaccagcactctggtgcagtcgtcaaatgtagtgcaaaccaccgtatccacgtcgactgtagtcagtgcgtcatcagccgttagcggcaactctcgtcgcatgcgaaagaaggaacttcttagtctttatgtggtacagaaagataatcacaatgacgatagctcatgcggactgccagccgcatccgacactttgccccttgagaatttgcgaaagtctgaggaggaagacgaactttcaggtggcaacggtacgaaaaggtttaagaagaactctagtagcagggaattgcgtgctcttgatgcgaacttagcccttgtggaggaacaattgctttcaagcggtgcaggagcctgtggaggaggatcatcgggtgacggcagacggcgtagcgcttgtagctcaggtagcaataacgacaacaacgggaagactggagcagctagtagtgcaggtaagaggcgaggacgcagtaagactctcgaaagcagcgaggatgaccaccaggcccctaagctgaagatcaaaatcaggggtttgacggccaacgagacaccttcaggtgtttcaagcgttgacgagggccaaaactacagttatgaaatgacccgaagggcttgtccacctaaaaagcgtttgacaagtaattttagcactcttacactagaggaaatcaagagggactcgatgaattaccgcaagaaagtcatgcaggactttgtcaagggcgaggacagcaacaagagaggggtagttgtcaaagatggcgagtcgctcataatgccccagcctcccacaaaacgacctaagtcttccaagccgaaaaaggagaagaaggaaaagaaacgccaaaaacagcaacagcttatcttaagcagcagtacaaccaccatgaccactacgttaattgagaacacggccagtgcgtcgccaggtgataagcctaagctgatcctacgttttggcaaacgaaaggcggagaccacgacaagaaccgccagtctggagcaacctcctaccttggaggctccagcacccctgcgatttaaaatagcccggaactcatctggcggcggatacataatcggcacgaaggcggaaaaaaaggatgagtctacggcagacaacacgtctccgattacggagctgccacttatatcacctctcagagaggcgtcaccacagggcagactgctcaacagttttacaccgcactcccagaacgctaatacgtcaccagccctgcttggtaaggacacgggtaccccatccccgccatgcttggtgatagactctagcaaaagtgcagacgtgcacgactccacatccctgcccgagagcggggaggctgcgatgggcgtgcagtcgtcccttgtgaatgcgaccacacctttgtgcgtcaacgtgggaaactacgagaatagcaacaactcattgccatcagccagtggcaccggatcggcttccagcaactcctgcaatagcaactcgatcaacaacaacggcagtggaggaggacgcgccagcggggaaggcggcttacttccattgaaaaaagactgtgaggttagatga

SEQ ID NO: 15489 - protein, 3201 aa, DROSOPHILA
MSQRGKRGNQQHHQSHHPPPQQHQRKDVEPQPPPTKRRKGRPPNGATTAAVAEVTGSGPATGSERVPVLPLCKSKHEEPGAEAGGGGQGRAAAGATSTSKSKSTKLAKSASKCKSQGASSSSSWQARSVADIKMSSIYNRSSTEAPAELYRKDLISAMKLPDSEPLANYEYLIVTDPWKQEWEKGVQVPVNPDSLPEPCVYVLPEPVVSPAHDFKLPKNRYLRITKDEHYSPDLHYLTNVVALAENTCAYDIDPIDEAWLRLYNSDRAQCGAFPINATQFERVIEELEVRCWEQIQVILKLEEGLGIEFDENVICDVCRSPDSEEANEMVFCDNCNICVHQACYGITAIPSGQWLCRTCSMGIKPDCVLCPNKGGAMKSNKSGKHWAHVSCALWIPEVSIGCVDRMEPITKISSIPQSRWSLICVLCRKRVGSCIQCSKHSMSKGKKENAGSHGGGSASVASAMQKANRYGSGAGGGADDGNNACGTTGEDPRRRKNHRKTELTSEERNQARAQRLQEVEAEFDKHVNFNDISCHLFDVDDDAIVAIYNYWKLKRKSRHNRELIPPKSEDVEMIARKQEQQDMENHKLVVHLRQDLERVRNLCYMVSRREKLSRSLFKLREQVFYKQLGVLDEMRLEKQQTKQEQQQPVMDLNAVIYANDGPTLYDRFYSSVGGQTVPAQYQDLKYILEQLMGKLQSGKQGRGRASQSPNKRKQPAKASPNKKLNNGILSSRTSSPEKTVAGSKVGTTTSKVRSPPGKNPTGRRASKSSAAAATSTHNKSQFHSNIRSSTTSHSSSGTISSGNSSSANGTSSSDSSSGSDSGSESGSSSAGSGVSKRKSSSGSPLKKQSYARSVEQRQKQRQRRQNEAVAGASATYPDSRSASSSSDGEDERCRNRQEPERGARRGPIQSKSVPNRSQASRSKPTTEADVGEGTGASARRKLSTTTRGLAQMDKDADESVSSDESEELLPLRGERQRESTTTSGLATTGSAIGRNLGQHIYSDSESSSSEQEKDQEEQATVESNVSDSQNQQTIRTKAAMKEFVPGTAATTSSTSQAASSTSKAKNTREGKEGAASIGNSTKTKPNPNAKLYPADLLVVPQRQAAKKASENMRSTNLATTLQPDVSDRVREPDINSISGTAKSKVKDSSSRVSNEADKSSLEKVRPKEHLQKTVGKTSESAPAERGKRGRPPKVPKDARPPSITENDKPALPTHTQSKPPSVVATPVSAKSNFAVSLVPQRQAAKKAAEQLKSSKPVLESFSTGNDISDKETVTSATISGSGSSVPAASTPVKPTRRSSIKEAPITPKEPLSGRRKSKEDLLATPIKTTPLVKRRVVVPNLSSSSSGDSESSSSSSSSGSSSSSGGSDSDSESQASNSENPSSREPPVAPAKVPSDSSLVPKRSPRKSMDKPSALTIAPASVNVLNIPSTRSRQNSTTKSTKVALQKAVQSVEDDVKCTPKTNRLQGSMDECGKQVQLEQATKRATRGSKSRPPSPTAKSSPEKTVSRCKSRAEESPKKVANLEQEISQRKVASGKGTSSLDKLLNKKQQQMNHSAQATPPPISPTPPASETRIVKDQCDLKPDEVSIQQINLGADAQPEPDLDPESAAEAGELPMDIDEELTTAPTRTQLSASASKLADIIDDERPPAAPLPASPTPTPTSNDEMSDAGSDLSERRRMRWRSRRRRRRRSHEPDEEHTHHTQHLLNEMEMARELEEERKNELLANASKYSASTSSPAVTVIPPDPPEIIELDSNSAEQQQQHLHDQPLPPPLVVQSPAADVVPTVMQQQLLPSQRPLIEQLPVEHLPIVETILEMEDSKFANNFASNLASVLNPPNQMSLIGSSIDRSKQISEEDSIQATRNLLEKLRKTKRKAQDDCSSKEAVDLLPPTPAIPSVFPFHNAADPEDIIHAQKEQQHQQQQQLQSSQTCIYGNSSGPNSVASLTIKDSPMTANSGSYANSLTNTPNATPTNATMNNLGYQVNFPNSQPPPTLGLFLEKSPHQKGACPLSSNGGANVGQPAPTPDFVDLAAAAVKNTLGSFRGAATVPTQSGTGVNAKINDYDESTRMQSPFGGMPWNESDLIAERRSSSPSSVSESNDPPQPPPVVTATATTARSLAQLESCKNFFNSYPSGNAGPGTAANATAPFNHPPMVNGIDSIPMFNNTNTTQHQPTTPAHQQQQQRTPNNQYNGTIYPQLAGIMHPQTTPTEPPSSLYGNGGVGGAVQSTTLPPPAQVNQYPGTPYSATTLGMISVQQPALSTVPVQTATTPNNPFTLTSPIDGKMPTYPAQLLSSCAEAVVASMMPPTPPVTATAKDSPSKRTSVSGSNLSKKQTHKSPQLPQGKSPGKSPRQPLQPPTPPAPVPVVALPPTKYDPQTHTLQGKPRQRAPRGSGGSGAPGRGRGRGRGRGRGGGVTSGMAMVLPPPMSDYGSNTHIVNNLVGTPFEFNNEFDDMAGPGVENLQSLRDRRRSFELRAPRVQNKPTTTPTTATTTNPLLHPVLPGPVDMRTYNLGFEAPHSTASQEAYQNNLLGAFDSGTADQTLSEFNEEDERQFQSALRATGTGTSPSKQHSGPTALVAPPTGPNPTPAPNLLLHCTEANQMAPNVAATGAATHLVEGSLVEASLEATSEEVSIDSDSTIPHSKTSTSDARSQIKLKIKSPMAYPEHYNAMTNSSSLTLTSTLVQSSNVVQTTVSTSTVVSASSAVSGNSRRMRKKELLSLYVVQKDNHNDDSSCGLPAASDTLPLENLRKSEEEDELSGGNGTKRFKKNSSSRELRALDANLALVEEQLLSSGAGACGGGSSGDGRRRSACSSGSNNDNNGKTGAASSAGKRRGRSKTLESSEDDHQAPKLKIKIRGLTANETPSGVSSVDEGQNYSYEMTRRACPPKKRLTSNFSTLTLEEIKRDSMNYRKKVMQDFVKGEDSNKRGVVVKDGESLIMPQPPTKRPKSSKPKKEKKEKKRQKQQQLILSSSTTTMTTTLIENTASASPGDKPKLILRFGKRKAETTTRTASLEQPPTLEAPAPLRFKIARNSSGGGYIIGTKAEKKDESTADNTSPITELPLISPLREASPQGRLLNSFTPHSQNANTSPALLGKDTGTPSPPCLVIDSSKSADVHDSTSLPESGEAAMGVQSSLVNATTPLCVNVGNYENSNNSLPSASGTGSASSNSCNSNSINNNGSGGGRASGEGGLLPLKKDCEVR

SEQ ID NO: 15490 - DNA, 6983 bp, DROSOPHILA
tggtgccggcccaaccctatctggttgatttgttgttctggtcgcggcaaagtcaaattaccccgccatgtccgccgcatccattgataatgttcacgtgctagcaaacaacgcgtcgtcgccgacatcggcagatagagatacgtcgactggcgacgccgacgatctttaaaatatatacactacactatatggcatacatgtgtgtaggaatacgtctacggcgacgtctttcgctggcatttgtgcaaatactacaatataatattatgttccaacgtgggcggagcgctctacacgccacggatgcgtgttaggtgctccgtcggtgctccaacaaagacgttggatactttgtatcagttacaggcggcgtgataagtgcgctttcggcacaattagccagacgttttaatttgggaatgccaaggtcgtttgtaggtctgtacttagcactgctgttcgtaggatcccgatcgccaaatcggcggatctggccgcccatatatataaatagcgatggaaagttcttgcccaattgcgcaagtgaaactgacctacctaacccaggccatctcgtgtacgatgacgcagtccgtccgtacttaagtcttctgctccgtctgctctctgtctgcggaatcggccagccagtcagccgatcgagagcacagtcaaatgtgtctaaccctcccctcgcaacaaagatactacatattcatacgccccatggaccggtcgtatccatatgtgattcattcataagccgggtgccctcgaaacgcgtgaggcacttgtgaaatggcctctcttatcaggcggttagttcccgaatcgatttcgatggcgagccgtggaaattcacggaagagcagccttgctggcccgcgttcctatcagcagcactcgccgcataattgaataatctgaatctgccgagcgaagagcgcgaaacaataaaaatatcagatacgctgcccgaccgccgccagttacagaacaaattcgctgcgaacacaacgtgggcgcatctcgcaggtgccaaaaacgaggtagaaagacaaagacaagcaaatgtgcggggggtttttgaaagccacctatatagagatcggtttatagccacataaatatgtacatatatccgtcgggtattttgcttaattttcgatgaaacaatttgtgacacagaataaacttgtataaaaaaaactaatgcttatcgcattcttggataacacttttcaaaataaaatacggcatgtgtaaatagtgttgaaatgagaaaattgttggctgtactgacataattgcctacatttaactatatttatttatggtgaagtgattaaggatgcttgtgaaaattgaattaattctggttaagtgtcaaaaactactgtttgcacaaaaaataagaatgctcgatattccaaaccacttggtactcaaatcaaaactaatttatcccatatgcattaggaaacgacaaaactaaggatattaccgtgatattgcaaaaaaggaaaatcgagaacaagtagctgctgcgcagcacgagagtctatctagcatcttgagatctgccaattcgctaattagccgggccaaaacggggcggatgggtgggagggcgtggcacaacagctgatggcgccgagcacgagccacaacgaagtgcagcaaaagttttctcgagcggaaaaaaagctgcatgcagtgcagttttcgcagagcaacagcaactggcaaaccaaacggacgagactcgctaccagttctcaggtcatcagttccaggcccggaatcgaattcggattcggaatcggatcagatagcatccagagcactaggtgagctcaataaccgatttgccttggccgagtgcggatgcgggtagcggcaaaacgacggcgagtgtcgcggaaaagtgactcaaactctgatgtaatcattttcacatgccattacggccgccgctaaaatcgttccgttcgcattgccattggcatactcattccaattctcgctggtcggaaatcgggcgacttcggcttttctgtgtttcgcattcagtctgttgctgaggcgcaaaggtaaacatggtcacgattctactcgaatcgggttggattggattggatcgaatcaaaacgaaaaacgaatcggttttgagtcactcaaatagtgcgtccagcacgcagctgtgcggattacgttctgttttgtgtccagtattccggatcccaagtttcatatctgtatcattatctggccgccgcagtattgatttaacacacattcggattccgattgaacgatagttggccaaaagctttacgcaaaagctcgcatcagctgtaaaaaagcgcggcagagagccattggatatataagcgagagagagcaaatgagagagagtgcaaaataattcggaacttaatttgctgtttaatgccagattttatggtgtttgtgatatcatcaaattcctagagaccaaagagagatatttgtaaaacaagttttaagttgaagattcgcaactagctgtgtcacgacaatatcaaatagtgctctcaattatggaatccttactacagagctaattattcaacttcgtaacattctattaaagttattttcatacaagtggttttatttttgaaaaaatgtatgtttaataatagtaattgtgcaatatttagggcaatcgtagaacaatatttaaaaacaattttaatctaagaatactgaaaatattctataaataaatatacaattcatgaagacaataattggtatctcaagtgaaaattttccatccttttataaacaaaagaatttgtatcctaccaagtcaggaatttgaatctgtgcattctgtggacatcatccgtgttcgtttttattgcatacttatgagctggggcgcactaaaaataagttaaattgattgcgaatgctttgtacctttgcagcccaatataatactcgatcgtttcaatatagtttcgtgagagatcaccgagatgacctcgcgaatgttcaagttcggcgtaacagccgctagcgcctgtgttggttccgtcctggcctcgtacaccctggatcgctggaacaccccccatgtggtacgcagtccttgaaggtcctctgtatgcacgttaatcactctattccaatcccgtatccaccgactaggttaacaatgccaccgtgccgccgaaaaggaagcgcacgctgcccccgcgagcggatcagatcaaatccctgatgagcggcgaggagttcgacgtgctgatcatcggcggaggagccacgggagctggatgtgctctcgactcggttacaaggggtaagtggcagaggattctttccgcctggaaatgccttttaacaaacgttttgtcctttcttccaataaaaggtcttaagaccgccctggtggagctggatgactttgccagcggaacttcctcgagatccacgaaacttatccatggcggagtgcgatatctgcagaaggccattttgggcgtaagttatcaaactctagaccttcggctagaacatcccccattgtagagtgctaactatcgactgccatcttagctagatctagagcagtaccgcatggtgaaggaggcgctggctgagcgcgccaccatgctcgaatcggcgccccacttgacccaccctctgcccatcatgctgccagtttacacgtaaattgaaacattacatctgctccatatctgggattttgctaaccagataattctgcatccccagatggtggcaggttccttactactgggtgggcatcaaggcctacgatctggtggccggcgatcgcaatgtgaaaagctcgtactacctctccaagaaggatgccctcgaactgttccccatgctcaagaaggacaagctgtgcggcgctatcgtctactatgatggccagcaggatgatgccaggatgtgtctggcggtggcgctgactgccgctcgtcacggtgccactgtgtgcaatcacgtggaggtgaaggagctgctgaagaaggacgacggcactggcaaacaggtgctgtgcggagccaaggtcaaggaccatatctccggcaaggagttcaccgtgaaggccaagtgcattgttaatgccgccggtcccttcacggactccatccgcaagatggacaaccccacggtgaagagcatctgctgccccagttccggagttcatatcgtactgcctggctactatagccccgatcagatgggtctgctggatccctccacttccgacggccgcgtcatcttcttcctgccctggcagaggcagacgattgccggcaccaccgacctgccctgcgaaatcacccacaatccaacgcccaccgaggacgagatccagtttatcctcaacgagatcaagaactatctgaatgcggatgtggaggtgcgccgtggcgatgtgctctccgcatggagcggcatccgccctctggtctccgatcccaacaaggacgacacccagtccctggcccgcaaccacatcgtccacgtcagcccctccaatctcatcaccatcgctggcggcaagtggaccacctacagggccatggccgagcacaccatcgacgcggctatcaagggtgagtccactagttcacttgacttgactaattttatgatggctgtctagtgggccggaaatagataaatttctgtcttactcatttttaattctgataccataagataggaactaagataagttatcagttgacttccttataatcggttgtaaacgtatcatgaccttatccacgtatttgcagcctgcaacttaaagccagagcgcgccgaggcagtcacctcctatctgaagatcgaaggcggccagggctggaccccgaccatgtacatccgtttggtgcaggacttcggacttgagtgcgaggtggcccaacatctggccaagtcgtacggtgaccgcgccttcgccgtgtccaaaatggcttcgttgaccggcaagcgttggcccatcattggtaaccgcatccaccccgagttcccatacatcgatgccgagatccggtacggagtgcgagagtacgcctgtaccgctgtcgatatgatcgcccgtcgcctgcgactggccttcctcaatgtgcaggcagcacaggaggcgctgccagtgatcgttgacatcatgggcgaggagctgggctggtccaaggacgagaaggagcgccagattaagcacgccactgagttcctggccaacgagatgggacactcggtcaaccgcacctccaaggagcgcatacccatcaagctgtccaaggaggagatccagacatacatcaagcgcttccagctgatcgacaaagacaagaagggctacgtttccatcaacgatatccgtcgcgctctcaagagcttcggcgatggcgacgtctctggcgagcagctgcacgaaatcctgcgcgagatcgataccaacatgaacggccaggtggaactggacgaataccttcaggtgagctagggatataagagaatatctcaaaccttgggaaactggaagcattcccaggaccaaaaaatctatttaatggcacatagtaaattttataaaagtgaaagacacataagatgggtttaacaaatcggcaaataagttacacgtacaaattttaaattaatttaaaattccagatgatgtcggccatcaaaacgggcgacgtggcctactcccgatttgcgcgcatggccgagctggaggagcagaagcacgaggcggccaatctgaagcagatcagcgtggaccgatccggaggcggcttgtaagagcaccagcgacttaacaacgacgaccacatcacccggccatcggaggcatggactagacttaagatcgaacgtttaagatcaaacttattttcattttgctgttaataaaactctttcaactcacagatgaccgccaacacttcaggtacgattaagtttcgcctgtttctgctgtgttttttgtttgaggggattcaactccatcttagccatccgcttctcctgtttagtggaatttggaatttctcttgttcatgaagtattgtatttggattaggttgaggatcgaagcttgaggccacttcgtttttaataggtttattttgcttaacatgaatctttaataacaattgttacaatttgtatgtggtgttcttactaaaagagctatgcacattgttttcggtgcagtcattcacatttccattgtctttgcgaaaggtgtactcgcacttcctgaagtggttgtacaaatccgttcgctgggaatcggttaactgggcaaacatgtctagtttggggtcccagaaaaaggggagcttacccttcttcggcgtcaaagctagtgagtccgccaatttgcccaacatctgtaatgatagaacgttagcagtggacatcacaaaatcatcattcacctcgataaatatatcttttggtgaattactccagtaactgggatcctgttgaataacctgccacaggaataacgtcttgatgtggtagctcttcaggttggccttattttttacatttcggttctgcttcatcaggcggatggcgggcttgaggaactgcttgccgtatagtagtctgcgctctgcctcataaaaggacgatgtgaaggatgtgttatcagttttggctggcttcatgggcttcggtatggcatcccagtagagcgtttcaccaaaatgtatcctttgctccggagccaagaccacttgtgctgctgaaagcctaatggccggaacaaagtccacggagtacttgcaagatcccttcacaaagatcgtgtgagcggggccgcactttttgtattgaaggtgcgaaatcctgcctgccacctcgatctgattgcccattttgttgagcgtctgggtcattatgctctctaggaagct

SEQ ID NO: 15491 - DNA, 2405 bp, DROSOPHILA
caaattcgctgcgaacacaacgtgggcgcatctcgcaggtgccaaaaacgagcccaatataatactcgatcgtttcaatatagtttcgtgagagatcaccgagatgacctcgcgaatgttcaagttcggcgtaacagccgctagcgcctgtgttggttccgtcctggcctcgtacaccctggatcgctggaacaccccccatgtggttaacaatgccaccgtgccgccgaaaaggaagcgcacgctgcccccgcgagcggatcagatcaaatccctgatgagcggcgaggagttcgacgtgctgatcatcggcggaggagccacgggagctggatgtgctctcgactcggttacaaggggtcttaagaccgccctggtggagctggatgactttgccagcggaacttcctcgagatccacgaaacttatccatggcggagtgcgatatctgcagaaggccattttgggcctagatctagagcagtaccgcatggtgaaggaggcgctggctgagcgcgccaccatgctcgaatcggcgccccacttgacccaccctctgcccatcatgctgccagtttacacatggtggcaggttccttactactgggtgggcatcaaggcctacgatctggtggccggcgatcgcaatgtgaaaagctcgtactacctctccaagaaggatgccctcgaactgttccccatgctcaagaaggacaagctgtgcggcgctatcgtctactatgatggccagcaggatgatgccaggatgtgtctggcggtggcgctgactgccgctcgtcacggtgccactgtgtgcaatcacgtggaggtgaaggagctgctgaagaaggacgacggcactggcaaacaggtgctgtgcggagccaaggtcaaggaccatatctccggcaaggagttcaccgtgaaggccaagtgcattgttaatgccgccggtcccttcacggactccatccgcaagatggacaaccccacggtgaagagcatctgctgccccagttccggagttcatatcgtactgcctggctactatagccccgatcagatgggtctgctggatccctccacttccgacggccgcgtcatcttcttcctgccctggcagaggcagacgattgccggcaccaccgacctgccctgcgaaatcacccacaatccaacgcccaccgaggacgagatccagtttatcctcaacgagatcaagaactatctgaatgcggatgtggaggtgcgccgtggcgatgtgctctccgcatggagcggcatccgccctctggtctccgatcccaacaaggacgacacccagtccctggcccgcaaccacatcgtccacgtcagcccctccaatctcatcaccatcgctggcggcaagtggaccacctacagggccatggccgagcacaccatcgacgcggctatcaaggcctgcaacttaaagccagagcgcgccgaggcagtcacctcctatctgaagatcgaaggcggccagggctggaccccgaccatgtacatccgtttggtgcaggacttcggacttgagtgcgaggtggcccaacatctggccaagtcgtacggtgaccgcgccttcgccgtgtccaaaatggcttcgttgaccggcaagcgttggcccatcattggtaaccgcatccaccccgagttcccatacatcgatgccgagatccggtacggagtgcgagagtacgcctgtaccgctgtcgatatgatcgcccgtcgcctgcgactggccttcctcaatgtgcaggcagcacaggaggcgctgccagtgatcgttgacatcatgggcgaggagctgggctggtccaaggacgagaaggagcgccagattaagcacgccactgagttcctggccaacgagatgggacactcggtcaaccgcacctccaaggagcgcatacccatcaagctgtccaaggaggagatccagacatacatcaagcgcttccagctgatcgacaaagacaagaagggctacgtttccatcaacgatatccgtcgcgctctcaagagcttcggcgatggcgacgtctctggcgagcagctgcacgaaatcctgcgcgagatcgataccaacatgaacggccaggtggaactggacgaataccttcagatgatgtcggccatcaaaacgggcgacgtggcctactcccgatttgcgcgcatggccgagctggaggagcagaagcacgaggcggccaatctgaagcagatcagcgtggaccgatccggaggcggcttgtaagagcaccagcgacttaacaacgacgaccacatcacccggccatcggaggcatggactagacttaagatcgaacgtttaagatcaaacttattttcattttgctgttaataaaactctttcaactcac

SEQ ID NO: 15492 - protein, 724 aa, DROSOPHILA
MTSRMFKFGVTAASACVGSVLASYTLDRWNTPHVVNNATVPPKRKRTLPPRADQIKSLMSGEEFDVLIIGGGATGAGCALDSVTRGLKTALVELDDFASGTSSRSTKLIHGGVRYLQKAILGLDLEQYRMVKEALAERATMLESAPHLTHPLPIMLPVYTWWQVPYYWVGIKAYDLVAGDRNVKSSYYLSKKDALELFPMLKKDKLCGAIVYYDGQQDDARMCLAVALTAARHGATVCNHVEVKELLKKDDGTGKQVLCGAKVKDHISGKEFTVKAKCIVNAAGPFTDSIRKMDNPTVKSICCPSSGVHIVLPGYYSPDQMGLLDPSTSDGRVIFFLPWQRQTIAGTTDLPCEITHNPTPTEDEIQFILNEIKNYLNADVEVRRGDVLSAWSGIRPLVSDPNKDDTQSLARNHIVHVSPSNLITIAGGKWTTYRAMAEHTIDAAIKACNLKPERAEAVTSYLKIEGGQGWTPTMYIRLVQDFGLECEVAQHLAKSYGDRAFAVSKMASLTGKRWPIIGNRIHPEFPYIDAEIRYGVREYACTAVDMIARRLRLAFLNVQAAQEALPVIVDIMGEELGWSKDEKERQIKHATEFLANEMGHSVNRTSKERIPIKLSKEEIQTYIKRFQLIDKDKKGYVSINDIRRALKSFGDGDVSGEQLHEILREIDTNMNGQVELDEYLQMMSAIKTGDVAYSRFARMAELEEQKHEAANLKQISVDRSGGGL

SEQ ID NO: 15493 - DNA, 6235 bp, DROSOPHILA
atgtgattcattcataagccgggtgccctcgaaacgcgtgaggcacttgtgaaatggcctctcttatcaggcggttagttcccgaatcgatttcgatggcgagccgtggaaattcacggaagagcagccttgctggcccgcgttcctatcagcagcactcgccgcataattgaataatctgaatctgccgagcgaagagcgcgaaacaataaaaatatcagatacgctgcccgaccgccgccagttacagaacaaattcgctgcgaacacaacgtgggcgcatctcgcaggtgccaaaaacgaggtagaaagacaaagacaagcaaatgtgcggggggtttttgaaagccacctatatagagatcggtttatagccacataaatatgtacatatatccgtcgggtattttgcttaattttcgatgaaacaatttgtgacacagaataaacttgtataaaaaaaactaatgcttatcgcattcttggataacacttttcaaaataaaatacggcatgtgtaaatagtgttgaaatgagaaaattgttggctgtactgacataattgcctacatttaactatatttatttatggtgaagtgattaaggatgcttgtgaaaattgaattaattctggttaagtgtcaaaaactactgtttgcacaaaaaataagaatgctcgatattccaaaccacttggtactcaaatcaaaactaatttatcccatatgcattaggaaacgacaaaactaaggatattaccgtgatattgcaaaaaaggaaaatcgagaacaagtagctgctgcgcagcacgagagtctatctagcatcttgagatctgccaattcgctaattagccgggccaaaacggggcggatgggtgggagggcgtggcacaacagctgatggcgccgagcacgagccacaacgaagtgcagcaaaagttttctcgagcggaaaaaaagctgcatgcagtgcagttttcgcagagcaacagcaactggcaaaccaaacggacgagactcgctaccagttctcaggtcatcagttccaggcccggaatcgaattcggattcggaatcggatcagatagcatccagagcactaggtgagctcaataaccgatttgccttggccgagtgcggatgcgggtagcggcaaaacgacggcgagtgtcgcggaaaagtgactcaaactctgatgtaatcattttcacatgccattacggccgccgctaaaatcgttccgttcgcattgccattggcatactcattccaattctcgctggtcggaaatcgggcgacttcggcttttctgtgtttcgcattcagtctgttgctgaggcgcaaaggtaaacatggtcacgattctactcgaatcgggttggattggattggatcgaatcaaaacgaaaaacgaatcggttttgagtcactcaaatagtgcgtccagcacgcagctgtgcggattacgttctgttttgtgtccagtattccggatcccaagtttcatatctgtatcattatctggccgccgcagtattgatttaacacacattcggattccgattgaacgatagttggccaaaagctttacgcaaaagctcgcatcagctgtaaaaaagcgcggcagagagccattggatatataagcgagagagagcaaatgagagagagtgcaaaataattcggaacttaatttgctgtttaatgccagattttatggtgtttgtgatatcatcaaattcctagagaccaaagagagatatttgtaaaacaagttttaagttgaagattcgcaactagctgtgtcacgacaatatcaaatagtgctctcaattatggaatccttactacagagctaattattcaacttcgtaacattctattaaagttattttcatacaagtggttttatttttgaaaaaatgtatgtttaataatagtaattgtgcaatatttagggcaatcgtagaacaatatttaaaaacaattttaatctaagaatactgaaaatattctataaataaatatacaattcatgaagacaataattggtatctcaagtgaaaattttccatccttttataaacaaaagaatttgtatcctaccaagtcaggaatttgaatctgtgcattctgtggacatcatccgtgttcgtttttattgcatacttatgagctggggcgcactaaaaataagttaaattgattgcgaatgctttgtacctttgcagcccaatataatactcgatcgtttcaatatagtttcgtgagagatcaccgagatgacctcgcgaatgttcaagttcggcgtaacagccgctagcgcctgtgttggttccgtcctggcctcgtacaccctggatcgctggaacaccccccatgtggtacgcagtccttgaaggtcctctgtatgcacgttaatcactctattccaatcccgtatccaccgactaggttaacaatgccaccgtgccgccgaaaaggaagcgcacgctgcccccgcgagcggatcagatcaaatccctgatgagcggcgaggagttcgacgtgctgatcatcggcggaggagccacgggagctggatgtgctctcgactcggttacaaggggtaagtggcagaggattctttccgcctggaaatgccttttaacaaacgttttgtcctttcttccaataaaaggtcttaagaccgccctggtggagctggatgactttgccagcggaacttcctcgagatccacgaaacttatccatggcggagtgcgatatctgcagaaggccattttgggcgtaagttatcaaactctagaccttcggctagaacatcccccattgtagagtgctaactatcgactgccatcttagctagatctagagcagtaccgcatggtgaaggaggcgctggctgagcgcgccaccatgctcgaatcggcgccccacttgacccaccctctgcccatcatgctgccagtttacacgtaaattgaaacattacatctgctccatatctgggattttgctaaccagataattctgcatccccagatggtggcaggttccttactactgggtgggcatcaaggcctacgatctggtggccggcgatcgcaatgtgaaaagctcgtactacctctccaagaaggatgccctcgaactgttccccatgctcaagaaggacaagctgtgcggcgctatcgtctactatgatggccagcaggatgatgccaggatgtgtctggcggtggcgctgactgccgctcgtcacggtgccactgtgtgcaatcacgtggaggtgaaggagctgctgaagaaggacgacggcactggcaaacaggtgctgtgcggagccaaggtcaaggaccatatctccggcaaggagttcaccgtgaaggccaagtgcattgttaatgccgccggtcccttcacggactccatccgcaagatggacaaccccacggtgaagagcatctgctgccccagttccggagttcatatcgtactgcctggctactatagccccgatcagatgggtctgctggatccctccacttccgacggccgcgtcatcttcttcctgccctggcagaggcagacgattgccggcaccaccgacctgccctgcgaaatcacccacaatccaacgcccaccgaggacgagatccagtttatcctcaacgagatcaagaactatctgaatgcggatgtggaggtgcgccgtggcgatgtgctctccgcatggagcggcatccgccctctggtctccgatcccaacaaggacgacacccagtccctggcccgcaaccacatcgtccacgtcagcccctccaatctcatcaccatcgctggcggcaagtggaccacctacagggccatggccgagcacaccatcgacgcggctatcaagggtgagtccactagttcacttgacttgactaattttatgatggctgtctagtgggccggaaatagataaatttctgtcttactcatttttaattctgataccataagataggaactaagataagttatcagttgacttccttataatcggttgtaaacgtatcatgaccttatccacgtatttgcagcctgcaacttaaagccagagcgcgccgaggcagtcacctcctatctgaagatcgaaggcggccagggctggaccccgaccatgtacatccgtttggtgcaggacttcggacttgagtgcgaggtggcccaacatctggccaagtcgtacggtgaccgcgccttcgccgtgtccaaaatggcttcgttgaccggcaagcgttggcccatcattggtaaccgcatccaccccgagttcccatacatcgatgccgagatccggtacggagtgcgagagtacgcctgtaccgctgtcgatatgatcgcccgtcgcctgcgactggccttcctcaatgtgcaggcagcacaggaggcgctgccagtgatcgttgacatcatgggcgaggagctgggctggtccaaggacgagaaggagcgccagattaagcacgccactgagttcctggccaacgagatgggacactcggtcaaccgcacctccaaggagcgcatacccatcaagctgtccaaggaggagatccagacatacatcaagcgcttccagctgatcgacaaagacaagaagggctacgtttccatcaacgatatccgtcgcgctctcaagagcttcggcgatggcgacgtctctggcgagcagctgcacgaaatcctgcgcgagatcgataccaacatgaacggccaggtggaactggacgaataccttcaggtgagctagggatataagagaatatctcaaaccttgggaaactggaagcattcccaggaccaaaaaatctatttaatggcacatagtaaattttataaaagtgaaagacacataagatgggtttaacaaatcggcaaataagttacacgtacaaattttaaattaatttaaaattccagatgatgtcggccatcaaaacgggcgacgtggcctactcccgatttgcgcgcatggccgagctggaggagcagaagcacgaggcggccaatctgaagcagatcagcgtggaccgatccggaggcggcttgtaagagcaccagcgacttaacaacgacgaccacatcacccggccatcggaggcatggactagacttaagatcgaacgtttaagatcaaacttattttcattttgctgttaataaaactctttcaactcacagatgaccgccaacacttcaggtacgattaagtttcgcctgtttctgctgtgttttttgtttgaggggattcaactccatcttagccatccgcttctcctgtttagtggaatttggaatttctcttgttcatgaagtattgtatttggattaggttgaggatcgaagcttgaggccacttcgtttttaataggtttattttgcttaacatgaatctttaataacaattgttacaatttgtatgtggtgttcttactaaaagagctatgcacattgttttcggtgcagtcattcacatttccattgtctttgcgaaaggtgtactcgcacttcctgaagtggttgtacaaatccgttcgctgggaatcggttaactgggcaaacatgtctagtttggggtcccagaaaaaggggagcttacccttcttcggcgtcaaagctagtgagtccgccaatttgcccaacatctgtaatgatagaacgttagcagtggacatcacaaaatcatcattcacctcgataaatatatcttttggtgaattactccagtaactgggatcctgttgaataacctgccacaggaataacgtcttgatgtggtagctcttcaggttggccttattttttacatttcggttctgcttcatcaggcggatggcgggcttgaggaactgcttgccgtatagtagtctgcgctctgcctcataaaaggacgatgtgaaggatgtgttatcagttttggctggcttcatgggcttcggtatggcatcccagtagagcgtttcaccaaaatgtatcctttgctccggagccaagaccacttgtgctgctgaaagcctaatggccggaacaaagtccacggagtacttgcaagatcccttcacaaagatcgtgtgagcggggccgcactttttgtattgaaggtgcgaaatcctgcctgccacctcgatctgattgcccattttgttgagcgtctgggtcattatgctctctaggaagct

SEQ ID NO: 15494 - DNA, 2458 bp, DROSOPHILA
gcaaaccaaacggacgagactcgctaccagttctcaggtcatcagttccaggcccggaatcgaattcggattcggaatcggatcagatagcatccagagcactagcccaatataatactcgatcgtttcaatatagtttcgtgagagatcaccgagatgacctcgcgaatgttcaagttcggcgtaacagccgctagcgcctgtgttggttccgtcctggcctcgtacaccctggatcgctggaacaccccccatgtggttaacaatgccaccgtgccgccgaaaaggaagcgcacgctgcccccgcgagcggatcagatcaaatccctgatgagcggcgaggagttcgacgtgctgatcatcggcggaggagccacgggagctggatgtgctctcgactcggttacaaggggtcttaagaccgccctggtggagctggatgactttgccagcggaacttcctcgagatccacgaaacttatccatggcggagtgcgatatctgcagaaggccattttgggcctagatctagagcagtaccgcatggtgaaggaggcgctggctgagcgcgccaccatgctcgaatcggcgccccacttgacccaccctctgcccatcatgctgccagtttacacatggtggcaggttccttactactgggtgggcatcaaggcctacgatctggtggccggcgatcgcaatgtgaaaagctcgtactacctctccaagaaggatgccctcgaactgttccccatgctcaagaaggacaagctgtgcggcgctatcgtctactatgatggccagcaggatgatgccaggatgtgtctggcggtggcgctgactgccgctcgtcacggtgccactgtgtgcaatcacgtggaggtgaaggagctgctgaagaaggacgacggcactggcaaacaggtgctgtgcggagccaaggtcaaggaccatatctccggcaaggagttcaccgtgaaggccaagtgcattgttaatgccgccggtcccttcacggactccatccgcaagatggacaaccccacggtgaagagcatctgctgccccagttccggagttcatatcgtactgcctggctactatagccccgatcagatgggtctgctggatccctccacttccgacggccgcgtcatcttcttcctgccctggcagaggcagacgattgccggcaccaccgacctgccctgcgaaatcacccacaatccaacgcccaccgaggacgagatccagtttatcctcaacgagatcaagaactatctgaatgcggatgtggaggtgcgccgtggcgatgtgctctccgcatggagcggcatccgccctctggtctccgatcccaacaaggacgacacccagtccctggcccgcaaccacatcgtccacgtcagcccctccaatctcatcaccatcgctggcggcaagtggaccacctacagggccatggccgagcacaccatcgacgcggctatcaaggcctgcaacttaaagccagagcgcgccgaggcagtcacctcctatctgaagatcgaaggcggccagggctggaccccgaccatgtacatccgtttggtgcaggacttcggacttgagtgcgaggtggcccaacatctggccaagtcgtacggtgaccgcgccttcgccgtgtccaaaatggcttcgttgaccggcaagcgttggcccatcattggtaaccgcatccaccccgagttcccatacatcgatgccgagatccggtacggagtgcgagagtacgcctgtaccgctgtcgatatgatcgcccgtcgcctgcgactggccttcctcaatgtgcaggcagcacaggaggcgctgccagtgatcgttgacatcatgggcgaggagctgggctggtccaaggacgagaaggagcgccagattaagcacgccactgagttcctggccaacgagatgggacactcggtcaaccgcacctccaaggagcgcatacccatcaagctgtccaaggaggagatccagacatacatcaagcgcttccagctgatcgacaaagacaagaagggctacgtttccatcaacgatatccgtcgcgctctcaagagcttcggcgatggcgacgtctctggcgagcagctgcacgaaatcctgcgcgagatcgataccaacatgaacggccaggtggaactggacgaataccttcagatgatgtcggccatcaaaacgggcgacgtggcctactcccgatttgcgcgcatggccgagctggaggagcagaagcacgaggcggccaatctgaagcagatcagcgtggaccgatccggaggcggcttgtaagagcaccagcgacttaacaacgacgaccacatcacccggccatcggaggcatggactagacttaagatcgaacgtttaagatcaaacttattttcattttgctgttaataaaactctttcaactcac

SEQ ID NO: 15495 - protein, 724 aa, DROSOPHILA; identical to SEQ ID NO: 15492

SEQ ID NO: 15496 - DNA, 5429 bp, DROSOPHILA
cccaccgccgccaccaccaccgcctccattgctgagcaccgccgaagcaggaggagccgaaggctgcggttgctggtgctgggaggaggatgttgaggctgccactgttgccaccgatgctaaagaggaggaggaggatgtggaggcggcggcgatcgaggagcacgagctgctaggcaggctgagggtgggcgtgccgccggcatagagatcgttctgcacggccatcaagctgggcgtggtgctccgtcgtcccaaacgtggcgatgtgtgcggactgtgcttctcagccgccaccgtggacgaggtgctgagtgcgtgcagcgaagacgtggctatgttgaagtcgccaatgtcctaaacatatccagaacagaatagaaacagattaaaggtctacttgcagttcagtgaacacaccaggcatggaataatgaaacttgaaatgttttcgttcgaatctgagggaaaacgatcttttaaaagtattttttctttttctattattccatgtgtaaatttccaactgaacaatgtggtccacttaagcaaattgtttgctgatcatagagcatgccgctggctggaggaaattggcatgcacatcaaacagaaaatctgaggaaaacaagagtcactagtaaaaacaaagctaaataaataagagaacatataaatcaatacaaaccaatatttaaatattcatattatgcatatattttgttttgattcagttgtttttgttttgtttttgttgttgtgtggttgttttgtttttagccgtaaacttattaaggaaatcaaaaactaatcgctaaatgtataaaaattgcattagatgtattatataaataatcgttatcgttattgtgtacattaatgcgatctgatttattattatattaaattaacgaaatgagccgaaagatgtgttcgatctaaaatttttatgctaatacttttcgttcgtatttttgatagccacgagcgctatgaattctggccttgtgacacaggaaatcaataattaatttacatacaatctaactaaattatcgatcgattcgaggcctcctatgtttagcctgatttcttaaactttttcgatttttttttttgttaataataaattacagtcttagggcagcgcgttggctgcttacaaataaaattgaattgatatggggggaagtaaacgcacgctactacaaactaaatgtatctttggaagtattaaacaataaactaaaatgaaataaacacataacggagtacaatgattaagagaatgattctagagtagggatagatacaaaaatactgcggcatacataatcaagggataatcaagctggatgtgaaagagaaaattcaacgaataatacagaacaggttacaattataaattccatagtgcctatgtacaaaagtgcaatcgagggcgaatcgaatcgattaaaatatgattcataaacagaggcgaacgtgatcaatagatagagagagcgtgagagtggaagaacgaacaactaaacgaacgcacacaaaccaaaccaaaccaaaccggcggagagaaaacagaggaagcgatagccaacgatggttgatgagcgacttccggtcaaagaactttaactacgttatgcatgtgctcgatggatggacaatggttatggttgtacttgtgcttgtgattgggcgtgtgtgcgttggtctgtggatgttagttgcatgagtttggctaataatttaaatatgttacagctaaacaaacaaaattaaactcgaaactgccactgcgaactgcaggctaaacattaaacttatataaacaatagcagttgtaaaatctaaaatatataatgtatatataggcatatataactgtataaacgaaccaaaggtaatcataagagtaatatgtatataaatagcagcacaggcggcagcggagcaggcggatcaggctgatcaggctgtgaacaaaactatacctcagtgtcgtcttcttcctgctgctgctgtcgcccattggtgacgttccggttgtgttgcttgcgcggatcgaaagcgtccacaacgatttgttcggtgcccttgatttcggcccgacagaaggggcagccctgaaagaaatccatagttaagttgatgtgcttttaatacggcattaactccgctcacctgtccctcggaatccacttgccaggaggtaaggcagggagtgcacaacaagtggccacagggctcgatgcggatatctttgtcgttctccgcacagattttgcacagctgaaaggtgctgcctataatgccaaataaatacttgttagtaaaaacacaataatattgggataagacaatagcttacccatttcacagtatagttcgtattgctcttgggtaacggttatgtggtcctctgtgggactttgaacggcagacgacagatccggattgtacgcttggccatctgggtacaagtagaagccctctctgaaaatcaaacataatgatcagttacgaatacactcttaaaatacactaaaggacattaggttctagtactaatactatctctcaccgatggccatcgagcagcgcctggcacagcgacttgttctgagggattgtctgcagaatctctccctcggcagttacgtagccgatggcccattggcccaatcgcgtgcaggagagccggaaaacgtagctgcccgccttgaggatgtagcgctgtaggcgagccttcacctcgtcgtatgtgagaaacgccacgtagcccggatgtgtgacggccagaatctgccagttgcgtagcagggtcacccaaggctggaagaggcgtgtgaagacgtcgaactcgaagttggaaatgaagtcgttgcaggtaagatcgatagtggtctttagggccatggcctccaggccggagattatgggatgtactttgttaagctcctgccggaagattttccagggaaccaatgtgctgcaataggaaggcaaaaatgtcagtatgtgctattattttgctttggcacaaatatattctttgttagaatgcggagttataaagtttatttaggggaattcgaatgtaacacaaaaagaccttcttataaattacttgggaagggagttcacaatcatatatgtttgaacagcttggaaacccgagaagaaaactcaaaatatataatgtgtggtctttgttaacaacatatgtgatatccattttgtagaattgtccttttaaattgaaaatatgcgcataaacatttgtaccctggggtagctgcgctaagaccgaaccggttgaaactggtttgattcagacacgaaattggatattcagagttataattctagtaatattatccatatcaaatcacaatgaatgaattgaattataacacttggttttgaaaccgcactttaaattcatttagttaccaataataccaattagacttggcattgttatggtcacgatatttcactgtccaataggtttccaataggcgccactcacctgttaccgaagttgctcttccaaaagtcagccgcatccgctttggtgatccgaaattgatccccggcaaagacaccgttggggaatatggccttcagttcgctgagcatgtgggagaagaccaggctgagcttggtgagattgcggcggtagtgggagttctcgtcgaacatcttctccttgccctccttgaacaacttgatggcctgcttgcactttcgcatcaggttgttgatgaacacgttgaagtgctcgttggcatggagcaggtgcatctggtcctcgttctttgagtagatcaatctcaggcgctggtacgtatccggcaggatgtccaaaataaacggtggactattcttaagattcatcttcggctgctggcacagtttgaccaccttgtccatcaacttccaggtcttctccagcgtcttcttgtcggtggacagacgctgcgagacgcaggcttccgagatagcgccgtgcagcttggaaagcagcgatgggaaaatctttggctgcgattgcacacgggttccactgcctctcgtcgccatcttttctctctgccgctgcgctgccgactgcgctgcctctgcttcctcttctcagctcttctccttcttgctgctgttgttgttgttgctggtgctgttctcgttgttgttgttgttggtgttgctggtggtgcccgtgtgtagtagtagtggtgacttaagtacgattttcccccacaagctaaccaaacgcgatctatccgattgggtgcccgatcctcacggctttatccttgcacctggcgtgtgcatttggggctacgcgtttcggcgacgtttgcgttttttaaacccacacaatattttcgactttttcaatgaaatctcggtatgaccgcggccgcaacgccagtaaataccaaacgagctcgcacggctggtcacactgatcgaagggttgcatttcgctgtgacgtcatcgttgacccatgtaaaatgccgttacaaaatggcgagcttttgaaaaaattcgttacaaatttattaaattaaataaactaatttttaaaataatttgaatattcattttgggaatatgtttagaaataatagacttacagaatataatctattggtaacgattttctttttcacagttttcctcctcgaaaggaagtattttaaattgttattacacaatggaagttgctgcttgtttaatgaaattgtgttaaatatatataggaaatgcttttaatctactttttgtaggaaacctttcatgaaaatatgtggaatctcacgttttataaattaaatatagtacaatacataggaaggcactatttcttgtatcatatacatcaacttaattttaagtcttagatgatcgatcaactatcgccttaaatgcgacttgtgttggaaattgatgcgccatacaaagtatttctttccttttgaggatatactttgtatgtacgtatttttcctgcagaggcgcgaactctccccttgccatataatttccgccgtttatcggccgatccagcatgccgggcattatttatataatactcgcactggttttggttggcgatcgggaaaaaaaaaaaaacagtgattagatggaaagaaaacccgcagaactggtgcgtggctttggccttctatcgtttattatggccatcttttcgcacacaaacggctgtttctatctttctattttttaatatgcactgccactgcagccgcaattttcactttccatttttattggcaaccgcaggcgagcgccgtcaaatatttggccaaaaaagaaactgcacggctgccaaaaggtttttacgtctccgcgccagcctggctttcttttaattaaattttgctcttctgttttc

SEQ ID NO: 15497 - DNA, 2675 bp, DROSOPHILA
ccgcggtcataccgagatttcattgaaaaagtcgaaaatattgtgtgggtttaaaaaacgcaaacgtcgccgaaacgcgtagccccaaatgcacacgccaggtgcaaggataaagccgtgaggatcgggcacccaatcggatagatcgcgtttggttagcttgtgggggaaaatcgtacttaagtcaccactactactacacacgggcaccaccagcaacaccaacaacaacaacaacgagaacagcaccagcaacaacaacaacagcagcaagaaggagaagagctgagaagaggaagcagaggcagcgcagtcggcagcgcagcggcagagagaaaagatggcgacgagaggcagtggaacccgtgtgcaatcgcagccaaagattttcccatcgctgctttccaagctgcacggcgctatctcggaagcctgcgtctcgcagcgtctgtccaccgacaagaagacgctggagaagacctggaagttgatggacaaggtggtcaaactgtgccagcagccgaagatgaatcttaagaatagtccaccgtttattttggacatcctgccggatacgtaccagcgcctgagattgatctactcaaagaacgaggaccagatgcacctgctccatgccaacgagcacttcaacgtgttcatcaacaacctgatgcgaaagtgcaagcaggccatcaagttgttcaaggagggcaaggagaagatgttcgacgagaactcccactaccgccgcaatctcaccaagctcagcctggtcttctcccacatgctcagcgaactgaaggccatattccccaacggtgtctttgccggggatcaatttcggatcaccaaagcggatgcggctgacttttggaagagcaacttcggtaacagcacattggttccctggaaaatcttccggcaggagcttaacaaagtacatcccataatctccggcctggaggccatggccctaaagaccactatcgatcttacctgcaacgacttcatttccaacttcgagttcgacgtcttcacacgcctcttccagccttgggtgaccctgctacgcaactggcagattctggccgtcacacatccgggctacgtggcgtttctcacatacgacgaggtgaaggctcgcctacagcgctacatcctcaaggcgggcagctacgttttccggctctcctgcacgcgattgggccaatgggccatcggctacgtaactgccgagggagagattctgcagacaatccctcagaacaagtcgctgtgccaggcgctgctcgatggccatcgagagggcttctacttgtacccagatggccaagcgtacaatccggatctgtcgtctgccgttcaaagtcccacagaggaccacataaccgttacccaagagcaatacgaactatactgtgaaatgggcagcacctttcagctgtgcaaaatctgtgcggagaacgacaaagatatccgcatcgagccctgtggccacttgttgtgcactccctgccttacctcctggcaagtggattccgagggacagggctgccccttctgtcgggccgaaatcaagggcaccgaacaaatcgttgtggacgctttcgatccgcgcaagcaacacaaccggaacgtcaccaatgggcgacagcagcagcaggaagaagacgacactgaggtatagttttgttcacagcctgatcagcctgatccgcctgctccgctgccgcctgtgctgctatttatatacatattactcttatgattacctttggttcgtttatacagttatatatgcctatatatacattatatattttagattttacaactgctattgtttatataagtttaatgtttagcctgcagttcgcagtggcagtttcgagtttaattttgtttgtttagctgtaacatatttaaattattagccaaactcatgcaactaacatccacagaccaacgcacacacgcccaatcacaagcacaagtacaaccataaccattgtccatccatcgagcacatgcataacgtagttaaagttctttgaccggaagtcgctcatcaaccatcgttggctatcgcttcctctgttttctctccgccggtttggtttggtttggtttgtgtgcgttcgtttagttgttcgttcttccactctcacgctctctctatctattgatcacgttcgcctctgtttatgaatcatattttaatcgattcgattcgccctcgattgcacttttgtacataggcactatggaatttataattgtaacctgttctgtattattcgttgaattttctctttcacatccagcttgattatcccttgattatgtatgccgcagtatttttgtatctatccctactctagaatcattctcttaatcattgtactccgttatgtgtttatttcattttagtttattgtttaatacttccaaagatacatttagtttgtagtagcgtgcgtttacttccccccatatcaattcaattttatttgtaagcagccaacgcgctgccctaagactgtaatttattattaacaaaaaaaaaaatcgaaaaagtttaagaaatcaggctaaacataggaggcctcgaatcgatcgataatttagttagattgtatgtaaattaattattgatttcctgtgtcacaaggcca

SEQ ID NO: 15498 - protein, 448 aa, DROSOPHILA
MATRGSGTRVQSQPKIFPSLLSKLHGAISEACVSQRLSTDKKTLEKTWKLMDKVVKLCQQPKMNLKNSPPFILDILPDTYQRLRLIYSKNEDQMHLLHANEHFNVFINNLMRKCKQAIKLFKEGKEKMFDENSHYRRNLTKLSLVFSHMLSELKAIFPNGVFAGDQFRITKADAADFWKSNFGNSTLVPWKIFRQELNKVHPIISGLEAMALKTTIDLTCNDFISNFEFDVFTRLFQPWVTLLRNWQILAVTHPGYVAFLTYDEVKARLQRYILKAGSYVFRLSCTRLGQWAIGYVTAEGEILQTIPQNKSLCQALLDGHREGFYLYPDGQAYNPDLSSAVQSPTEDHITVTQEQYELYCEMGSTFQLCKICAENDKDIRIEPCGHLLCTPCLTSWQVDSEGQGCPFCRAEIKGTEQIVVDAFDPRKQHNRNVTNGRQQQQEEDDTEV

SEQ ID NO: 15499 - DNA, 2623 bp, DROSOPHILA
tccggcgagaatagatggtgagtgagtagttttgtatgcaacaaaatgactaaccagtacagtgggtaattacagaattagaaagatccctggaacgcaccctcattggccagcacatcgtgaggcagcatatcgtccccgcactgaaggcgcacatcgcttcgggcaataagtcacggaaaccgctggtcatcagctttcacggccagcccggtacgggcaagaattttgtggctgagcaaattgcagatgctatgtatttgaagggctccaggtcgaactatgtaaccaagtatctcggacaagctgactttcccaaggaaagtgaggtgtctaactatagggtgaaaatcaataatgcggtgcgcgataccttgcgtagctgcccgagatctttgttcatcttcgacgaggtggataaaatgcccagcggagtattcgaccagctcacctcgctggtggactacaacgcctttgtcgatggcacggataacacaaaggcaatcttcatctttctctcgaacacggcgggcagtcatatagccagtcatctgggtagtgtgatgaagaatggtaggctgcgcgaggacacacgactgagtgactttgagccccttttgcggaaggccgcctataacatggatggcggtatgaaaaagaccaccatgattgagtctcatgttatcgatcatttcattccgttcctgccgatggagaaggcgcatgtgatcaagtgcctggaggcggagcttttaaggtggcggcgcgatcctaagcaagcgaacaaccaaaaaatcattgaggacataataaactcctccattagttacgatcgcacgcacagcttgttcgccatttcgggctgcaagacgctggagaagaaggtggccatggccatttactgagaaaggaccgaccgactccacattttaatgcttagtttgggtttcggtttgtatttaaaaaactattttttcggaataaagaaaacaaattttaactaccagggatttagccacttgaggcgggcatctttgcgcagcagatcggtatccagtcgcttgggctgctcgtcgtaatcctggcgagccgccaggcgggtatcgatgggtcccaggtccttggttaccaggcactcgccgttctccttgagtatcgtatgccggacatcctgggcagtgggctctccgtaggggaacgtgaccggcgtaaccttaattagatgcttgatcttccacaggcgggcattgttctccggtatgttcttgacgacagtaaaatcgctctgctttccgtctagtcccagatctttgaggattcgattctcccagtagggattgccctttagcggcttgatgcgctgcacccggaaaagtttcgccggctccacgggtggatcctggtgatcgggagtcctgagcgggatagatttagcattaacaaatgctggatttcgtgtgttttccttttatacactgcacacgtgaatacgaacctgggatagtaggtgataccctcaaatttctggccatttttgtagaggaacttcttgttgtgctttccgtagctgcgcaccgaacatgcggtgctcctcagtggattcagcagccttcccaggttcatcttaattgttttcccccctttgtaataaaattaaatgcaaaacgcttatgaaataattgatgtttccccgacgataacgattacacagacatctggttaactagttgcctatcgatgggcagcatggatactgccgttatgtaaaccaatgttaaccgcttgctgttaagcgatacaattcaaatgcaaaggcggcaaagttaaaagtgataatttatcatgtacaaactgaagataatttatcatttacaaactgaagatagcgaaaacattatcaataagatggtaatatatattcgttgtttttttttttaatatttcaagaattagttgagaaaagaaagtttttaggtcatcggattacacagcctccaggggatgatgtccatttctggaaaggggcggtctcatatcaaaatctccgccattttgtcagctacaattggcgctaatcgacgagggtggataacttggcattggctggctttcaacgcaatggggttgtttccgattttggttataaaggaggctgcagcttcccgaccggaagtcagttccacgtgagcatccatccggcgagcaaccgactctagtggcaagcaaggatatctgccagacaactcaaggatctagaataactctgcacctgtgataactgctgtaagttcaggcaacaaagcccaaaaattgtgagcaatgcaaatgaagtgaatgtactagcgagtagaataatcaaattaaagatacaaatagctgaatgaagtctctagttcgtttaaaattatatctagaaatttgttaattagctaacttgaccatgtgcacgcactcgacatgtgtaagtgtactggagtttcatagtcttgaggggacttgagttacacgacaagttcttaaaactagatcggatttccatcatcccatgggatcaatagacacgtcttcgacttgatgcaattccagtgacactttttggacccaaaacccattaaatcaatag

SEQ ID NO: 15500 - DNA, 543 bp, DROSOPHILA
atgaacctgggaaggctgctgaatccactgaggagcaccgcatgttcggtgcgcagctacggaaagcacaacaagaagttcctctacaaaaatggccagaaatttgagggtatcacctactatcccaggactcccgatcaccaggatccacccgtggagccggcgaaacttttccgggtgcagcgcatcaagccgctaaagggcaatccctactgggagaatcgaatcctcaaagatctgggactagacggaaagcagagcgattttactgtcgtcaagaacataccggagaacaatgcccgcctgtggaagatcaagcatctaattaaggttacgccggtcacgttcccctacggagagcccactgcccaggatgtccggcatacgatactcaaggagaacggcgagtgcctggtaaccaaggacctgggacccatcgatacccgcctggcggctcgccaggattacgacgagcagcccaagcgactggataccgatctgctgcgcaaagatgcccgcctcaagtggctaaatccctggtag

SEQ ID NO: 15501 - protein, 180 aa, DROSOPHILA
MNLGRLLNPLRSTACSVRSYGKHNKKFLYKNGQKFEGITYYPRTPDHQDPPVEPAKLFRVQRIKPLKGNPYWENRILKDLGLDGKQSDFTVVKNIPENNARLWKIKHLIKVTPVTFPYGEPTAQDVRHTILKENGECLVTKDLGPIDTRLAARQDYDEQPKRLDTDLLRKDARLKWLNPW

SEQ ID NO: 15502 - DNA, 3732 bp, DROSOPHILA
tagatcgagactttggtataatgtcaggtatgaatgaagataaagctggtagtcttatcaatttgctattgcaacgcttgtcatcctagatagtaccgtccaaactgcgttaaatagtggcactatgcaggacgacatccggctttactggctggaaaagattcacgaggtaaacaaagagctgcaatgtgaagaggaacttttactcagcctgcactccaaggtacgtagacaccaggtgaagcgggcgtaccaaacgaagagcgaggtgctactacaaatcgaaagactcgatacagagttggctactcaggtggcggatatccaccatgtggaacgaaaacttttcacggccaatgaacagcttaaagccaaactggctgttcttgaatgtttgagtcgtgaatttgagactacagtatctggaggcgttcaagaaggtgatgttgccactggcagcaatgcaagtgcaaaggttcagcaaagccaatcagatgatctccaacacgctgggaactggctgcacgttgttaagagactctttgcggcagatcatcttaatcggcgattaacgcaacaggcactaagtgaaaagaacttaacggatcgactaatacccagcaaaggaatatccaagcagatgttcgaagttctaagatccccagatccttctacctcgaacagcgtaaacaaaaaagagttgagtactaggcaagcaatttctttagaaagggatattcaacacctcggcacccttgtttaatgcaaagatcaagcagttgacttaatccaagtatctcatgtaacgtattttgaacatccgtaccaaatttgtgtcaattaaccaaatagagattaaatttttgttatgtttaaaacttgagagtttagtggataatatcgttgtgttgtacaacaaatgtggattagtaactaaaacccacaaacaaaaaacagaacaacattcataattacttatcatatgcagtatcataaactattaatcagacctctttaactgttgtatgaatcccgcattgggctgaatacacggtctccatgattttaccagattgtatgcatcttcgtagcacatgtcacggcgctgcattaaataaccgattaccacagagggggatcgcgaaacgcctgcgttgcagtggacgagcacgcaaccctgcgatctgtgcgcatcttcaataaactccattgacgcgggcaagatgtagttcatcaggttggtttccggcagatccaggcagggcaaaaatgtacaatttacgggtaagggccactccacctcgggcgtctgtatgccgacactcaggatgtgagttatcttatattttatgatgttatccgcgctaactgcatcctgcgagcccaggtagagaaagtcgctcagaatgcaggcgggcacagagtccggcttggtatccacgacaaagccgtattcacgcggatccagttgctgggagcagtgcgcaatgtcctccacgcagacggatgaagtgcttcgctcaatgtagcgtacaccggtgggggtggtcacaaccgtggcggtgggtctcaggttgcccattcgcctttgcagctcatacagcagtatcatagcggtattaaatgtccgtttctcggtagtgcactctgcaaaggtaaagcccacaggctggagccaggagcacacggtgatcccaagaattcttcgagggaacggtgagcatctgatataggcacctctcgtcgatacgtccgttacccaaagcgattagcgcgccgacaatgcgccttacttgtttgtaaagaaatgatttagccctgatctcgatgtcccaataattatatgtttcagcggcctgaatagcgttcgaagacaatgcacgtgtttcaccaggacgaatattaatctcgtcgattttgcgcactgtaaacattgggtgatcccgacaaactttctgtcggctaacactcatgaaagttcgaaagtcgtggacgccgataaacattcgagctgcagcctggactcttttgatatcgaagctagaagatctatggtggatcaagtggttactaatatcatttaagggttgccggagtttcttactgcagaaagtaacaacgatcgatttcttcaactggtataaaggtctcgaacgacctattccggagactgcaatctcccagggttggtacctttgccacggcaaagcgatagagataggttcgtccaatggcgtcgtagcggcagtggaaggagttggccaccaacttactgctgagcactcggatgggaagacgctgtttgttaagggttcggttgagcacaccagttaatatagttgtatcatagggctgcccattaggccgctccaagtccacctgcaccgtggagtgcagggcgtgtacaccggcgtctgttctgaaagttacggttactatatgactgtatagatgttgtgtatattgtcttgcaccaaccgactggacagcacggtgtgtatttcgtttgttgggtgaaaaacctgcaacgccagctccaaacagccttgtatggactttgtgtccaggcgggactgctccagcttgttcaccgtcttttgaataccactgtaggggtggtaagtcttgcttcaacaattaatttccacaattcgacgcacttaccgaaaagtcgtgccgatgtaagaaatgttcaacaaatacctatacatgttatagagcacgacccacaaccaccatccatatcgctagagatgggcttgggcagctggttgatctacactcctagaggtgggattgtaaattatgtgttgaataatcaaaaaagcaacatttaaaataattaaaaaagctgtatatcaagaaagcaactattttttatgcaactccctgcaaaaacactttctacggccaagctctttttgggccagagaatgagaagatatcgattaatcgatgacgaatcggttcacggcattaggcaacaacaaagtacccggccacattgctgtcagaagtatattgttttgtaataaaaaaatataattttgcaacttgccaaagccttgcaaccctgtaagagacggccaacggtctaatactttttctgtcttttgcacagcagtcctccaaattaaaggctacagagttgggccctcggtataagcagtcaccagaccacccagtcactccacccaccacgtaactagaatggccggctttcccgagcacgcccgcgcagaggatacggaggttaatgtttggatccgctttggtcttaggctgggcgtcagcgccgcccttcatccgttcgaatattccaaaaccctcatccagctgggttacgaaccaatcgctcctctgcccggcaagtcgatactgggcaagccgatcatgaagttgccgaacatctttcagtacggtaggtacaaagttcctttttgccgaaacataactaatatttccgctgcggctcctgcagctggccacattcggcggatcgacggcttctacggttgctaccgcggtctagctcctaaattggtgggttctctggtggccatggtggtaagcgaccgagtggccgatcaactgggcctggagcagccagaggagaataaggacgactcgcagcttagtgatgaggaattgcaagtctttgattttcaagtgcccaagaatctccgtacaactcctgatttgttttcttacaggtacgtccagttcaagaaa

SEQ ID NO: 15503 - DNA, 1528 bp, DROSOPHILA
ttgtgggtcgtgctctataacatgtataggtatttgttgaacatttcttacatcggcacgacttttcgtggtattcaaaagacggtgaacaagctggagcagtcccgcctggacacaaagtccatacaaggctgtttggagctggcgttgcaggtttttcacccaacaaacgaaatacacaccgtgctgtccagtcgaacagacgccggtgtacacgccctgcactccacggtgcaggtggacttggagcggcctaatgggcagccctatgatacaactatattaactggtgtgctcaaccgaacccttaacaaacagcgtcttcccatccgagtgctcagcagtaagttggtggccaactccttccactgccgctacgacgccattggacgaacctatctctatcgctttgccgtggcaaaggtaccaaccctgggagattgcagtctccggaataggtcgttcgagacctttataccagttgaagaaatcgatcgttgttactttctgcaatcttctagcttcgatatcaaaagagtccaggctgcagctcgaatgtttatcggcgtccacgactttcgaactttcatgagtgttagccgacagaaagtttgtcgggatcacccaatgtttacagtgcgcaaaatcgacgagattaatattcgtcctggtgaaacacgtgcattgtcttcgaacgctattcaggccgctgaaacatataattattgggacatcgagatcagggctaaatcatttctttacaaacaagtaaggcgcattgtcggcgcgctaatcgctttgggtaacggacgtatcgacgagaggtgcctatatcagatgctcaccgttccctcgaagaattcttgggatcaccgtgtgctcctggctccagcctaaacggacatttaataccgctatgatactgctgtatgagctgcaaaggcgaatgggcaacctgagacccaccgccacggttgtgaccacccccaccggtgtacgctacattgagcgaagcacttcatccgtctgcgtggaggacattgcgcactgctcccagcaactggatccgcgtgaatacggctttgtcgtggataccaagccggactctgtgcccgcctgcattctgagcgactttctctacctgggctcgcaggatgcagttagcgcggataacatcataaaatataagataactcacatcctgagtgtcggcatacagacgcccgaggtggagtggcccttacccgtaaattgtacatttttgccctgcctggatctgccggaaaccaacctgatgaactacatcttgcccgcgtcaatggagtttattgaagatgcgcacagatcgcagggttgcgtgctcgtccactgcaacgcaggcgtttcgcgatccccctctgtggtaatcggttatttaatgcagcgccgtgacatgtgctacgaagatgcatacaatctggtaaaatcatggagaccgtgtattcagcccaatgcgggattcatacaacagttaaagaggtctgattaa

SEQ ID NO: 15504 - protein, 291 aa, DROSOPHILA
MYRYLLNISYIGTTFRGIQKTVNKLEQSRLDTKSIQGCLELALQVFHPTNEIHTVLSSRTDAGVHALHSTVQVDLERPNGQPYDTTILTGVLNRTLNKQRLPIRVLSSKLVANSFHCRYDAIGRTYLYRFAVAKVPTLGDCSLRNRSFETFIPVEEIDRCYFLQSSSFDIKRVQAAARMFIGVHDFRTFMSVSRQKVCRDHPMFTVRKIDEINIRPGETRALSSNAIQAAETYNYWDIEIRAKSFLYKQVRRIVGALIALGNGRIDERCLYQMLTVPSKNSWDHRVLLAPA

SEQ ID NO: 15505 - DNA, 2756 bp, DROSOPHILA
ggattggctttggatgaaacgatggactacttatagatgggctcatgagcatgacatgtgaaaggagcatcgatcaagttgagatacaatatcttaagataccagatcattgtctttttccttaactttgttttttattttttttttttttttgtgagagcaagaaaatttgaatatatatattcttcgtttgtttcggggtgggcaagtgtttcttccagaactgcgtaaatacaagttataatttcttatatatttgtttgctcttaataggaagaagttagatagtcttaatttaagtgtacatagctatatttgatatccaagggttgtgcttaaatttcatttccgccttactggcaatattttaatctcattttagtcattaacttttcgaacggggaaacgtgaattgcttgtgctggctacgccaagtggggaatttcaaggactcaatctcctgggatcgcatagcccagcctaattggggggtacaggcgtgtattttggtgctcctaaatcgaaaatatttaccatgaatataatgcgaattttttgtattttccttacggtcgaacttctccaacttagttttatgtgtttagctaagtaacactagcgtttaacgatgggttcgctataatctgggaattaataatacaaatttcttgttcacttttatcataattcaaatcattaaaactaattgggtttgctacaaacacaaaagcaatatgtatagtttcacaatgaaatacaaagttgccctacatataaattaaaaagtaattttagattaacacgaatttaagaaacttactacattaatagaaaacaatttcaccgattataaaatgctaattttgtcaatttcgcatgttaaacaacctaattatcataacaatatgcaaatgtttgagctagagaagttcgactggtgattgttttcattttgtttttttctttttttgttcggttaaagactatcatccgatttaacaatccgacggctgggcacttcaggcgctgttcttggagacaaactcgcgcaggatgtcgccggccatctcgatgttgttgcgcgaaatccctagggcggtgatcgcgttctccttggagtagcccgcgttcatcagccgggcaatgtactccaggttaatgttttcgtagggcacggtgccgcagtctttttgattgatcgtcacgttcgcatagagcagtggctgcgattgctggccaggattggacccattgcccgccgtcgccgctgccgctgccgccgatgtcgtcgttgtcgcttggctctgcttggccgaattggccttctttccgttggccagtgctgctgcagagccaccactgctggtggtgcagagttgcgtgtaatgggaggatgccgagtcctgccggcataaggtcacgccgcgcgcctccagcgggcgggtatcgatcaccccacttatagtttccgccggacccacctcaacgatgtcctcatccaagagagagagcaccggcgatgtggtactagttgctatgagctgctgtcgcatcaaatcttcggccaaggtgtccacgctcggcgagacatgtggcggaattggtggagctgtcgtctgcggcggcacattgtccaagctgcactgaatgttgtcgatactcttgctgctgctgggtggtggtggtgccgtggccttgctcggtgtctccacgccaggtgaggactttcggggtggcaggggaggagccaccacagctgccgccgttgctggtgtacccgtatcatggagattctgcaagatggcatatgaactcgagctggaggcattatcactgctgctgctggtgctgctgtggctgcagttctggggcaatttctggccatacgtggagttggcaacacaggagccgataagcggtgcactcatccggtttgtgttcttctgactggaactggccccaccgccgccaccaccaccgcctccattgctgagcaccgccgaagcaggaggagccgaaggctgcggttgctggtgctgggaggaggatgttgaggctgccactgttgccaccgatgctaaagaggaggaggaggatgtggaggcggcggcgatcgaggagcacgagctgctaggcaggctgagggtgggcgtgccgccggcatagagatcgttctgcacggccatcaagctgggcgtggtgctccgtcgtcccaaacgtggcgatgtgtgcggactgtgcttctcagccgccaccgtggacgaggtgctgagtgcgtgcagcgaagacgtggctatgttgaagtcgccaatgtcctaaacatatccagaacagaatagaaacagattaaaggtctacttgcagttcagtgaacacaccaggcatggaataatgaaacttgaaatgttttcgttcgaatctgagggaaaacgatcttttaaaagtattttttctttttctattattccatgtgtaaatttccaactgaacaatgtggtccacttaagcaaattgtttgctgatcatagagcatgccgctggctggaggaaattggcatgcacatcaaacagaaaatctgaggaaaacaagagtcactagtaaaaacaaagctaaataaataagagaacatataaatcaatacaaaccaatatttaaatattcatattatgcatatattttgttttgattcagttgtttttgttttgtttttgttgttgtgtggttgttttgtttttagccgtaaacttattaagga

SEQ ID NO: 15506 - DNA, 756 bp, DROSOPHILA
ctgtggtggctcctcccctgccaccccgaaagtcctcacctggcgtggagacaccgagcaaggccacggcaccaccaccacccagcagcagcaagagtatcgacaacattcagtgcagcttggacaatgtgccgccgcagacgacagctccaccaattccgccacatgtctcgccgagcgtggacaccttggccgaagatttgatgcgacagcagctcatagcaactagtaccacatcgccggtgctctctctcttggatgaggacatcgttgaggtgggtccggcggaaactataagtggggtgatcgatacccgcccgctggaggcgcgcggcgtgaccttatgccggcaggactcggcatcctcccattacacgcaactctgcaccaccagcagtggtggctctgcagcagcactggccaacggaaagaaggccaattcggccaagcagagccaagcgacaacgacgacatcggcggcagcggcagcggcgacggcgggcaatgggtccaatcctggccagcaatcgcagccactgctctatgcgaacgtgacgatcaatcaaaaagactgcggcaccgtgccctacgaaaacattaacctggagtacattgcccggctgatgaacgcgggctactccaaggagaacgcgatcaccgccctagggatttcgcgcaacaacatcgagatggccggcgacatcctgcgcgagtttgtctccaagaacagcgcctgaagtgcccagccgtcggatt

SEQ ID NO: 15507 - protein, 244 aa, DROSOPHILA
VVAPPLPPRKSSPGVETPSKATAPPPPSSSKSIDNIQCSLDNVPPQTTAPPIPPHVSPSVDTLAEDLMRQQLIATSTTSPVLSLLDEDIVEVGPAETISGVIDTRPLEARGVTLCRQDSASSHYTQLCTTSSGGSAAALANGKKANSAKQSQATTTTSAAAAAATAGNGSNPGQQSQPLLYANVTINQKDCGTVPYENINLEYIARLMNAGYSKENAITALGISRNNIEMAGDILREFVSKNSA

SEQ ID NO: 15508 - DNA, 5352 bp, DROSOPHILA
ttgctgcctccttttgctatttcttctgctgccgctgctgctgcttcttgctcctttcctacacacacacaggcacactcgcaagcacgcacacaccccgaacgcactttatatatataaatatatatattattttctttcacttattttcgtttcggccgcgacagcgaatatgcaattttcctctcaattgattttttctacacactcgcactccttttcacatgcgtgcagtttatgttgctattgctgctactgctgctgttgttgttattgttgttctggctgccgctgcagtgcaacttgtaacactttcacatttatgacataatgcactggccatatttttgcttggctctccgtttgtgcaactgcatgttcccagtgcttttttaatatttatgcagcagtgcgtgcaaattcgaacgcgagacgatccgcttttcgctgcatctatgcgctgaagatgtgctgcagtcgatgggctcgtcgatagtgggaaggctcggtgccggcactatcgattcccaacaccatacgataatatcggctaagttatcaatatcgaagtttactatatttcgggtttttgcgttttaaaaattggcaaatctaccttatacaacatttttgtaagaagtaaaaagtagtttctcttatggatgcatcgataaaaactcggctcacatcgctctaaaagtgtgtcaccaccaacagaaaaccaaaacaaacacgacgcgaacagtgtgaccagcacaccaaaaattaaaaaaaggaacaaaaacgtttaaatatgggtcgtcttgatttgaaatatgtttagtcatttaaaacattgttttgttactgtattgttatttattttatctgcgccggcgaaataaaatctcattttatgttcaaaacgtagttatcaaaaatattatctatttcacggaaaaaacttttagcttacttcacagagaggttttttttgactggaaaacggcttagctcggaattagtaacagtccgaaatcatgttctcatcgtcgcgcttcagcgcaccgaggatgtcatccagcagggaggtaaagttctccttgcactcgaaccactcctggtgctgcttaaccaactggtccaggtcaatggtcttgagctcctcaaagaactgccgcaatggcaccgcgaactgcttatagtagaactcatcgatgtgccgcttctccgctgttttcccttgcgcgtttatctgcatctgggtctcaaacgccttctccaggagctgtgcatcctgcgagttcaatatggactcgatgacttcgtccgcctcggtgggattgaccggtggctgctgtggaatcggagttggctgcggctgggacgggaagtcgaatcttggccgctctctgtctgagagcggcgatctcatttcaatctcctccattatgcccttgtagcgctcgaacttctccgtcatggtcttgacgcctttaatgaggaattccaaaacctccattgaagtctcctcgcgcaggcacttgagtaggatgccaaaatatccgtactgctgtacttcaccaaaaactttggcaatgctggtttggatctctttctccgtcagcgtgacaatcttcttctgctccttagagaaggtcactgtgggaaaagagccatctatcatgccctgattgctaaactggcggtagaactcgcggcgccaaaaatttaaagcattcagcttcacctccgtgtgatgatccccgattacacaatagttgagggttgagaagagggtgttcttgtacttctcgtggatcttgcggtgctcgtagatcttcatcagcgtaatcacggcctcggatctcacgatatcgttggtctcccgatacattacaaacaaaagatggtcctgtcgagaattcaaagtgtttaattaataattttttccgagtatatgtgtaaatagattaactcactacaagatcgagctggcttagaccattctcccacaaaaggtttatggagaccatttgggaaagacactggaaggcagacgctcttacatagacttccgagtcattcttggccatttcgtaaactatcgggggtatctttgagtcgattagaaagcgttggaaggcgggaaactctgtagaagcaacgtatcattaatgttaggcactacgttaagataatcacacgcttactgatgcgggagatactggctatagaggtggtaagctccagcgttgtgtcacgcacctcccacattgtgtcgtgcattcgcttcacaataatgggacccagacagaccagcgcggagccctgcaagttgtccaccaaaagagccatgttcggtgaaaggaaatgctccacagcgagttggacgagcttcagcgcttggacagtgcactgcaaatgaagaatcacattttactattttaacccgctagaaatgagagtttgttttgcttaccctagcatccatgcttgtgttctccaggacaaatgccagacaattgaccaggccaatggtctccaccgactccttccacgtgatcttaaagcgttcgatcaaggtgcgcaaacccaccattacggaatgcaaaacttgtggatcgttaacgacctgttcggtgccccgggggtacaattttaggtaggagctgcccgcgctgctcacgctgtgacagtcatcctccccattatttgtgatgacactcatggccactgcctcgcggagcacatatagcaaagcttggcacacagtaaccgcctgctctcgatcgagaacgttttccagggccaacaggctatgtatgcacttgtttgccaggccggccgtcaccaagccaacagccatgccgtctgcagaaaagaagttgtcccgcattgtgtagcagagccgcaaggtctgttcgcaggagatctccagcaacttgacaacataggcgtcgaagagctctatcttgctctcctcgtcggcgatcttctgtgcgtacttcatggagaagagcaacggcagcatgtgaaagcagattagctggttttcaaacgtaacgcgctcttgttggatgacaatttccttgggcgcacgaggtccaagttttttccaaagtacatgattgagctccgccaacttcacaaaactcaagccgtccttgcgggtaataaggaatttcatgagattaaagaatgccaacccgaactcggtgaactcctccgacggctcggtggcgttcggattcagcaacttttcgtgcaacagcagggcaaagttgtagctgctcagtgtggtgaagatcttctcagtaaagtacgggttgtgggtcatatcgatcagcttccaaacggtaatctcgaagtcgtgatgctccttgagcaggatgatcagagtggtgcgctcctcgagcaccagcgtctgctgtagtatgtaggacagtagatccagtgtcgacgagatcttgtgcaacatctcgttgtcgtccaccttgacgtggatgcgctccacgccgtcggtgttcttataaagattgtcgtgaatcggctgcataatctccgacagaatctccagggtaacagccttatcgtgcagcttgtcgcaggacttgtacaccatgttgtaaagcacttggcgggcctcccgcaccacgtacagcgtgtgatcgttgttggaatactggatgagcagcgtccagatccggtgcatccgcagaaaggccagccccatgctatacacggtgatggctttcatcagacgtatgccacctaacttaatcgatgggcttaagttgtgttccctctgtagtagtttcactgctctaaaatggtagtcgattattttaagagattagagcctggttttctatcctaccatttacctgtttactatatcaagctctcttaggcgcacgatcatccactcgttgttcgccagaaaactggtcagattcagcatgaaggatatcaccttcgggtggatctttttgaagtcctcggtcaccgccgtgatgcacctgtccacccattccaccacgaatggggcctgcagcacaaaggcattctctgcggacagatgggattcatttgaggatttaagggcagattgcggggccactccgattggtaaactcacccttggcctgcaagtgcgtgaggagcttctcaaagtaaacattgttcgtagtggaaaagttctcgcgtaaaaatatgtcgaatatcgttcgcaggcgcgacagcgtctcttcttgcttttgcatcttgctgtttccacactgactgcttaaatggcgactgccccttatggcatagttttggagcttgcaattgatccaccgaataatgaaatcgttgattgcgggttctggttcttatcacaccgaaagacacttgttttgtattgagtggccgtgtacgtttgcagtcgaaatccaaagcgcattcgccagggttgccaggtgagcggtcaaagtcacgcatcgaaacatataacggtgcatagtttcccttttattctttgctaataagtaataccattactaccattaattaaaattacctaattatactacttaatattgcagaaagaagaactctgtacaaaacattttcgttatgtttatacctcaaagattacggtctttattaaatattttttaattacataccttttttccatatttctaaaagcttttgcatagaaaaatgtcttgaattacgagttttcatttttaatcatttatatctcttgatcgactcgtcggaactatactaggttcactcttctccacaagtaatgggtatcaatatggttcggtttcgcaccagtcacttgatcacgatacgctctcatcactaccaagaagtgtcgtgcggtgaaagccgtaaatagttgccatggtcacactgtttttgatgcaaaataatataatgacgctgacatagaatcggctctagggaacgtatgatggataacaatgtagagcaattagcaggaaagagccaaactgaaacagccgagtccacagcagcagcaacaggaacagcaggagcaggtgtagcagtagtaaccgtggcaagtggagccggaccaacgcccggcgcaaactcctcgaccttttggaaaaacagcggacgtcgagtgcccggacgacccagtcccaagcgggagctcgagaaggcggcggcagttggggtagcggtcggtcgcggcgctgcccccggatctggcatggtgtccaccttcaccgagtaccagaagtcggtgagcgatgcctgggacatgggtgacgacgagttctgcatcatcagcagcacggaggcggctgccgcggccgttggagctggcggtgggttccgcaaccccga

SEQ ID NO: 15509 - DNA, 3033 bp, DROSOPHILA
ccagaacccgcaatcaacgatttcattattcggtggatcaattgcaagctccaaaactatgccataaggggcagtcgccatttaagcagtcagtgtggaaacagcaagatgcaaaagcaagaagagacgctgtcgcgcctgcgaacgatattcgacatatttttacgcgagaacttttccactacgaacaatgtttactttgagaagctcctcacgcacttgcaggccaaggagaatgcctttgtgctgcaggccccattcgtggtggaatgggtggacaggtgcatcacggcggtgaccgaggacttcaaaaagatccacccgaaggtgatatccttcatgctgaatctgaccagttttctggcgaacaacgagtggatgatcgtgcgcctaagagagcttgatatagtaaacagagcagtgaaactactacagagggaacacaacttaagcccatcgattaagttaggtggcatacgtctgatgaaagccatcaccgtgtatagcatggggctggcctttctgcggatgcaccggatctggacgctgctcatccagtattccaacaacgatcacacgctgtacgtggtgcgggaggcccgccaagtgctttacaacatggtgtacaagtcctgcgacaagctgcacgataaggctgttaccctggagattctgtcggagattatgcagccgattcacgacaatctttataagaacaccgacggcgtggagcgcatccacgtcaaggtggacgacaacgagatgttgcacaagatctcgtcgacactggatctactgtcctacatactacagcagacgctggtgctcgaggagcgcaccactctgatcatcctgctcaaggagcatcacgacttcgagattaccgtttggaagctgatcgatatgacccacaacccgtactttactgagaagatcttcaccacactgagcagctacaactttgccctgctgttgcacgaaaagttgctgaatccgaacgccaccgagccgtcggaggagttcaccgagttcgggttggcattctttaatctcatgaaattccttattacccgcaaggacggcttgagttttgtgaagttggcggagctcaatcatgtactttggaaaaaacttggacctcgtgcgcccaaggaaattgtcatccaacaagagcgcgttacgtttgaaaaccagctaatctgctttcacatgctgccgttgctcttctccatgaagtacgcacagaagatcgccgacgaggagagcaagatagagctcttcgacgcctatgttgtcaagttgctggagatctcctgcgaacagaccttgcggctctgctacacaatgcgggacaacttcttttctgcagacggcatggctgttggcttggtgacggccggcctggcaaacaagtgcatacatagcctgttggccctggaaaacgttctcgatcgagagcaggcggttactgtgtgccaagctttgctatatgtgctccgcgaggcagtggccatgagtgtcatcacaaataatggggaggatgactgtcacagcgtgagcagcgcgggcagctcctacctaaaattgtacccccggggcaccgaacaggtcgttaacgatccacaagttttgcattccgtaatggtgggtttgcgcaccttgatcgaacgctttaagatcacgtggaaggagtcggtggagaccattggcctggtcaattgtctggcatttgtcctggagaacacaagcatggatgctaggtgcactgtccaagcgctgaagctcgtccaactcgctgtggagcatttcctttcaccgaacatggctcttttggtggacaacttgcagggctccgcgctggtctgtctgggtcccattattgtgaagcgaatgcacgacacaatgtgggaggtgcgtgacacaacgctggagcttaccacctctatagccagtatctcccgcatcaagtttcccgccttccaacgctttctaatcgactcaaagatacccccgatagtttacgaaatggccaagaatgactcggaagtctatgtaagagcgtctgccttccagtgtctttcccaaatggtctccataaaccttttgtgggagaatggtctaagccagctcgatcttgtagaccatcttttgtttgtaatgtatcgggagaccaacgatatcgtgagatccgaggccgtgattacgctgatgaagatctacgagcaccgcaagatccacgagaagtacaagaacaccctcttctcaaccctcaactattgtgtaatcggggatcatcacacggaggtgaagctgaatgctttaaatttttggcgccgcgagttctaccgccagtttagcaatcagggcatgatagatggctcttttcccacagtgaccttctctaaggagcagaagaagattgtcacgctgacggagaaagagatccaaaccagcattgccaaagtttttggtgaagtacagcagtacggatattttggcatcctactcaagtgcctgcgcgaggagacttcaatggaggttttggaattcctcattaaaggcgtcaagaccatgacggagaagttcgagcgctacaagggcataatggaggagattgaaatgagatcgccgctctcagacagagagcggccaagattcgacttcccgtcccagccgcagccaactccgattccacagcagccaccggtcaatcccaccgaggcggacgaagtcatcgagtccatattgaactcgcaggatgcacagctcctggagaaggcgtttgagacccagatgcagataaacgcgcaagggaaaacagcggagaagcggcacatcgatgagttctactataagcagttcgcggtgccattgcggcagttctttgaggagctcaagaccattgacctggaccagttggttaagcagcaccaggagtggttcgagtgcaaggagaactttacctccctgctggatgacatcctcggtgcgctgaagcgcgacgatgagaacatgatttcggactgttactaa

SEQ ID NO: 15510 - protein, 974 aa, DROSOPHILA
MQKQEETLSRLRTIFDIFLRENFSTTNNVYFEKLLTHLQAKENAFVLQAPFVVEWVDRCITAVTEDFKKIHPKVISFMLNLTSFLANNEWMIVRLRELDIVNRAVKLLQREHNLSPSIKLGGIRLMKAITVYSMGLAFLRMHRIWTLLIQYSNNDHTLYVVREARQVLYNMVYKSCDKLHDKAVTLEILSEIMQPIHDNLYKNTDGVERIHVKVDDNEMLHKISSTLDLLSYILQQTLVLEERTTLIILLKEHHDFEITVWKLIDMTHNPYFTEKIFTTLSSYNFALLLHEKLLNPNATEPSEEFTEFGLAFFNLMKFLITRKDGLSFVKLAELNHVLWKKLGPRAPKEIVIQQERVTFENQLICFHMLPLLFSMKYAQKIADEESKIELFDAYVVKLLEISCEQTLRLCYTMRDNFFSADGMAVGLVTAGLANKCIHSLLALENVLDREQAVTVCQALLYVLREAVAMSVITNNGEDDCHSVSSAGSSYLKLYPRGTEQVVNDPQVLHSVMVGLRTLIERFKITWKESVETIGLVNCLAFVLENTSMDARCTVQALKLVQLAVEHFLSPNMALLVDNLQGSALVCLGPIIVKRMHDTMWEVRDTTLELTTSIASISRIKFPAFQRFLIDSKIPPIVYEMAKNDSEVYVRASAFQCLSQMVSINLLWENGLSQLDLVDHLLFVMYRETNDIVRSEAVITLMKIYEHRKIHEKYKNTLFSTLNYCVIGDHHTEVKLNALNFWRREFYRQFSNQGMIDGSFPTVTFSKEQKKIVTLTEKEIQTSIAKVFGEVQQYGYFGILLKCLREETSMEVLEFLIKGVKTMTEKFERYKGIMEEIEMRSPLSDRERPRFDFPSQPQPTPIPQQPPVNPTEADEVIESILNSQDAQLLEKAFETQMQINAQGKTAEKRHIDEFYYKQFAVPLRQFFEELKTIDLDQLVKQHQEWFECKENFTSLLDDILGALKRDDENMISDCY

SEQ ID NO: 15511 - DNA, 2402 bp, DROSOPHILA
ccgatctgcaggaagtgcttatcaaagaccaggtgccttcactaagcgtttactacatttgttaatttattgttgtactaaaatccacaagctaatataaatttgtttttgataaatttaaatattaacacttttcgtagcatacatacagaagcgcaccatcagccgaaaatgcttggctgtactctccaagttttccatgtcctatctcgcgggtcttggaccagtatggccaacaaaaatctgtgaaagcactttgctggcggcttgttaaaaaagagggaaaacgaatgaaaaactcgctagccatcagcgtttcaacggtttggggtccttttttcatagttaccttattgaattttaaagatcgcacaaagtatgccgtgttacatgcataatgagttactatagtggctatggcctacgaatacgaacggctgggaaagtgaaaacgtgattgcatggcaggaacataaattaaaactttgccttttaactcaattaacaatgtggtgtgcgcagaaaaaaaagggaaaacagtgaaagttatttactatttttaatggaaagttatttgtaattacctactcaaactggcactaattagcgcgagtttttaacttttcttactttcacaaagttcgcggaattaatccaggctatacagtatttttcagcagcacattcaaagccaccttacagatattgctggaaaccgataaccgattgttttggaagccctggttgaaaatcatggtaacgcttttttaaatactaaatattggtgccttaaaaatatgccctataataaattaaaactattcagtaggcattgactttgatttcgcattacttatcatgtgctctgtaagatatttttagtttcgtctggatctcaacgatattcagtccaaatcgtagaatttcttacatctactacaaattttccaattaaatttttaaagtaaacattttttaacatttatttattacgataaagatgtcagactacggagcacgccccaaaaaacccatgagcgccttcatgttgtggatgaattccaccgggcgcaagaacataagagcggagcatcccgattttagtgtccaagaagtgtctgtgaagggcggtgagatgtggcgagccatggccgatgagcacaagatcgtgtggcaggagtcggccagcaaggcaatggccgagtacaaggagaagttggagaagtggaatgccttcaaggagcaccagacggagtcgtttccccatatctatgaagctccgttgtcctctcgattctcaaaaactaaccaaaggccaaccctttttgtgtacgacagcaaggatgaagcaatggctccgatctgcaggacgtgcttctcaaaggccaagtgctttcactaaacgtttgctaaattattgtttagtcacaaacaaccagcaaaagttgcgagatgttgttcaataaatttaaatatttatattcaacttgcttacaacaagtgtgcccagaaatcttgtgtttggactttggctttcccttcttccggctcactttcattccccaccaaaagccaattgggtttttgttcttcttgctggcccaaagtgccatgtttttgtactggctggtttttctgctccatgcaattaaagctgcctgctccattttttcaatcctacactgtggcgtctgctgtgggccatgtgaaacaaagacaaattgtctttgtgcaggcagcactaacacttgcggtcaagaaaattatatccaaaaattttccttccaagctgttagcaactatatgatctcgttacctagtctttcactaccttatggtgtgattgtttcggcactatttaaacctacatatatattcatacatatgtatatatgggtacgtacctgcagctgataattgcagtggaaaaagcagcaatggcaactgcctcctgcaataaaagtcacaatggcgacagctcacgacacattgctcttgccccacccattcccaactttcacctttctcccgaatgtgtgtgtgtgtgtgagggtgattgacggccgacgggctttctcatgtgtgtcgtggctgtagttattgttgaattcaatttgccgtaaatgtattgttggcctgactcggcgctcgggacttgtggtcgcttctgttgcctttggttacagctcattagcagcagctcaaatacacagaagacgaaatacacacactcacacacacactcaagcaaaccagaaaacacacagataacgccttcggtttacttaaattcaacgagttcccagcgccacgatcgcataaaaatagcttacagtgaaccatatatatgttattcataatttgcaatgcctctaaaactcatgtaaggaaaggtattaata

SEQ ID NO: 15512 - DNA, 402 bp, DROSOPHILA
atgtcagactacggagcacgccccaaaaaacccatgagcgccttcatgttgtggatgaattccaccgggcgcaagaacataagagcggagcatcccgattttagtgtccaagaagtgtctgtgaagggcggtgagatgtggcgagccatggccgatgagcacaagatcgtgtggcaggagtcggccagcaaggcaatggccgagtacaaggagaagttggagaagtggaatgccttcaaggagcaccagacggagtcgtttccccatatctatgaagctccgttgtcctctcgattctcaaaaactaaccaaaggccaaccctttttgtgtacgacagcaaggatgaagcaatggctccgatctgcaggacgtgcttctcaaaggccaagtgctttcactaa

SEQ ID NO: 15513 - protein, 133 aa, DROSOPHILA
MSDYGARPKKPMSAFMLWMNSTGRKNIRAEHPDFSVQEVSVKGGEMWRAMADEHKIVWQESASKAMAEYKEKLEKWNAFKEHQTESFPHIYEAPLSSRFSKTNQRPTLFVYDSKDEAMAPICRTCFSKAKCFH

SEQ ID NO: 15514 - DNA, 2495 bp, DROSOPHILA
ttgaaagatttcccacatcaacaactcacttggctgccgggtgctccacctccagcagtcgcagaatggtggctccatcgttggtcactgtgacatcgccgatgtcgtccaccagcatcttgtccagacccacgggtcccaaggagcttttcacgatgttcgatatggacagagcggccataactgaaagcatataaaagccgagttgtagtcataacctcacttcgcataggcttgtccacaggatcttgtagctccttggattcaatgagtttttttgttaatccaattaaaataagatcgccctcccccgggttggttccggaacattcttcgtggagagcgtgacccgcgatgagtaagaaacgtgctccgccggcagacgcaccgcagatgttgacaaaaccccgggattctcaccgttctgtgtgcgcaccgatgcgccggattggcgggtgccagcaatggacagaggagaggccagggtcgacattttcctaagttcttccgcgacttttaataaaaaacagataaatcaaatacgctgaaaaaccgcacgttaaaccgcctgactcactttaagacttcgagatgaacaaaaacccgatgtcgattcgatactatcgagtgcaagattttttcttggagagcaaggattccataacatttataagtttatactatgtgttacattagcgcagcatcaaaaatatatagaacatatattggcttatttattattaggcatattttgcagcacattcaaagcggcgttcaaagtatcgatggtaatcgataaccgattgtttagggaaccctggttgagcatcaggtaacggttttttaaatattaattcaagattattattaattattaattattaattataaaattgtgctttctgatggagtaaaagtattcagtaggcattgactttgatttcgcattacatatcgtgtgctctgtaagatattttcagtttacctcttgatctcaacgatatacagcccaaatcgaagcatttcttacatctacaacaaattgttaaagtaaacattttttttaacttttatttattacgataaagatgtcagactgcggagcgcgccccaaaaaacccatgagcgccttcatgttgtggatgaattccaccgggcggaagcacataaaagcggagcatcccgattttagtgtccaagaagtgtctgtgaagggcggagagatgtggcgagccatggccgatgaggacaagatcgtgtggcaggagtcggccaccacggcaatggccgagtacaaggagaagttgaagcagtggaatttccccaaggagcaccgcttttcggacacgcaatgtatttgttcctcaaatactaaccaatgccccaccctttttgtgtacgacaccatggatgactcgatgactccgatctgcaggaagtgcttatcaaagaccaggtgccttcactaagcgtttactacatttgttaatttattgttgtactaaaatccacaagctaatataaatttgtttttgataaatttaaatattaacacttttcgtagcatacatacagaagcgcaccatcagccgaaaatgcttggctgtactctccaagttttccatgtcctatctcgcgggtcttggaccagtatggccaacaaaaatctgtgaaagcactttgctggcggcttgttaaaaaagagggaaaacgaatgaaaaactcgctagccatcagcgtttcaacggtttggggtccttttttcatagttaccttattgaattttaaagatcgcacaaagtatgccgtgttacatgcataatgagttactatagtggctatggcctacgaatacgaacggctgggaaagtgaaaacgtgattgcatggcaggaacataaattaaaactttgccttttaactcaattaacaatgtggtgtgcgcagaaaaaaaagggaaaacagtgaaagttatttactatttttaatggaaagttatttgtaattacctactcaaactggcactaattagcgcgagtttttaacttttcttactttcacaaagttcgcggaattaatccaggctatacagtatttttcagcagcacattcaaagccaccttacagatattgctggaaaccgataaccgattgttttggaagccctggttgaaaatcatggtaacgcttttttaaatactaaatattggtgccttaaaaatatgccctataataaattaaaactattcagtaggcattgactttgatttcgcattacttatcatgtgctctgtaagatatttttagtttcgtctggatctcaacgatattcagtccaaatcgtagaatttcttacatctactacaaattttccaattaaatttttaaagtaaacattttttaacatttatttattacgataaagatgtcagactacggagcacgccccaaaaaacccatgagcgccttcatgttgtggatgaattccaccgggcg

SEQ ID NO: 15515 - DNA, 495 bp, DROSOPHILA
atatacagcccaaatcgaagcatttcttacatctacaacaaattgttaaagtaaacattttttttaacttttatttattacgataaagatgtcagactgcggagcgcgccccaaaaaacccatgagcgccttcatgttgtggatgaattccaccgggcggaagcacataaaagcggagcatcccgattttagtgtccaagaagtgtctgtgaagggcggagagatgtggcgagccatggccgatgaggacaagatcgtgtggcaggagtcggccaccacggcaatggccgagtacaaggagaagttgaagcagtggaatttccccaaggagcaccgcttttcggacacgcaatgtatttgttcctcaaatactaaccaatgccccaccctttttgtgtacgacaccatggatgactcgatgactccgatctgcaggaagtgcttatcaaagaccaggtgccttcactaagcgtttactacatttgttaatttatt

SEQ ID NO: 15516 - protein, 126 aa, DROSOPHILA
MSDCGARPKKPMSAFMLWMNSTGRKHIKAEHPDFSVQEVSVKGGEMWRAMADEDKIVWQESATTAMAEYKEKLKQWNFPKEHRFSDTQCICSSNTNQCPTLFVYDTMDDSMTPICRKCLSKTRCLH

SEQ ID NO: 15517 - DNA, 3927 bp, DROSOPHILA
ccacgccatttggatgtcgccagttcacgccggccactttgtaccaccagacagcgctcgccactcggaagtcctctaggttcttctgctccaatgggctcaaaaggctcttaaacagaaaactgtcgccatatcgctcagcctccgtggtgtagttagtgtgcagaacaaacttcgcaaaggcttcgttggaaacctcatacttgtcgatgtagaagtcattcagcttcacctgccgttccggagcctcgcggtcggccggaaagtgcggtttgtcagtacccatgtaaaccgtgcctcccggaagcagtgacatgtccgcaatatttggctccagttcgccatagtaatcccggtagtggctgtgtgcaccctgtgctcgttgctggcacacttgtccggaaatggacggcatatccggggccttccggtcgagcttttggcagccacagtcgctggatacgtcattgaataaaactatccaaataaagaggactaatataattgttgtcatcttaacgtgcagtgtggccctttttagttttggaatcaatacttaatttcgcgaatttaaattccgaacaagccagctttttaatagcatactttaggctgtaacgttttaaacaatttatttcaatttcaacaaccatacttttgggattattattattattataaccatttagtagtagttagaaggttaatgagtgcagttttaccattttaataatatataacctacaatatttaggttttataaaaagttatgtatatgagctaattataatttatcaaagtctggtctttatgttaactttcgtttgtatttgttataaattcttcaatcatgaacaaatttttgggaacggaagacctacaaatgcaaagaccagaaacattaaaaaacgttaagtataagttaaataagtttaaattgttgtatggcgcaaatcggtcttaacaagttgtgatacacagcaatcctaaaagctgcgggctatgcctcgataggcttctcgtgcagccagggccggaatatgggtagtgtggacggatagtgggtgtgcgtgtccggcttaagcaccgattccggccaggtgttggcattgaccgcatcaccggagtgtcgaaaggggtacgtcgcaagcacgataggaagctgtagcttaatctccttctccatggacttgggttcgatcacgaagaagacgtcgtaggatattttgatcaggtggcagccatgaagattggtcggcggcaggggtggaacgtaaagctcgttgtgccactcgtctttggcccccggacggatcttgccacgaactaaaacagccagctcccgtttttccgtttgcaccaccttcccccgcgccaaatactcgatggtctaaataaaatccaaataagatcaaaatggatgaattgtaactagccacttgaaagcgataccgacctcagtgagggatgccttagtccgtttaatggacacattactgtagttggatataaatgcggtgaccagaatattctcgccgggcacatacccaccgcgatcaagggacactctgcactttatctgacctccaccaacacagacgacgcctagcttgtgctcaacttcgcaggtgaacggttgctgagtcaggcgaaaggttagtttttttaaacagggtttttaaagctacttactgctaagatgggcttttcaaggtttaggtcgatgggattcatcacaatgaagacctggtggttcttatggataatgccattgttctcgcggagcgccgccttgcagtagaactgaatccagccgtaccgaccgagaaatgtagatggaagacccagtggcaagccgagtttgaaggggaagctgtgaattcctggcgagagtatagctggacctccttggtctacgtcccccagaagtcgcatccgaaagtcgatatagttctccttatcgtatgtccgctcctgtcgccgcccgttgcgcacgaccccttcgcctaccacatggaaatgaagtcccaaagcaggcgtctcatcctgcaattcgattagaacccgtccggagagaaactggcccgggaagtacaggagggaagtgttgtcgaagatgataaggaatttaagcaacttgcgcggcatcgtgcctctgttttgttgccgatttcattcgtacgcctaaggaaaaaccaacgaaattcgttagaacacggttgccaaatatttgacccgctccgcacgcgtcattatggttaatgacaacttatccgtcatagctggctaggtctgagaccatgtactacggactacggtctcacatacatacggcgcttgtttgcatatttatgtgggtagcatctaggcgggcaaaggaaacaaaaccagtttcgtacggccaagagatggctgcgtgcacaactatgcagcacgaaagccccgaacacttaagcatcaactgcaaggtcggcgcatgaagcatgtcgggcgtgtcacgcccgcgcctacaaatttgggcaaaactccagtatgtacatctttaccaaaagcgtaagctgcaactgcgactgtcggcaagcctgtttggtgcactggtgacaatgttgatgattcctgattgggaaacagaaaccgaaaagaaaactgacgtaatttcctagtggaaagcggattcccaaccgtacactgccattggaatgattacattcaaattgttcaacatttttgtttttatccacaacagatcaattgttttctcttcatccctgtgggcgcacttgaaataatgatcgcttttcaaatacctgtacacacaaaggtgttttttggccagatcggaacaccagtccaaaccgaaccgatttaacccgttctgcctttgagcgatattcgtttggcaagatctcgtccacgctctcgagcgtttgtttggcaactgatcaccgtcgtcgtcatcgtcgtcgtcgttatgcatcagtttgcggacgagagctcgactgaaaaacttgttttgagcgcgtttttgcgagggatcgtttgagagaggcccagccggagccagctgatgtcgtaatgccaataagtagcccgcttttgtttttactatcttttgcattcatgtaatacatggctgaatttacctttccagcgggcttacaggatacgcaaagcgcgtatcttcttgaataaattcaaacggaaaaaactggaacggcaccacagacaacagaagaccaaacgagcatgagaaccaaattgtcacctcaacggttagctaagctgttcaaactgaatcgattataggagcaatttgctaataatatggcaatgctcgcagagtcgccccgctatagctcagcaggtgtatcttgtgttactcggttgcacctagaaaataaatctgtatttccaacaccaagcccatattttacaggtatttatccatagtcgacaaatcgtgtgcagactaaaatggataaagtggcacacatttatgcattatgcatgcatttaataccggttatttgttgttttaaggtacccaaatcgaagaacctcaactgtagctcatgaaaatgaaaggccaaaagccaagcaaactatcactggctgcgaaaaccgaatcggtgaatggctcggcagcctgtggcaagctgtggcaagctatggctataccctgaaaattagtcaaaaaatgagtcctgtggcagataccttgaaaactttattaaaaggaatctgtaggttatccttatgatcgacaaagtataagataatattagaaagagtagagatgcaacgatggtcaaactatatatggactgaagaaatcaatcgttttgaagactatgctggctataagagaaaacaaatcactttcgtatttaacttttccagcttttcatatttcttccaacggcatta

SEQ ID NO: 15518 - DNA, 1255 bp, DROSOPHILA
acgctcgagagcgtggacgagatcttgccaaacgaatatcgctcaaaggcagaacgggttaaatcggttcggtttggactggtgttccgatctggccaaaaaacacctttgtgtgtacaggaatcatcaacattgtcaccagtgcaccaaacaggcttgccgacagtcgcagttgcagcttacgcttttggcgtacgaatgaaatcggcaacaaaacagaggcacgatgccgcgcaagttgcttaaattccttatcatcttcgacaacacttccctcctgtacttcccgggccagtttctctccggacgggttctaatcgaattgcaggatgagacgcctgctttgggacttcatttccatgtggtaggcgaaggggtcgtgcgcaacgggcggcgacaggagcggacatacgataaggagaactatatcgactttcggatgcgacttctgggggacgtagaccaaggaggtccagctatactctcgccaggaattcacagcttccccttcaaactcggcttgccactgggtcttccatctacatttctcggtcggtacggctggattcagttctactgcaaggcggcgctccgcgagaacaatggcattatccataagaaccaccaggtcttcattgtgatgaatcccatcgacctaaaccttgaaaagcccatcttagcacaaccgttcacctgcgaagttgagcacaagctaggcgtcgtctgtgttggtggaggtcagataaagtgcagagtgtcccttgatcgcggtgggtatgtgcccggcgagaatattctggtcaccgcatttatatccaactacagtaatgtgtccattaaacggactaaggcatccctcactgagaccatcgagtatttggcgcgggggaaggtggtgcaaacggaaaaacgggagctggctgttttagttcgtggcaagatccgtccgggggccaaagacgagtggcacaacgagctttacgttccacccctgccgccgaccaatcttcatggctgccacctgatcaaaatatcctacgacgtcttcttcgtgatcgaacccaagtccatggagaaggagattaagctacagcttcctatcgtgcttgcgacgtacccctttcgacactccggtgatgcggtcaatgccaacacctggccggaatcggtgcttaagccggacacgcacacccactatccgtccacactacccatattccggccctggctgcacgagaagcctatcgaggcatag

SEQ ID NO: 15519 - protein, 342 aa, DROSOPHILA
MPRKLLKFLIIFDNTSLLYFPGQFLSGRVLIELQDETPALGLHFHVVGEGVVRNGRRQERTYDKENYIDFRMRLLGDVDQGGPAILSPGIHSFPFKLGLPLGLPSTFLGRYGWIQFYCKAALRENNGIIHKNHQVFIVMNPIDLNLEKPILAQPFTCEVEHKLGVVCVGGGQIKCRVSLDRGGYVPGENILVTAFISNYSNVSIKRTKASLTETIEYLARGKVVQTEKRELAVLVRGKIRPGAKDEWHNELYVPPLPPTNLHGCHLIKISYDVFFVIEPKSMEKEIKLQLPIVLATYPFRHSGDAVNANTWPESVLKPDTHTHYPSTLPIFRPWLHEKPIEA

SEQ ID NO: 15520 - DNA, 5127 bp, DROSOPHILA
ataaatggctaagctattttattcttcttaaaaaggaaatgtataattttttttaataaataaaagtattttcttaaccaattttaatacatgaaaattccaaacttatattttccaataagcatttattcttatcggaaattaatcaatcagaatccaattgagcgcagcaagcaaacagtgatgcccatcgcatacgcacaaaagctattagctatgttgcacgctgtgagctgctcactgctgcgacgctccaagctagctgacagcaggtaattgctacagtcaacggtttttcgaaacacattttggatgccactagcaaatatttgttgctaacacctccgttaataatcgctatctaatcacccgtgattgctaatgcccaattgatggcacgcaatttggcaaagccaattagtattgtctcatttttacggcactcgacaagacgacggcaggcaagacgaaagacctttcgttcgataagataaatctgaaatctgcgcagtccgttgttgtgccattgtaaatgcctcttgagaacatttcctacacacccaggcgacgaacgcaccgcgagttaatcgtcgaaactgataagctgatataataactatactatatatatgacaggttgacttaacccacccagatgggcccacaaatgaaccatcgcaagcgtatgggctgttaaatggttacttaatgtttcgtgtccaacaagccgataaggacaaagtgcatcggcatattgtcaaccctatgcccattcagaagtccaaaccgatcagcagtatcgcccattatcagcgatcaaagcgatcatgacacacataaaggcaaatctattggccggatgacgttcctagatggcagtattaccaccagcactctatgccgctttatcgcctgtctgtgttcgtgagagagagcgcggcgatgaaatccgtatagtttggggactccaacgtggcaagcggcattcagttggctccagcgctttaccgtcgacgggttcgctccgctctgatccgcaccgtgttgtagcatttcagatttaagatcgtggatccacatctcgagtcacgacatctttttttggtgagcgtcgcagaacctgtttttcccagcctcgtggatttttgggcagcaggttctcgagcatccagtgaaaatccaatcgaaagatctccataccagaagtaagtgttcccgccgaatgaaaatgtttgccatgcggattcattgaatcttaattggcatcgattgatcaaagcattgcgcaccagacttgcgatccacaaaacaaacgatcactcagcccccatcagctgtggcccagtcccactttccatcgccagtggacaacgcgggagcagggtcaacaatcgccgcacttcttatcggctacacttctatttgttggtacgggtattagctatatagctgccgatggcaaggccatcttcgaggcataatcataaaagtaataaacaagaaaacaggaacattagatgcacgcagcgaattgacaaatacccttctggaacaacacacgtgactgttggattcgatgtaatcgaacgtgggtgtaatccggttatgttcgaataggagaacaagtttattttcttatcatcggatgatgcttacttgtttgtaatcatagatatactatccagtttaatagtcatgcatactcattgttctttgatatgtttgcataatactagtatgtttttgggttaccatgccgttttgtgatttaaaatctaaatagcaagagcctccagttacttttgattatattgcgcgagaagtctggccgtaatctattgtttagttataaagttataaagcagctcagctaggtaaatagtaagccataaagtttatactagtcttgtaaaaattaagctttatgcaaaagacaagcaacgaatgagtaatcaaaaatgatgaattgtttgtttgcctttcccgcaactacggcatttcgaggcaaatttgcattagcctttgttagggcatgggccataataattcgcttagggccagttatctgggcaggaagtgttttcccaccgtgagaatgccagcaaatggccggggtaaaagaattcaaaaaattcctcattgaaagttttcctctttttcagctgagataagccacattttgcccgccaacaaataaaatggatgagcagcatcagaacctcaatcaaaatggcagcgaatccaatggtaagcaggccaggatcgtttcgggacttgatcgtctgctgaagactcctccgcctggcgaacagacaagagcagtgcggcgacaagtgatcgctgttatcctggccaacgtgggtgtcttctcaacgggaatgaccctggccatgcccaccgccactctgcatcagctgaaggacaccacggagccagtgcatctgaacgattcgcaggcttcctggttcgcatcggtaaacgctctgtccgctcctataggcggcttgctgtccggtttcttgcttgacaggattggaaggaagaaatccctgatagtgctcaatgtactgattattcttgcttggattctgctggccacacccagtgagagcgaccaaaatgccttcttttggcaactaattgtctcacgatttatgctgggtaagtcttacatccgttaacaattattatctctgtagaaaaagtattatttgatgcttgaatattcataggtgttggtatgggactggccagtgcgccaccaggagtctatgcagccgagatcagtgtgcccaagacgaggggcagtcttatactgggcacatccatttcagtggccggtggcataacgattctctacggaattggttactgcatccgcgatgatttccgactgattgccctcatctgctgtggctaccagctggtggccctgctctgcgtgctgccacttccggaaagtcattgctggcttctgtccaagaagcgtgtgacggaggcgaagagatcacttaactacttccgtggattcaacaaatcgggtgagtttttcgctgacgttgagcttgatgggaaacaagataaggcctgtggaatatttattacgttccatgggaggtatacttttttaatgactttttgaatgacaaaacaaatcaaagtcaagtggagctttctatcaaatcgagcgatcaaattatgatagtccatttgtgggaccacgtataaaattgaaatcgctcgagtgcttggagttcccactgaaagtcatttcaattgaagattaatataccttatagaacggattgtataatgttattatttttcccacagatgaaatcacccatccccaagtgctcgaagagttccagcttctgcagaaatccctgcagcaaaggaacaccgcggtgaaggagtccttttggcgtaatctgcacgaaccggaggtctacaagccattggtcatcctgatgagcttgttcgccttccagcagctaaccggaatctttgtggtcatcgtcttcgccgtgcaaatttcccaagaggcgggcatcgaaatcgatcccttcatgtgcgccgtgctcattggtttggctcgcttgatcaccacatgccccatgggatacatcctggagtggtggggtcgccgaagggcagggattatctccactttgggcatgtccgtgtgcatgttccttttggcgggacatagccaaatcgagatccttaaggaagtcccatatctcccggtggtggccattgtgggcttcattgtgctgagcactctaggtctttacaccctgcccttctttatgatctccgagctttttccgcaaaaggttcgagggcccgcttcaggactcaccgtggccgtgggcatgttcatttcgttcgtggtcttgaagacctatcccggcatcaaggaatacctgggaatgtcgaattgcttcatcatttttggggtcatggctctgtttgccctgatcttcgtttatctcgccctcccagagacgcgtcgtcgaacgctcttggagatcgaggagcagttccgatcgggtcgcagtaagtctcaaaaccaggctgatgttgaaatgaaggaggtttttgttcgaaagcccgaggaatagtgcatttgggtagatatgaacttcgaatgagatgaaataacttaaatagatcccgtgaagtgcttagtactgtgatagacaataagcaacgcagacaataataaaaataagtttttaacgaagattaatgagcagctgaattttccattggtgctagctagactaaaacatcgtaataatcaagaattaaacgtttgttaagattcttttatataagttattaaattaattctaaataaacacatcaaatgaatgttttacaattataaatatggaaaatgtttgctcacataacattagattatgttaccaacttgaaattaattctcgtttgtattttaatagataatattaagtgtagaattccttgagtatattttgtttactttgagtaagcggcgtggaattaagtagattaagtcaacctaaacgacggccgttcgctgataagagactgctaggcaattttacctgctcacaaacacattctcactcactcacattagcaccccgatattttcaagcacctgctctctctctacgaagtgatatataaattagtagcacgcattcctatttcgtctcgatctaaactctcaatcatacacggaattcaatcagaacgctgctctctgtgaaagtcaagttcgtgtccaacgtcattcgtttcacgatcgaagagacggggaatggaaatcaacttaagtgcgaatgagagataaataaaaaccgtagctgactgtgtgatttcgatttccatattgagactaaacgagtatgcatacttttgtaggcgcgtccgatttacacagaaacgaatacaacattttaattagctacgtgtagggaaagaaaagtataaataaatagtttcaagaactttgaaaacgaggtgagctttcagtattttctaaaccagtctgctttgacgtgtgcctcacaattgaaatatttaagtttaagcttttgcctggtaattaattaaagcgtagcagatgca

SEQ ID NO: 15521 - DNA, 1807 bp, DROSOPHILA
cgctttaccgtcgacgggttcgctccgctctgatccgcaccgtgttgtagcatttcagatttaagatcgtggatccacatctcgagtcacgacatctttttttggtgagcgtcgcagaacctgtttttcccagcctcgtggatttttgggcagcaggttctcgagcatccagtgaaaatccaatcgaaagatctccataccagaactgagataagccacattttgcccgccaacaaataaaatggatgagcagcatcagaacctcaatcaaaatggcagcgaatccaatggtaagcaggccaggatcgtttcgggacttgatcgtctgctgaagactcctccgcctggcgaacagacaagagcagtgcggcgacaagtgatcgctgttatcctggccaacgtgggtgtcttctcaacgggaatgaccctggccatgcccaccgccactctgcatcagctgaaggacaccacggagccagtgcatctgaacgattcgcaggcttcctggttcgcatcggtaaacgctctgtccgctcctataggcggcttgctgtccggtttcttgcttgacaggattggaaggaagaaatccctgatagtgctcaatgtactgattattcttgcttggattctgctggccacacccagtgagagcgaccaaaatgccttcttttggcaactaattgtctcacgatttatgctgggtgttggtatgggactggccagtgcgccaccaggagtctatgcagccgagatcagtgtgcccaagacgaggggcagtcttatactgggcacatccatttcagtggccggtggcataacgattctctacggaattggttactgcatccgcgatgatttccgactgattgccctcatctgctgtggctaccagctggtggccctgctctgcgtgctgccacttccggaaagtcattgctggcttctgtccaagaagcgtgtgacggaggcgaagagatcacttaactacttccgtggattcaacaaatcggatgaaatcacccatccccaagtgctcgaagagttccagcttctgcagaaatccctgcagcaaaggaacaccgcggtgaaggagtccttttggcgtaatctgcacgaaccggaggtctacaagccattggtcatcctgatgagcttgttcgccttccagcagctaaccggaatctttgtggtcatcgtcttcgccgtgcaaatttcccaagaggcgggcatcgaaatcgatcccttcatgtgcgccgtgctcattggtttggctcgcttgatcaccacatgccccatgggatacatcctggagtggtggggtcgccgaagggcagggattatctccactttgggcatgtccgtgtgcatgttccttttggcgggacatagccaaatcgagatccttaaggaagtcccatatctcccggtggtggccattgtgggcttcattgtgctgagcactctaggtctttacaccctgcccttctttatgatctccgagctttttccgcaaaaggttcgagggcccgcttcaggactcaccgtggccgtgggcatgttcatttcgttcgtggtcttgaagacctatcccggcatcaaggaatacctgggaatgtcgaattgcttcatcatttttggggtcatggctctgtttgccctgatcttcgtttatctcgccctcccagagacgcgtcgtcgaacgctcttggagatcgaggagcagttccgatcgggtcgcagtaagtctcaaaaccaggctgatgttgaaatgaaggaggtttttgttcgaaagcccgaggaatag

SEQ ID NO: 15522 - protein, 521 aa, DROSOPHILA
MDEQHQNLNQNGSESNGKQARIVSGLDRLLKTPPPGEQTRAVRRQVIAVILANVGVFSTGMTLAMPTATLHQLKDTTEPVHLNDSQASWFASVNALSAPIGGLLSGFLLDRIGRKKSLIVLNVLIILAWILLATPSESDQNAFFWQLIVSRFMLGVGMGLASAPPGVYAAEISVPKTRGSLILGTSISVAGGITILYGIGYCIRDDFRLIALICCGYQLVALLCVLPLPESHCWLLSKKRVTEAKRSLNYFRGFNKSDEITHPQVLEEFQLLQKSLQQRNTAVKESFWRNLHEPEVYKPLVILMSLFAFQQLTGIFVVIVFAVQISQEAGIEIDPFMCAVLIGLARLITTCPMGYILEWWGRRRAGIISTLGMSVCMFLLAGHSQIEILKEVPYLPVVAIVGFIVLSTLGLYTLPFFMISELFPQKVRGPASGLTVAVGMFISFVVLKTYPGIKEYLGMSNCFIIFGVMALFALIFVYLALPETRRRTLLEIEEQFRSGRSKSQNQADVEMKEVFVRKPEE

SEQ ID NO: 15523 - DNA, 2832 bp, DROSOPHILA
actctgcatttaaagtaaaccactaacgtttattcgtttcgattcaagagaaaaccaaattatatataactaattatacaaatttgccttgcgatttaacagcgagcacacgatattgaatccaaaatccagatggggagcttaaaatatccgcgattaagaaatcgaatcgacacgccctcaaaagcaagatcttcttcattgtttcaaaacgaattacattttattaagatcaaaaccaaatcaaggtaaatgttatgtatgtatgatatagtgggaggatcgcgaaggacgagtacagttagttgtatgggtaaaataacatagttaaagcatataacttaatagttcaaggatcggaggagcagcgattgcgagtgggagcgcatatagaggggaacgatcgcaagtatcggaactaaaacttacttctacttaggcttaaaatcattgttatctaatctatacatatataaaaaccgacatacaacaccccacatataacagagaatatgtatatgaacatgtattggatgcgcggcgcttgagctgtgcctacttatatatatataaatatatatatatttaacaaattgtaacgtgtatatgtagcggcagtgattgttaaagaaattgctttgttttgtgttagattttataatttacgagaaaaccaaaaacaaaaattgtaaaacgcatacaaatacagaatgactgacaaaacacagaattataacattgcatataataaatacaataaaactataattgaaaaacaagtttggttaatgcttttttgctgagtaagatctgtctttaaactcaaaagatattgtagattcagaagtcactgattttttttttaaatttttacttcgcgcttagtactcgataacaaatcgtcggcgggactggactaccgactatttcaacgaatcattcgattcccgattgcttccgtgaaatcgatattttctgacccagcttcatgacatccctgttgagttgaatacgcaaaggtggcaaccttatacggcgactgaataaaataaaagtggaattgtaaattataagtgtaagcactagcaatggctgccaccccaagcgcacccgccaagtccgagatgatcgacctgaccaagttgagtccggaacagctgattcagatcaagcaggagttcgagcaggtgcgttccgcatgtgggtgtgtgatgagtcaagtgtgctcgcggagggggtttctggaggaggggcgccccaattggcacatgcttctaaaatcggtacatttttgtgatccttaggagattaccaacgtacaggactcgctgtcgacgcttcacggctgtcaagccaagtacgccggatccaaggaggcgctgggaacctttcaacccaattgggagaaccgtcagatcctggtgcccctgaccagcagtatgtatgtgccaggacgggtcaaggatctcaacaggttcgtcatagacatcggcaccggctactacattgaaaaggtgatttacatttccaatcgaacctagaatatttattgattgccatctgtttctcaaacaggatctggaaggctccaaagactacttcaagcgacgcgtggagtacgtgcaggagcagatcgagaaaatcgaaaagatccacctgcaaaagacgcgcttctataactcagtgatgagtgtgctggagatgaagcaggctgctgcagcgaaattgcagtcgcagcagcaatcgcagccggcggttacccagagctcctagactacggagaacgacagagacacgagacacggaaagcattaaattattaaacttattaacgagatgtgtgcatttaattaacgtagtttattaaattgttcagctatttcttggcttctgccaaagccttggtgagaaccttgaccttctgctcgtacgcggacttaagatcctgtagggaaagaaggtaatagtatatcaagtatatcattggactcgagttataaggcaccttgaatatctgtgactgggtgtcgtactccgaacgcagcttgtcatacactcctttggagatggctagtttcttctccgtgagcacacacttgtcttgctccgccttgatccactgctggctcttctccagacgagcctgcgtgtgatcacattcggcggtctttagctgcaacatgtccttggtcacctgcagcacatccttaatcgagtctacttgtgtcctaagcactgatatctgctgctcctgctgtttgttcaccttggtcttctcgaacagcagggttttggcctttagaagcagctcctcctgctcttgtcgtgatttgggagcatctgtgccgcccagcatgacggactgcttgagcgactgctccaactggaccactctccgctttaaacgctcattttccgccttggcttcctgcaatcagggtcagtaagtgggtgcagcccgtggagacgagtaactaacctcaaagtctttgcggagcgctccgatccgtttgcgagactcctctagtagtgcctgtttttcgctttccaacgtgaaaaccatgtccagcagttcgttctgcggctgctccggctgacgcacttcctcctgcccatttgctgttatattgttgtttaggtcaccgccaacagcttcatcttcgttatgatcggccattttatgaagaattctttttaaatgataaaaattcgtagagcaatgtgcgttttccgtgctttttgggatgtgttttctttttgtattaatagaccaaatagatgcacgctctatttataggacatcccactctccggatcgctctctgcctgctc

SEQ ID NO: 15524 - DNA, 654 bp, DROSOPHILA
ttgagttgaatacgcaaaggtggcaaccttatacggcgactgaataaaataaaagtggaattgtaaattataagtgtaagcactagcaatggctgccaccccaagcgcacccgccaagtccgagatgatcgacctgaccaagttgagtccggaacagctgattcagatcaagcaggagttcgagcaggagattaccaacgtacaggactcgctgtcgacgcttcacggctgtcaagccaagtacgccggatccaaggaggcgctgggaacctttcaacccaattgggagaaccgtcagatcctggtgcccctgaccagcagtatgtatgtgccaggacgggtcaaggatctcaacaggttcgtcatagacatcggcaccggctactacattgaaaaggatctggaaggctccaaagactacttcaagcgacgcgtggagtacgtgcaggagcagatcgagaaaatcgaaaagatccacctgcaaaagacgcgcttctataactcagtgatgagtgtgctggagatgaagcaggctgctgcagcgaaattgcagtcgcagcagcaatcgcagccggcggttacccagagctcctagactacggagaacgacagagacacgagacacggaaagcattaaattattaaacttattaa

SEQ ID NO: 15525 - protein, 168 aa, DROSOPHILA
MAATPSAPAKSEMIDLTKLSPEQLIQIKQEFEQEITNVQDSLSTLHGCQAKYAGSKEALGTFQPNWENRQILVPLTSSMYVPGRVKDLNRFVIDIGTGYYIEKDLEGSKDYFKRRVEYVQEQIEKIEKIHLQKTRFYNSVMSVLEMKQAAAAKLQSQQQSQPAVTQSS

SEQ ID NO: 15526 - DNA, 3016 bp, DROSOPHILA
aattagcgtattcccaaacccctgtcatgtccgctagcaatattgtattagtgaagcatttcaacatagttttgtatacttatatactctatactctagagcataaacttagccgtaccaccacataaacatctgcctaagttaagcacgcattattatacttgcatagtcagaatctgaaagatttacccccaacattttgaataacgcgccttggcgctactacagtcagcgatatacaagcatatatatataaattgtaaacaaccaagaaattagtatgtaatatgaacaataaactaaagacttcgaataaaataacaataaaccttaaaatattgaaatctgaacgcatcaatttggttacattttatatacatacctgacttttttcttgagactactgatccaacagaaagatctttaacttaaaagcatttcttacaaggtaatttcagcgccgacttttataaaaaagccatcgatggcttagtatgtatcgatagtaatcgatagctctttttgctcttttctttaaacaattgacattcccaatttttccttgagctaaaaacttaataatcgacagtttcagttcaaaatgtacggatttaaagtaattcctaatttgtgacgtttttatttaaaaaattgtaatagaaaaatcagtattgaatgaaatttcagttattcaaatgaagccctattgccttatttaaatttatgttgtaagatgtgtgtcccatggctgaacataaaactgatttgtaattaatgttcatataaacttcccagtagatgacagccggttccgcctaatagagaaacgacgacttctctcgtcttcagtttatcccaagtaccagaatgtggaggacttcgcacatatgtattacgcgaagcgacaagacgtacatttcgaatgaaagtctttatatttggttaatttgttgtatttgtaaaaataaaagagttgtgaggaatttcccacgatgacaactcacgcattcttggcgcaccgaaaacccaggttaccggctgaactgtcttctgtgttctgcgagcgtgccgcgcacctgtacctgtagcagtaggacttgtgacacagataagaaccgcccttcttgacccgatttggattatcgctaacgtcatttacgtcccacagatctgccgtccactcccagacgttgcccaccatgttgtgcaggtcgtaaatattctgtcggaaggcatccacggggctggtgtactcaaacccatcttcagccaggttgccatcgggaaagtctccctgccagatgttcagccaatgttcattccttggcatcagcttgttgccccagggaaacagtttgcgctccttgccgcccctgcaagccgcctcccactccgcctcgctgggcaaccgcttgccggcccacttacagtactccacagcgtcgcgccacgatacgtgcactaccgggtgtcggcctaagtggtctatatcgctgtccacgccatttggatgtcgccagttcacgccggccactttgtaccaccagacagcgctcgccactcggaagtcctctaggttcttctgctccaatgggctcaaaaggctcttaaacagaaaactgtcgccatatcgctcagcctccgtggtgtagttagtgtgcagaacaaacttcgcaaaggcttcgttggaaacctcatacttgtcgatgtagaagtcattcagcttcacctgccgttccggagcctcgcggtcggccggaaagtgcggtttgtcagtacccatgtaaaccgtgcctcccggaagcagtgacatgtccgcaatatttggctccagttcgccatagtaatcccggtagtggctgtgtgcaccctgtgctcgttgctggcacacttgtccggaaatggacggcatatccggggccttccggtcgagcttttggcagccacagtcgctggatacgtcattgaataaaactatccaaataaagaggactaatataattgttgtcatcttaacgtgcagtgtggccctttttagttttggaatcaatacttaatttcgcgaatttaaattccgaacaagccagctttttaatagcatactttaggctgtaacgttttaaacaatttatttcaatttcaacaaccatacttttgggattattattattattataaccatttagtagtagttagaaggttaatgagtgcagttttaccattttaataatatataacctacaatatttaggttttataaaaagttatgtatatgagctaattataatttatcaaagtctggtctttatgttaactttcgtttgtatttgttataaattcttcaatcatgaacaaatttttgggaacggaagacctacaaatgcaaagaccagaaacattaaaaaacgttaagtataagttaaataagtttaaattgttgtatggcgcaaatcggtcttaacaagttgtgatacacagcaatcctaaaagctgcgggctatgcctcgataggcttctcgtgcagccagggccggaatatgggtagtgtggacggatagtgggtgtgcgtgtccggcttaagcaccgattccggccaggtgttggcattgaccgcatcaccggagtgtcgaaaggggtacgtcgcaagcacgataggaagctgtagcttaatctccttctccatggacttgggttcgatcacgaagaagacgtcgtaggatattttgatcaggtggcagccatgaagattggtcggcggcaggggtggaacgtaaagctcgttgtgccactcgtctttggcccccggacggatcttgccacgaactaaaacagccagctcccgtttttccgtttgcaccaccttcccccgcgccaaatactcgatggtctaaataaaatccaaataagatcaaaatggatgaattgtaactagccacttgaaagcgataccgacctcagtgagggatgccttagtccgtttaatggacacattactgtagttggatataaatgcggt

SEQ ID NO: 15527 - DNA, 1016 bp, DROSOPHILA
ttaagatgacaacaattatattagtcctctttatttggatagttttattcaatgacgtatccagcgactgtggctgccaaaagctcgaccggaaggccccggatatgccgtccatttccggacaagtgtgccagcaacgagcacagggtgcacacagccactaccgggattactatggcgaactggagccaaatattgcggacatgtcactgcttccgggaggcacggtttacatgggtactgacaaaccgcactttccggccgaccgcgaggctccggaacggcaggtgaagctgaatgacttctacatcgacaagtatgaggtttccaacgaagcctttgcgaagtttgttctgcacactaactacaccacggaggctgagcgatatggcgacagttttctgtttaagagccttttgagcccattggagcagaagaacctagaggacttccgagtggcgagcgctgtctggtggtacaaagtggccggcgtgaactggcgacatccaaatggcgtggacagcgatatagaccacttaggccgacacccggtagtgcacgtatcgtggcgcgacgctgtggagtactgtaagtgggccggcaagcggttgcccagcgaggcggagtgggaggcggcttgcaggggcggcaaggagcgcaaactgtttccctggggcaacaagctgatgccaaggaatgaacattggctgaacatctggcagggagactttcccgatggcaacctggctgaagatgggtttgagtacaccagccccgtggatgccttccgacagaatatttacgacctgcacaacatggtgggcaacgtctgggagtggacggcagatctgtgggacgtaaatgacgttagcgataatccaaatcgggtcaagaagggcggttcttatctgtgtcacaagtcctactgctacaggtacaggtgcgcggcacgctcgcagaacacagaagacagttcagccggtaacctgggttttcggtgcgccaagaatgcgtga

SEQ ID NO: 15528 - protein, 336 aa, DROSOPHILA
MTTIILVLFIWIVLFNDVSSDCGCQKLDRKAPDMPSISGQVCQQRAQGAHSHYRDYYGELEPNIADMSLLPGGTVYMGTDKPHFPADREAPERQVKLNDFYIDKYEVSNEAFAKFVLHTNYTTEAERYGDSFLFKSLLSPLEQKNLEDFRVASAVWWYKVAGVNWRHPNGVDSDIDHLGRHPVVHVSWRDAVEYCKWAGKRLPSEAEWEAACRGGKERKLFPWGNKLMPRNEHWLNIWQGDFPDGNLAEDGFEYTSPVDAFRQNIYDLHNMVGNVWEWTADLWDVNDVSDNPNRVKKGGSYLCHKSYCYRYRCAARSQNTEDSSAGNLGFRCAKNA

SEQ ID NO: 15529 - DNA, 15372 bp, DROSOPHILA
agtcttgtcgtggatgcagcgcggatcgatatcggagctaaaagcagcggaaggcgctgctaagcaaatttcgacacacaacatttttgtatccctcgaaattgaaccgaaaaatctgcaaaaataaattcaaccaaccaacaaaaacgaaaaggacgcgtcgcgctaaaatccagcccgaaaagttacataaagcaggagcgacaagaatatcgtgcaaattcaaaggaataattgtgtaattgaaaaatctgtgtgcagtctctgcaactaatttcgtatccaatcaatagttcaatcaatacgcataaataactgattgctgtggaatcaaccgcagtaaagcgcccattttaggggcacttgctgtgaggtgcttagaaaaattttcgcctacatttgcgatatgcagtgaaaattttttccgatttttagtatgtacatgtacgatggagcgctcgtgggcgccacaaactgcggtggcaggggtatccggcgagcttttggcccaaccataacccccagtattactaatacagccgactcggtcggagaaacggttgtctgacaaagtatcgatgcaaaatatgcgccgttttgaatttaattgccaaaaattatgcaaatcaagtatacaaaatgccgaaaactgaaggtgctgaacattaaggaccaaaaaaatcaggcgaaatcataagcaataatcggtgcagtgccgttaacagtcgacgtgtaccgttaacatccgcagccaacttcgcgtggccgagctttcgctctcgcgcgctcttacgctctctcttggcaggcgcggataaaacggattgccgagtaacaccaacacaaggacacgcgaaaagctcgcgctcaaggactggaatacgcgacagaaacacagcgagtgagagagagagagagggagaaggacactttacgtttacgcgcgcaacgtgcgtaggtgcctctgtgtgggtaagcccgagtgccaccgtgcgtgtgaatgaaggcgccacatagtgcaacatatcaggataactatgctgatgcggccatgacagccaggacacggccaagcatggacatggatcagcagcgaaatcgaaatcaggcggagctgaggctcctgcccgcccagcgcacctccacctccgcctttgaatcccccgacttgcggttcaacaaggctcgccgccggcggagaagcgagcaagtgcctcccgtggtcgtggaataccgtcgctcctaccgcgtgctcatcgtcagcgccctgctggtcagtctggcggccagtttcgtgacgctcagcgccggattccagctagatggatcgcaaaactccttctacaccttccgcaagtggtacaccggactgaatgggaccctcgaactggagttcaaaacggaacagcccaacggattggttctctacaccgacgacggcggcacctacgacttcttcgaactgaagctggtggaaggagcactgcggctgagatataaccttggtggcggagctcaaatcatcaccgtgggtcgggaactgcacgacggccactggcacaaggtgcaggtcctgcggaacgatgagcagacatcgctcatcgtggacggcgtctcccagcagcgatcgaccaaggggaaggagttccagttcggcaagttcgcgagcaactcggacgtctatgtgggcggtatgcccaactggtacagcagcaagctggccctgctcgccctgccatccgttatcttcgaaccgcgtttccgtggcgccatccgcaatctggtctacgcggaccagccgggcggctccaccaggcgccaggagatcaagcagcagcgcgacatcaagtgcggcgatgtgccctgcgatcacggagagctgcccgcccgtgaaaggccgctcagggtgagtccattagtcattgatatacacaatacaactttttatattctatttaaatgatattgataataagaaaaaagcctctatttatatgtatccctgatttggtaaataatcctttaatcctgcagggtgttcggggtggcaacacaaccgatgcctgtgaacggaatgatccttgccagcacggcggcatctgcatatccactgattccggtccaatttgcgagtgtcgaaacctcgagtacgatggccagtattgtgagaaggagaaggcgccatcggaagcaacgttccgcggtacacagttcctctcctacgacttgggccagacgggcgccgagccgatagtgagcgcccaggatgccatatccttctattttcgcacccgccagccgaacggtctgcttttctacactggccacggcacggactatctaaatctggcgctgcgtgatggaggcgtctccctgaccatgggtctggctaatggcaagcaggagatgcacataaagccctcaaaggtgcgcttcgacgaccaccagtggcacaaagtcaccgtgcaccgtcgcattcaggagatctcctccataaccagcttctgtcgggtgggtaactgttcatagattttcttggttctttattcgaaatggagttttttttatccctgtagctggttaccgtggtggatgatgtctatacggatcactcccacattgctggcaagttcaccatgctctcctcctcgcgggtttacgttggtggtgctgttaatcctcgagcgcttttgggtgcccgtgtgcacactaacttcgtgggctgcctgcgcaaggtggagttctcagcggatacgcttaatctgaacctcatagacctggccaagagcggttccaagctgatccaggttgctggcaatctggaatatcagtgccccagtggcgatccacaggatcccgtgaccttcaccactcgcgaatcgcatttggtaagttgaaacctgtatgaaaatacgaaaagtaatgaattaatatttgattgttattttaaaggtccttcctccctgggaaactggcaagcagagttctataagcttcaaatttcgcaccaaagaaccgaatggcatcattgtcctggccacaggatccaagcaaccacgggccaaaaacgtgagtctactcattaggttatcttgagccattttgcataatttgaatccatcagcccgttttgattgccattgagctgctgaatgggcacatctacatccatttggacctcggatccggagcctccaaggtgcgagcctcgcgacgtcgcgtggacgatggcgactggcatgacctgattcttcggcggaatggacgcgacgccaaggtgagcgtggatggggtgtggaacgacttccggacgcccggtgacggcaccatcctcgagctggacgggcacatgtacctgggcggagtgggtcccgcctacaatagcgtgtcctggccggcggccatttggacggccacgctgcgccagggattcgtaggctgtttgcgtgacctggtgctgagtggcaaggcgatcgatatagcggcatttgcacgtgtccaggattcgggtgagtagtcacgccagcgatggtcatccactgatagcgcgtaacccgatacttgtaacccacttgggcacacagcctccgtgaagccatcatgccatgtgcaggccaacgtttgcaacggcaatccctgcctgaacggaggcacctgcctggagggctggaatcgacctatttgcgactgctcggccacgctgtacggaggacccacctgtggacgggaactcgccacgctggccttcaacggcagccagcacatgaccatctggctgggcaatggacaaggcaccaagacgcagaccgaggagctggtcatccgcttcaagacctcgcgtccggcaggactcctgctgttgaccagcgcggagtccaactcgccggatcgtctggagatcgctctggtggcgggaagggtgcgggccagtgtgcggttgagcgatcgtgagaaggtaagtctttccgtgggaggtgctcaacgtggcaacatttgtccttcgctccagaaaatcacctttaactttcagccttgggtaaatagtattttattttagttatgtctgtattgtaagcccaaggtcaatgcaaaattaaatatgattttcgagggcattgggacagctttctgagtgtgtgataatcccttccagaacttgctggccggccagtcggtgctcaacgacaacaactggcacacgatccgcttctcgcgcagagcctccaatctgcggctgcaagtcgacggggctccccccgtcaggggtatgttatgtatgtatcaacagcacatctatgccctactacgtgtcgtgccgtgtcgtttttttttaccaaccaactgaaccaaccaatgaaccaaccaatcgacaacctaccaacccccttcgtaggctcataggatacccccagcgattagcttccataaaaggtgctccacgcaccgctcgcaggttcaagttcaagtaggaatgccaatggcctctcggcaggaaggtgtgtgaaggtgcttcaggacggtcaaagagagaaaaaaaaaatgaagacagcaaagtgtttaagaagatgaagatacaaatcagaagaaagtaataataacagtaggggtgggagaaagtcaataaaggaaagtgcagtcagcggcgcgttttcctgtttttaagttccacttaaacttttcagttgagagcttttcagttaacaacgattctcacaccaacacagcccacagcctcacgaacacgcacacatacgaacacatgcgattacacctgaaaacgaaatgcagtgaaaatccaaatcgaaacagaaaataaccgaagaaaatcaacaacaaaaaaaaagtaattagcaagataaatttatctcccatttctcatgacacatttctcgaacttccttactccgacaatgatgaactgatttgatctagacagctctgtatccaccatccaaactatccacctatgtctaccccgctctatatctctgaacatcgttaagcatctgcaaaatatatagttttgaacatcataagacacccgactccacttccacaccattccacacattgtacgcctctccgaaagtttgtttgaatcatatgtcgaaggtcctggccgatcgggatccttcgattgcatactcaaataactcattcgtaatgattttttatatactttgctcttgtaatctcctctcaaaactctttcaaacatctcgatgttgtgtttttatttgcgatacctacttacttacttacttattcgtttgatttcccaattgcgattgccaattaaattccaattacaattcaattccaattcctaagcccacacagaaagtattataatcgaataatcgtaaatacgaaagcaaagaaagttggacagctgtaaagtttcagccttaagtgttttgactaccattatattgattgtcttgtaaattgttttgtccttgatattcgagtgtattatttggtttttatttaagttcttgtaattatgtttgcctttgttttgccaaggaaaatttttatgttcctcaccagatgattttcataaagtatgatatatgatatatatgataacagtactttttcgtatccttataatccttttattttcaaaatgtattttaatatttaccattcggattcttgagtaatcctttggcccagctcaacatctttcttgtttgttttatttatattttttgtaaatatctatcttgtaaaatgagttctcgtttacagtcctatgataatctaaacaatgaaattaactaaaacaactgctgtaccataacttaaacgacacgtgcggtatgtaaacgttaaaaggtgtttgtttcagacttctaccgaatgtgtagaacagcgaacaacagccatggtgtttcgagcaccacaacatgtaatatcagtgtcatatgcaaatgcaattcccctatcacgagcgtgatctaaatgaccttcttttgaaatgaaagcgaaatgcgaccgagccagaaaaataataatgaaatacaaagaaaataaaaagaaaaaaactaaattaatgagtaaggcgaacaatgcaaaatgacgggaacgcagcgtaaataattcctaagtacaatatcgtttttcgtttcatgttttaggcgagagaaaaaaatcgacacgcaagaactcggggaaacatttttttgcccaaatcgctcgatgaaagtcacgctatcggcaaattgcgattgccattggaaaatggcattggtattggtacgagtgttcgagcctcattgagtcgagagggcaaaacaatgtttgaaagcgcccagggctgtaattttgcaccatttaatatgtaattagctttgtgttaagtaaactcaactatcgtaaacatcaatacaacaataccgcaaccgcaaccaaattgcaactaactaatcaagcctaacgtgtctcacgtaaaattagattcttgttgtgtaagtgtgtccaaaaaatgaaaaataaacacccaaacgaagagaaggattaactaaaggcaggcgatggagaaggctataatggaaaactaaggatcaatgttaaaatatttcattataaaaaatttttgttctttaaaaacgaattattcgtgatttaatgataaattataacaacaaaaaaagaaattattaaatatcttaacattcaaatatataaatctcttgatattttacaaactatcctaacggcaaaataaccatgatatcagaatgaagaatgaaataaatatgagtttgtttctttaaaaatttagaatgagttagaagtttccttacagccggatcctgctcctgcctcaaggaaacaaacacacacactcacacaatttgtgaactgaaagtctagcacacctgcacaggcacacacccacactctatcaagcaccgttgcacggaagtactcacaaacacacacgtgacgcgtttgcatgtgagcacctgaaaaccaagcagcagcccgagcaatgaaactgtgataataacccataaagtaacaagcaaaaccaatggctgtcagtcggaatgatatagcccacatactagaccgcatgacctgcccacgagccaaagtcgggctgcatagcccttctctacagtgtatagtgtatatctttgtttcgtactactatcgcatatcgtatagttcgccatctcatcgtatcatttagcccactcagccattcaagtgtatgaataagtaactgtaaatgcgccaaattgccagctgcaacaacagtgccctacttcgaattctgcccaccgcccaccacatcgcctactctctttctctccacctctattgttctctctctctctctcttgctctctctttctctttattgctatgtagcactggctgtttctgtctctgtcgccgcagtcatttgcatgtcaagatgtcaatcattcggtgggccaacgcgtcgtatgcgcaatgtggtcgctcgttaaggctaatgcacccttattaacttagacgtagtcgccgcacacacacacacacacacacatacagtcaaaacacacatacacacacatggaactctctagggcacagattaacacatttccatttacatttacagaaaacatggacagtttaccaatacccagatacccatcgatgtttagttcaatgtcgttgagcaatgaccaaattacttttggtttttattgaattatccccgttattaccgaaataatccctgaccttttgagttgccattatttctagaccgtaggttgcctcaaactttttccatacttttacttttcctcggttctccccacgcacagctgagaaataaaaactcaaatgaaattatctgaaatgtcaccgccaccgtaatcgtattgaaaatgtatctcacacaccaaaactagactaagaaaaaatgaaaaaaaaaaaatgtattcctcaaatgtcaatcaatgcatattcttatgtaaacaagaacaaaatgcgcaccaactaacctaatctaaccaacttagcgatctctttactttacttactttcctttggtttgcgctgtggcagcgattttcgattatcgatttcgtttcgtcttaattaacaactacaattactatccgtaccagtacattgtatgtaatgtaatctgcacctttctttagtatgtaccaagctgcaacaactaaataataacaatactccaattgaattccaattacattcagccacttgtcgagtgaaaaatacaaatgcttgaaaaatctatgaaccaacaaaactagatctatgtctactaaaaccgcatacctatatctactctatactcttatatactctttgacatttgcgtatgtgcttcttgtcaccaactatactccatatactactcgtaccaacaacctatatatatatatatatcaatatatctatccaaccaaacgtatacccatatgtaaccaatgttaacggtactccgcctagtcaacaacttagagcaaagccgatcctggctagacaaaccccatggcgaggcccccgagttttatccatttcttgttcttggaaatattccttccacagccgaaacgattctgggtcgccacagtaccatggagattcgctcggttcacctgggtggtctcttccacgccgaggaggagatccagatgacctccaccatgccgaactttgtgggtcagatgcagggcttggtgttcaatggccagcggtgggtatcgatgtagcatacttaaggaattgatctcaatttcgttctcttctcacccagctatttggatattgtcaagagtctgggaccggagctctcggctctgcccagtgccaccttcaagttgactgcccgcttcgtgaactctccggccggacagccctaccatgcagccacgttccgctccaagcactcatacgtgggtctggccatgttgaaggcctacaacagcatttccattgatttccgcttcaagaccgtggaacccaatggtctgctcgtcttcaatggcggacgacgcaacgatttcgtggcagtggaactggtcaatggtcacatccactacactttcgatctgggagatggtccagtgacgatgagggacaagtcgcgcatccacatgaacgacaaccgctggcatcaggtcagcatcaggcgcccgggacccaagacgcataccctaaccgtggatgactccttcgagattatcagtctgactggaaacaatatgcacttggagctggcgggtatcctgtacatcggaggcgtcttcaaggacatgtactcgaagctgccggcctcgatctcgtcgaggtccggattcgaaggctgtctggcatccctggacctgggcgatgcctctccctcgctgaccagcgatgcagtggtgcccagctcactggtggtcagtggctgcgagggacccaccaagtgtagccagaatgcgtgcgccaaccgaggaaactgcgtgcagcaatggaatgcctatgcctgcgaatgtgacatgacttcctacacaggacccacttgctatgatggtaatataaacattctactgtcttcttctttgattcataatatattatgctctttagaatcgattgcctacgaatttggcaacaacaagggcatggtgcaatacacattcccggaaaacgcacaagctgacacggaggaggataatatagcactgggcttcataaccaccaggccggatgcagtgctactgcgggtggagagtgccaccacgcaggactatatggagctggagatagtggagggcaacatcttcatggtgtacaacattggaagcgtcgatttgccgctgggcgagatcggaacgaaggtcaacgacaacgcctaccatgtggtgcggttccagcgcaagggaggcaatgccacgctccaactggacgactacaatgtgcaggcactgacgccacagagtaagtaaacaaggggatagatcagcacagggggtatctaatgctctaccgaactttcttctccaacgacttgcaggccaccactccaccgtgttcaataccatgtccaacgttcaggtcggcggcaagttcagccggaacggtcgcaatcgaatcgagcggccgttcgccggcgtgattgccggactttcggtgaacaagttacgcatcttggacttggccgtcgaacgcgacccccatatcaccatccgtggagatgttcaattggtaactggagtattagatagaaatgatctgcagagaatgcagcaggttagggaatttatttgaaattttatttgaattcctctcaactttcaactttccaagtatttttctcatcgtaaaccaagtttattcgaaattctttctttgattaaaaaccaaaacaaaaaaaaaagaaaccaaaatgaaatctaaccaaaattgttgtattaatccgcttcatgagttgtggaaccccttttcccaaattgatttgacatgatttgattgcaccactgaaattcgaaaacccattcgaatactcgtaatgtacagttcccgagcactatcctgatatttgaaatgcatatccgtgttaatcgtatcgaatgtaaccgcatctgtacattgaagtcatcgtcatcacaatcaaatccgggaaattcggttcgacattcagtacaaacgttaaccgttccaactaaaccaaagtattagctaactaactgtataatctagtgtaaatgctgcatttgaatttatgaatttatgaacttatgaatttataatttacctcgggtgccttcgttttttaatgtaccgctttgaacgcaccaaccaaataacaaaagccaattaagatttgccagatttttcactaaccagccatttgagtttcctcgatttgtttccattgctgcacagcacattaaccaataactgtgaatatatataatcagctatataaactgatacgaatttactatgcactagaattcgtcgcacttatgctgcatgactctaatcaaagctcacactgaaacaaaagcaagtgatagccagtggagaaagaaaagtttgaagaaagaaccaatgaaagaacctatggacctactcataaaattaaataaataataatctgaaagaagcttctccattggcttaatgtgcccacacccatccacacatatatacttaatcgaacagcacctaacaaacttactaatccagttaacaaaccccatacaataaccatcgcttggcccggctgccgccagatcaactgaagtaaaattagactttgaactctactcgacagacgccggcgagtggttatccgggtgcgctggacgatctgatcttctcgggagccggatccggatgtcgcggcgacgacgaggacgagtgcacgccgccattcgaatcgggtagcggggatgatctcataacaccggtctacgtgccgcccaccaagcagacaaccacgtcccagcaggggaatagcttgagtaccggcgggagcagcagcggcggtgtcatcaccaatggcacggagcgtgcctgcgacgacgaggattgcgtccatggatccggggattacggcgagaccacggaacagttcacctcgacgagcaccgcccgcggttcaggtgagtggctacagcgttgtgtgttggtctcattttgtcattggcatttggatcaatcacggaaagacacaaaaacaacaagaatctacaccaagcacacacacacgcgcacacacttcatcacagacattagctagccccactcgaaattcaagttaagtgtacgccattaagtatacgccctagtaacgtagataacgtgttaacgattaagctgtgggttcaattgtgttcgagttgaagttgaagtttgagttcgagttcgagttatactctatatatatatatgtatattcgaagctcttgctctatataaccgcataaccgtttagctagtgacgctttgcctttttcagttcagttgttcaatgctccacggagatcgaggaagttaggttattgccaatgcaacgccaatgctttgaacgcttacacaataaaacaatatatatatatatataaatatatatgaatatatgttcagatatcgcctctatcgcacccctcgcaatgcatcaacccaaccagaaaccaaaatcaatcaactcgccgtgtcatctcagctcagatcagcccagaaaaaacaaaaaaaatatatatatatgaaaagtatcgcaacaatcgtcgcctatatccttcatctccacctgttgccgatgatcgattgccttctaatttgaactgacaacgagtacgccttatgtgtctctttcagaatgtgaaatcgccttcatatttctgactgtgatcgcgccatggatactctgtaaattcccataagcaaacagcaaaccaatgcaaccaatgcaagcaatgcacttaggctaagcttccaactagacctctgtctaactgtatgactaactctagcattaacgagagctaaaccaccagcaacagcaaccaatgcaaataacaaatgcaacttcaacagctacaacaacaacaactataacagccagaaccacaacaacaacaaccacaccgatcattggcgagggtttttggttgagtgagggttaagcgttaagcgataagggttaagttaaatgcacccaccaccttgcatatataccgtatatacatatatgtatagtatatatgggtgcaccgatcgaagatgtatatgttttgtacatagtagcgataaaagcagcgtctgcaagtgtaagatgtgattttcccagtccagttccttattcaccatctcctcctcctccacatttattccctcgattgcataactctaccgttcttccaattccaatttgtacatatcgtgcgaatagatcgaaggtccagcacccaaaacaacaatgacacacctcaacatatctctcaatatctacaaatctctaatcctctctaactgtgttgaataaactattgaaagcaaagcacaactggcggttcaagtgatttttgggagggaaagatgactcaattaaaggtttccgaagtaagcactttgaatcaggattccgtttattatgattagtttctaaaattctataataaattcttacatattggaagagaaattgtgaacccatggagaaaatttaaaatatcatttattccttggggaataatggggttttaagaaatatcgagggtagcaatgcaaccactaagcgcacaaacacactcgcaacaaacatacaagtatagagcaccccacttgagaacacttgaataaacccaaaccgactgcttgcagagtccaacaacgagatggtgaccattaccaccacgggacgcagcgatgtgaccacggagcagcaccaaggcagcagtagcagcagtagcagcggcagcactccgtcctacgcaaccacgcagtcgagcagcagcagcagcagcggcggatcggcagccagcacgccgggtcaggtgagcacgaccagcagcgtggccacatcgtccacgcaacgggcgactagcagcagcaccagcacgagcagcagtacaacttcgacgaccacgacaacgaccaccactcaagccacaccgccaccggagatccggagtacggtcaccgagcgggaaaccacgccctatgatatttatatagctggtggcggcatgggtgggtccgggcgaaatgatcacgatcgcatgcagctgccggacgagcaccacccactgccaccgttgccgccacccattccgccgcaagatccacctccgtacggaccttatggcggcaacacgtacaacaccaacatgaacaactaccgtccaaagggtaagggcggcagaattaactcgatcgaggaggagcgtaccgccatgataatcggcatagtggcgggcatactgatcgcagtggtgctggtcatcctgctggtcctgtggctcaagtcgaatggcgatcgtggctacaagacggagagcgagaaggcggccgcctacggttcccacaatccgaatgctgcactcctgggaaatactagcaccaatggatcgtaccaccagcagcggcagcaccatatgcatggtggcggaggcggtggaggtgcagggcaacagcagcatcatgcccaacagcagatgcacaatgggcacaatggtaatggaaatggaggaggcggcggcggtggcggcatgatgtccagcggaagtgggtcacttggctatggcagcgatgggcgaccccagatggcgggcctggtgcagccgaaggccaagaaacgcgactccaaggacgtcaaggagtggtatgtgtaaggcggcatggtcgcagggaaatatcgtcaaattagcaattaatagtgcaaagtgagccgaaagtgaaagtgaaagtaaaagtccccctaagatacgagaaacaaaaaaaaaaaaaaacacacacataagcgtatataaatatatttatttagcagcctcgtaacgttaattaaacaattagaagcggacgcagtcggacattgggtgtacaaacggaaacggaagtggacggaaggataataatatgtagatggcgccttgcgcagctcggtaggtgggcatcacgcgattcacgatggctgataacgttagcagcaagcagatagagcagatagccggtagcagataaccgatagcagatagcagatagacacgcaaatactttagacaagtgcatctggccaggagcattggttcacagcaaaggtaacgtttagattacgcctaagaaattatagcttcaactcaagacttgctaatagataccactaccactggagagcagccacaaccatcagcgaataagcaaattacactaaacgtataaaactatatatattatatatatcacagcgttacgataaattatgccactagccaatcaagtaattgtgtaaaatatttcgccacaaagtatgctatgaaaagatcgaaggaagacggcccaaaaccgaaagcaaaactaattaaactgcaaatcttctagcgaaaccactaaacaatttagcagaaattcaatataaacgtacttaaatatatatatttatatgtaaacgtaaagtaatgaggttctgagtgggttttttcttcgcgtgtaaagttacaaaatgtggtgctgtaaacgtaggagacaaactttggttgactacaataatagtaataataataataatgatgacggggaatgcaagaatttatgctacagattgtttgttgaattgaaaccggctttaattagttaaaatgtaaatgagatagtggtaaacctaaaggataacga

SEQ ID NO: 15530 - DNA, 5514 bp, DROSOPHILA
atgaaggcgccacatagtgcaacatatcaggataactatgctgatgcggccatgacagccaggacacggccaagcatggacatggatcagcagcgaaatcgaaatcaggcggagctgaggctcctgcccgcccagcgcacctccacctccgcctttgaatcccccgacttgcggttcaacaaggctcgccgccggcggagaagcgagcaagtgcctcccgtggtcgtggaataccgtcgctcctaccgcgtgctcatcgtcagcgccctgctggtcagtctggcggccagtttcgtgacgctcagcgccggattccagctagatggatcgcaaaactccttctacaccttccgcaagtggtacaccggactgaatgggaccctcgaactggagttcaaaacggaacagcccaacggattggttctctacaccgacgacggcggcacctacgacttcttcgaactgaagctggtggaaggagcactgcggctgagatataaccttggtggcggagctcaaatcatcaccgtgggtcgggaactgcacgacggccactggcacaaggtgcaggtcctgcggaacgatgagcagacatcgctcatcgtggacggcgtctcccagcagcgatcgaccaaggggaaggagttccagttcggcaagttcgcgagcaactcggacgtctatgtgggcggtatgcccaactggtacagcagcaagctggccctgctcgccctgccatccgttatcttcgaaccgcgtttccgtggcgccatccgcaatctggtctacgcggaccagccgggcggctccaccaggcgccaggagatcaagcagcagcgcgacatcaagtgcggcgatgtgccctgcgatcacggagagctgcccgcccgtgaaaggccgctcaggggtgttcggggtggcaacacaaccgatgcctgtgaacggaatgatccttgccagcacggcggcatctgcatatccactgattccggtccaatttgcgagtgtcgaaacctcgagtacgatggccagtattgtgagaaggagaaggcgccatcggaagcaacgttccgcggtacacagttcctctcctacgacttgggccagacgggcgccgagccgatagtgagcgcccaggatgccatatccttctattttcgcacccgccagccgaacggtctgcttttctacactggccacggcacggactatctaaatctggcgctgcgtgatggaggcgtctccctgaccatgggtctggctaatggcaagcaggagatgcacataaagccctcaaaggtgcgcttcgacgaccaccagtggcacaaagtcaccgtgcaccgtcgcattcaggagatctcctccataaccagcttctgtcggctggttaccgtggtggatgatgtctatacggatcactcccacattgctggcaagttcaccatgctctcctcctcgcgggtttacgttggtggtgctgttaatcctcgagcgcttttgggtgcccgtgtgcacactaacttcgtgggctgcctgcgcaaggtggagttctcagcggatacgcttaatctgaacctcatagacctggccaagagcggttccaagctgatccaggttgctggcaatctggaatatcagtgccccagtggcgatccacaggatcccgtgaccttcaccactcgcgaatcgcatttggtccttcctccctgggaaactggcaagcagagttctataagcttcaaatttcgcaccaaagaaccgaatggcatcattgtcctggccacaggatccaagcaaccacgggccaaaaaccccgttttgattgccattgagctgctgaatgggcacatctacatccatttggacctcggatccggagcctccaaggtgcgagcctcgcgacgtcgcgtggacgatggcgactggcatgacctgattcttcggcggaatggacgcgacgccaaggtgagcgtggatggggtgtggaacgacttccggacgcccggtgacggcaccatcctcgagctggacgggcacatgtacctgggcggagtgggtcccgcctacaatagcgtgtcctggccggcggccatttggacggccacgctgcgccagggattcgtaggctgtttgcgtgacctggtgctgagtggcaaggcgatcgatatagcggcatttgcacgtgtccaggattcggcctccgtgaagccatcatgccatgtgcaggccaacgtttgcaacggcaatccctgcctgaacggaggcacctgcctggagggctggaatcgacctatttgcgactgctcggccacgctgtacggaggacccacctgtggacgggaactcgccacgctggccttcaacggcagccagcacatgaccatctggctgggcaatggacaaggcaccaagacgcagaccgaggagctggtcatccgcttcaagacctcgcgtccggcaggactcctgctgttgaccagcgcggagtccaactcgccggatcgtctggagatcgctctggtggcgggaagggtgcgggccagtgtgcggttgagcgatcgtgagaagaacttgctggccggccagtcggtgctcaacgacaacaactggcacacgatccgcttctcgcgcagagcctccaatctgcggctgcaagtcgacggggctccccccgtcagggccgaaacgattctgggtcgccacagtaccatggagattcgctcggttcacctgggtggtctcttccacgccgaggaggagatccagatgacctccaccatgccgaactttgtgggtcagatgcagggcttggtgttcaatggccagcgctatttggatattgtcaagagtctgggaccggagctctcggctctgcccagtgccaccttcaagttgactgcccgcttcgtgaactctccggccggacagccctaccatgcagccacgttccgctccaagcactcatacgtgggtctggccatgttgaaggcctacaacagcatttccattgatttccgcttcaagaccgtggaacccaatggtctgctcgtcttcaatggcggacgacgcaacgatttcgtggcagtggaactggtcaatggtcacatccactacactttcgatctgggagatggtccagtgacgatgagggacaagtcgcgcatccacatgaacgacaaccgctggcatcaggtcagcatcaggcgcccgggacccaagacgcataccctaaccgtggatgactccttcgagattatcagtctgactggaaacaatatgcacttggagctggcgggtatcctgtacatcggaggcgtcttcaaggacatgtactcgaagctgccggcctcgatctcgtcgaggtccggattcgaaggctgtctggcatccctggacctgggcgatgcctctccctcgctgaccagcgatgcagtggtgcccagctcactggtggtcagtggctgcgagggacccaccaagtgtagccagaatgcgtgcgccaaccgaggaaactgcgtgcagcaatggaatgcctatgcctgcgaatgtgacatgacttcctacacaggacccacttgctatgatgaatcgattgcctacgaatttggcaacaacaagggcatggtgcaatacacattcccggaaaacgcacaagctgacacggaggaggataatatagcactgggcttcataaccaccaggccggatgcagtgctactgcgggtggagagtgccaccacgcaggactatatggagctggagatagtggagggcaacatcttcatggtgtacaacattggaagcgtcgatttgccgctgggcgagatcggaacgaaggtcaacgacaacgcctaccatgtggtgcggttccagcgcaagggaggcaatgccacgctccaactggacgactacaatgtgcaggcactgacgccacagagccaccactccaccgtgttcaataccatgtccaacgttcaggtcggcggcaagttcagccggaacggtcgcaatcgaatcgagcggccgttcgccggcgtgattgccggactttcggtgaacaagttacgcatcttggacttggccgtcgaacgcgacccccatatcaccatccgtggagatgttcaattggtaactggagtattagatagaaatgatctgcagagaatgcagcagacgccggcgagtggttatccgggtgcgctggacgatctgatcttctcgggagccggatccggatgtcgcggcgacgacgaggacgagtgcacgccgccattcgaatcgggtagcggggatgatctcataacaccggtctacgtgccgcccaccaagcagacaaccacgtcccagcaggggaatagcttgagtaccggcgggagcagcagcggcggtgtcatcaccaatggcacggagcgtgcctgcgacgacgaggattgcgtccatggatccggggattacggcgagaccacggaacagttcacctcgacgagcaccgcccgcggttcagagtccaacaacgagatggtgaccattaccaccacgggacgcagcgatgtgaccacggagcagcaccaaggcagcagtagcagcagtagcagcggcagcactccgtcctacgcaaccacgcagtcgagcagcagcagcagcagcggcggatcggcagccagcacgccgggtcaggtgagcacgaccagcagcgtggccacatcgtccacgcaacgggcgactagcagcagcaccagcacgagcagcagtacaacttcgacgaccacgacaacgaccaccactcaagccacaccgccaccggagatccggagtacggtcaccgagcgggaaaccacgccctatgatatttatatagctggtggcggcatgggtgggtccgggcgaaatgatcacgatcgcatgcagctgccggacgagcaccacccactgccaccgttgccgccacccattccgccgcaagatccacctccgtacggaccttatggcggcaacacgtacaacaccaacatgaacaactaccgtccaaagggtaagggcggcagaattaactcgatcgaggaggagcgtaccgccatgataatcggcatagtggcgggcatactgatcgcagtggtgctggtcatcctgctggtcctgtggctcaagtcgaatggcgatcgtggctacaagacggagagcgagaaggcggccgcctacggttcccacaatccgaatgctgcactcctgggaaatactagcaccaatggatcgtaccaccagcagcggcagcaccatatgcatggtggcggaggcggtggaggtgcagggcaacagcagcatcatgcccaacagcagatgcacaatgggcacaatggtaatggaaatggaggaggcggcggcggtggcggcatgatgtccagcggaagtgggtcacttggctatggcagcgatgggcgaccccagatggcgggcctggtgcagccgaaggccaagaaacgcgactccaaggacgtcaaggagtggtatgtgtaa

SEQ ID NO: 15531 - protein, 1837 aa, DROSOPHILA
MKAPHSATYQDNYADAAMTARTRPSMDMDQQRNRNQAELRLLPAQRTSTSAFESPDLRFNKARRRRRSEQVPPVVVEYRRSYRVLIVSALLVSLAASFVTLSAGFQLDGSQNSFYTFRKWYTGLNGTLELEFKTEQPNGLVLYTDDGGTYDFFELKLVEGALRLRYNLGGGAQIITVGRELHDGHWHKVQVLRNDEQTSLIVDGVSQQRSTKGKEFQFGKFASNSDVYVGGMPNWYSSKLALLALPSVIFEPRFRGAIRNLVYADQPGGSTRRQEIKQQRDIKCGDVPCDHGELPARERPLRGVRGGNTTDACERNDPCQHGGICISTDSGPICECRNLEYDGQYCEKEKAPSEATFRGTQFLSYDLGQTGAEPIVSAQDAISFYFRTRQPNGLLFYTGHGTDYLNLALRDGGVSLTMGLANGKQEMHIKPSKVRFDDHQWHKVTVHRRIQEISSITSFCRLVTVVDDVYTDHSHIAGKFTMLSSSRVYVGGAVNPRALLGARVHTNFVGCLRKVEFSADTLNLNLIDLAKSGSKLIQVAGNLEYQCPSGDPQDPVTFTTRESHLVLPPWETGKQSSISFKFRTKEPNGIIVLATGSKQPRAKNPVLIAIELLNGHIYIHLDLGSGASKVRASRRRVDDGDWHDLILRRNGRDAKVSVDGVWNDFRTPGDGTILELDGHMYLGGVGPAYNSVSWPAAIWTATLRQGFVGCLRDLVLSGKAIDIAAFARVQDSASVKPSCHVQANVCNGNPCLNGGTCLEGWNRPICDCSATLYGGPTCGRELATLAFNGSQHMTIWLGNGQGTKTQTEELVIRFKTSRPAGLLLLTSAESNSPDRLEIALVAGRVRASVRLSDREKNLLAGQSVLNDNNWHTIRFSRRASNLRLQVDGAPPVRAETILGRHSTMEIRSVHLGGLFHAEEEIQMTSTMPNFVGQMQGLVFNGQRYLDIVKSLGPELSALPSATFKLTARFVNSPAGQPYHAATFRSKHSYVGLAMLKAYNSISIDFRFKTVEPNGLLVFNGGRRNDFVAVELVNGHIHYTFDLGDGPVTMRDKSRIHMNDNRWHQVSIRRPGPKTHTLTVDDSFEIISLTGNNMHLELAGILYIGGVFKDMYSKLPASISSRSGFEGCLASLDLGDASPSLTSDAVVPSSLVVSGCEGPTKCSQNACANRGNCVQQWNAYACECDMTSYTGPTCYDESIAYEFGNNKGMVQYTFPENAQADTEEDNIALGFITTRPDAVLLRVESATTQDYMELEIVEGNIFMVYNIGSVDLPLGEIGTKVNDNAYHVVRFQRKGGNATLQLDDYNVQALTPQSHHSTVFNTMSNVQVGGKFSRNGRNRIERPFAGVIAGLSVNKLRILDLAVERDPHITIRGDVQLVTGVLDRNDLQRMQQTPASGYPGALDDLIFSGAGSGCRGDDEDECTPPFESGSGDDLITPVYVPPTKQTTTSQQGNSLSTGGSSSGGVITNGTERACDDEDCVHGSGDYGETTEQFTSTSTARGSESNNEMVTITTTGRSDVTTEQHQGSSSSSSSGSTPSYATTQSSSSSSSGGSAASTPGQVSTTSSVATSSTQRATSSSTSTSSSTTSTTTTTTTTQATPPPEIRSTVTERETTPYDIYIAGGGMGGSGRNDHDRMQLPDEHHPLPPLPPPIPPQDPPPYGPYGGNTYNTNMNNYRPKGKGGRINSIEEERTAMIIGIVAGILIAVVLVILLVLWLKSNGDRGYKTESEKAAAYGSHNPNAALLGNTSTNGSYHQQRQHHMHGGGGGGGAGQQQHHAQQQMHNGHNGNGNGGGGGGGGMMSSGSGSLGYGSDGRPQMAGLVQPKAKKRDSKDVKEWYV

SEQ ID NO: 15532 - DNA, 10083 bp, DROSOPHILA
aaaaacaattttgacactaaactattagtttcaaatcaggtggctcattcttaacatttcaaagtagctttaatgtaaaaggtcatggtatcatgcttctataaggtttcctttcttcccaaatatattacaatgtaatcctaaaaagttttgaactcttaaatcacaaagatagtttagttagctgcacttgagtatcatcacaatttttactactaaccaactaatcaactaaccagattagcaatgtttatctacaaaggtaactgcgtattagtcactctctgaatatagtggctttacgtaattacccctaatttcaatgcggttttctatgctgttgaaatcgacctagcccactagcctctagcttcacacttgacccactgtgcccgtgtcgatttcgctcccggaggacgtgtcacctggcccccacccctgctgccgaatctggccaatggcagctcaccgtcggcgcagcgtgcgacgcatgcgcaccgggccagctctctgattggctctcattggctggcggtgggccaaatggggctgaaaccgacgcggacgtcgcagccgtgaaaaaccggttacaccagaaaaacggttcgtccgtgagtccgtgaacgcttgtgtcagtgtgtgcgggccgcgtattacgagtgtgttagtgagcggcggcttttcggtggcgttttgggccgctctgcttggcggcgcttcagtagaaattgtcggctgatggaccgcgggcgaggcacgaagccaactctcaatttccactgctaccgccactgccactgccacaaaaattgatcgaatcgatgcgccggtcccgcgattcgcgtgcagttagtcgaatttttgacggtcgagtgacaaggtgcgtcgcgttccgaactcccaaataagaatcatacagaagccattagccgtcgcgcctccgaactgagtaatcggccattatccgcggaataagccacacggtgcatgcaaaactcgagcggaaagtgttgtgctcaagtgatcaaaggattcgaaccaagttgcggcaaagttattggatagccggcgaattcagtgctctaagtttaaggtgagcacatcttttgaattatatatttcaaaagtataaccatctaggaaagatactattcatggaagattatccgtttttggtcaagcttttatgcttgcacaacgtttttaaattgagcttcaccaagttatgttgaattggtaaagtttaagtgttcatttgctatctagattataaaaaatagaacataaaaagataaaaaactagcagattcaagtatctgttataatattccatagatcgtttataacgaattgtcattattattggcataaattagttagaatacatttgcttggatctgaaaataaatttgagcttttatttgaatctgcttcattaaatgaaattagatgacaactttattagttcactgacaagtttttagattgtatattttgttgatttggattttacgccagatgtgctatctcgttttctactcgagaccagataagcttaattgaacttggtgaaaagtgcacacattgcattttgagtgcagacacattctaatccgtaatattatgccaacacttgacaaaagctaacgacgatgacttatcggcgtcttaattaagatctggtcgcatccatcgacctgcccataatgaccaccataaacgatcgtaatcaatttgtttgcgcataatttgctttctcaacaactaaatcattaaaaatcgagtcgctcccgatcaggttgcggcgtttttgaaagactttaataacgatatttgcttatcgagttcgacacatcggtctcaagtccgacctcgtccccccagacccaacgccctgccatcgatcggcttatttcttaatgaacgacgatctgatctaacggatcgagtctgaacggaaccaaacggggcgatcttcattcaaccggcggcgttagtttcggccaagattcgattccaataatattcgaataatattcatgttgtgaatgaagtggaagatgccaccggatggcctgaatcgaatttgcaatgcaaaactacggccaattgaacttccgccgcaccgagataactcatttaaagcggaccaatcgatcgttggccagactgccaacgatcgatgactgcctttttggccagactttagttttcccacgaccacggcgagcgacaaaagtcaaaaatcgtatgctaattaattctttgtcatgccgtcgtttctggctgccattatggcccattgacttgtgtgctttctaagccaaagcccaagccaccggctttcggggcttttggccatcggcaacgaggcaacgagccgtcggacaacttacttaagcgtggtccagaaagagcaagctaatcatattcaaatggtgaagcgtacgttttattataatttttttattttaattagcggctgttaatgccccgcttggctctggcttcgatcgatccattgatctgcggggggggcagcaaatgataaaaaataaaatcaagggagagggttccgaaacagaagctcggccaacctgtcggttccactttcggtaatcgcacgaatttaaattattgtatgtttaactaatttctatcggtttttatgtctgttccgcttgacatgtgcacggagctaattgagacttacgagttgaggattgtggagaaatcggtagcacttggggaagatactaattatactcgtatattatcccccctgaaaaccagaaagcggttctcgagaacccagattagcaacatccctatatatataactcgcaatttggcctcaagatcgcattcaacatttaaaattgtagccgttgtggatctggaaaaaacctttgctacgcgttcacattttataaggtctcttaaaattagaggggattttttggtctcaccagatactttggatcactgcttgttagttagattagatatatttccaaaagtaatacctcaaatttaggtttttgtgttctgcaagatacatttttcagcattctaaggatggatcgtacccaataattgataattaacacgtgtagaagtggcaaagcaagtggaatagtcgcatatttctaggggttgctactatgtccggaactatttagttttgactgctcactggcctcgattgggccacgaaaaattccagagaaatgggcgagcagcacgccagaggggaaattaaccctttcattgcggccaaattggatttggccggaatgtctatttcactttctacaaaaccgagtggatttgcaatccttatcgcactgtcggccaaatcgtggccccgggccaactgctaactttatggccttaacggccagcacgagtttcccgttcgcggtgagtggtaaccgaaaaactgagacggagactgagaaggtccaaaaaaaacctaatgaacaacttaatttcgagttctttttttctcgttctgtttggtgttttttccgttttttttttttatttcaaagggggagtgtgtggtgcgtgcggtggttcggtggcttaacacgcgcatttcggtggttttacgagctgaaaagcggcaagggagctggacgaaggactcccgggctcggcaattaaatcaaatgtgaattccataataacatggccatgacaaagtgtggaccgtcggccggcagtggcagttacagtttttgatttatacggttcttcagcgcgttttcatgcctctgacaggctggcgacaggctcaaatcctggcccaaaaagcattaagtagaaaaaaaaaaaaaaaataaaaacaggaagcggaaaccaccggccgcaagttggtggtgctgaaagcccatttgcatatctcttttgggccggttgcatatttaacgaaatgagcaattggccaaaattcatttaattgttacccctgcctggctaactctatacttaggagtacgactatagcgacctggcctagatggagggggggggggggaccttctcgataatgggccagcagttcacgctgcgctcggaatgtgcctgataagcagctaatttgagatactccctggcactgggcgctgggcaatggccagtggtaactggtcactggtcactggacatggccattgagcacataaaccactgcacattaaaaccttcggccgcgtagttttataaaataattaagttttatgtattttccttactagattttcactggtttttggttttggtcttggatcggatcggttctggccgggcctggacgccgtccgaattcgtggaagccgtaaaaagtcttcggggagtgggccgccagcatcatccagcatcgaacatcagttcgagcaacgccatttgggcctgagactgagcatcctaatagcccggcgaccacgacgacatccatcaaagcgtttttatgacgttcttgcttgaaatttgattaaaattcagcgattaactaagcagcagcagcagcatcagcagcaacgggacgaaagacaaaaaaattaaaagacttaagacaaacaaccaacagcaaataaaccaaaatactttacggaggctaagcgactgcgagcgactaccgatagcatcggatcgtatcgaatcactttcggattgaattggattggattggctcgcattgaattgaattgttgatcacatttcagccatgccgcatacaggtgagtctcgctaatgaacttcaaaaggaaattaaacgaaagcatcagatgccatctccagtcgcagtcccccatttcacgtactcccccctgaataaccaaaaactcgagatcccacaaagagccacggttattactggcgcacttttgccgcctgcgtttatgaccgcgggttgataggaggggagaaaggtgggaaagagattagccaagtcaacagggcggttgccaaactgcgggtatttggcccagacgcgtgtgcccactgtaaatcttccagactttattcgctctattgggaggcttaggcgcttttaattcccactataagctccatttgtctagcaaaatttacttccaaatatatggcttaacactaacagtttaagacaatactttctaagtatctgtaaagaagctgctaatcttgttaatcttgttcaaagcgaacttaaagatggttcttttcaaagcctttaaatgtatattaaatgggtgaggagtacgtattgggaccaggcaaaaatatagtttattaatatctaaaatatatcctcttcctttcaatcctttaggtcaagctggagtcaaccaattgggcggagtttttgtgaatggccgtcctttgccggactgcgttcgtcggaggatcgtcgacttggctttgtgcggagtgaggccctgtgatatatcccgccagcttctggtttcccatggtgagtttattacatatgacttccttatacttcagataaagtaatatattttgtgcttttctcgcataggctgcgtttccaaaattctaactcgcttctatgagacgggctccattcgaccgggatccattggcggcagcaagaccaaggtaagtgggctccaagcgggaacgggattgcgaatgggggatggtaacaagatctggggggacgggaaaccacatgtggtccgctgtggtgcatgaaatcaacaaacgattatataaaaatcaaacgcacagcagtaaatccataaagtatcacagatacacggaaagcagatagcccagataagcattgtaaccagcagctagtttacatgttctcgacattcgatgacagcctttatggccacgtgtgggagtggaagttgggtgaacggtgaaggagtgggcgttcgagtgcagagagcgcagcaaatcaatctcgcctgcccaggtcgaggatgataaccgggaagtgggctacctggatggggctggattgggctggctggagccacctgtgcggttcgcacgcccaatcaagtgtgcctgctaccgtttaagccgctgctgctcgcttcacggccccaaaaagtgacgacaatggcacgaagatagtgctgattgcactgggccatggaatcagcgattccatgcggagccacgcgataacaccgaatcacgacccatacgcaccatactaaacgctttgcagacgggtattgtatatatatagggctctttaaagtattagttttattgcatattattatattttctacaaacttgcaaaaaggttgttcagacagggtgcttcgcttcagagatctttcaaagtacttacatactcggtggtagttaaattgtgactagattaagaatccgtgttagttttcaatgagttcccactatgtttagatcctagaggggctagtcttaaaagtgagtaatataaagtagatcctgggttcataaaatcgattaaactaagggaaatgaattttcttaaattaggctgatggttttaatagtttgtcctttatggttttaaagggatattttatggatagtaagggcattttaccagctatagtccgtgaaactaccccttccaatgcgacttcccctcgactgcggaaacagttgttcaggtgcgatatttgccgacggaacagaacgcctaattaacggtagttgcaccgcccaccaagtgcacaatgtacacgtcggaaggcgccccacacccagcatgtcggttacccacccgcttacatggtgattcaataagcgctctgcactcgctcgaacaaaacgcgcatttaacacctacgctgggtcaataaagaagttgcccccgtcccgtgtgccccttgtggcatgcataggaaaagggggcggggctggtgcaaggacagtggcccgcaaagagcgaacgcgcgtgtagatttctgataagatctggcatgcaagcttgccgcgatggaggggcttccgaccccttaagtcccccactaccgttcgataaaccccccttaagcgtatttatgaatttttaatgaattaccgcgtcacacgtgaaaagcgggcgccagtgaaaaacgggaggaaggtccttcctttcagtcactcgtacaaattaacatatgcaaaagcagctacaacacggatgtgggtccgatgcaaatcttcccgcgaacatgacagcttaaagggggcgtggctgcgctcgctgtcggccgcttttgcaattgttgcgagtgcgccgtggtttattttagtgcacaattgaatttcacggcaattagtcgtaggccacaaaacgggggtaaccagagacacctgagaataaaggggtttaaagcacctggctggcggttataaccataaatatccagtcacgcaacaggcctttaacgtttatgtcatatataaatatattataaattttatctaatacctttcttagtatgcacttaatcattgaatattacgaaaatatctacagatattccgaaatccattcaagtaaatttggaaacgggctgaagcaagcactagtacaaatgcttatttaatgaagctataatgcttgttatccacataacatacaaaaaaccaataattgcaaattaaagggttatcatatggagacacaataactttcaaagataattgttttcttaataaatctaaactgtataacttcttctctttacagcaagtggccacgcccaccgtggtgaagaagatcatccggctaaaggaggagaacagcggcatgttcgcgtgggaaattcgcgagcagctgcagcagcagcgcgtctgcgatcccagttcggtgccctcgatcagctccatcaaccggattctgcgcaacagcggtctgtggaccgatgagatgacatccagtcagcagaatgccgcagctgctgcagcggcggcagcggcagcggctcatcaggcgggcagtggtccatcgaatggatatggcggccaagctccgcctcctccggtaaccgtggctccgcccacaccggcagccacgccctccatcgcacgctacgccaagccgccggcgttgatgatgaactccgccggcgagatgccaattaaacccgctcccaaaatgccgcccagcatgggacatggccacagtcacggcctgaaccccaatgtttcgggcctggacttgagttactccgctctacacaagcactggctgtggaatccctccctgctctactacacccaggctcacattcaggcccaggcggctgcgtcgggtggtcaattcctgccctatgccggtggctatttgccccatgccatggcagcggcggccgcatcttccacatccgccttgggtggtttcaccaagtcggagagctccatcgatctttcgactcccggagcggctggcgatgcgcttagcgactgcgactccggtaaatcctccccggcggcactctcactaaccgcttctggaggtggaaatggcgccggatcagctccagaggcttcaccaggatcgacactcagccacagccgcaagcggaatccgtactccatcgaagaactgctcaagaagccggagaaacgactccgactggatagcaaccgtctggagtgcctggaatccagttcctgcgagagcagccaggatagtccagttgctccacccttggaaacgccagaggatgaggatcccgccgaggcggaggaggagcaagaggaggaagacagcgttgaggtagtcaactaaatccactgagtgcgtctcgccactgacccagttttgatctgtgtatatatagcaacctagtttaatcgtaaacgccccattcaaacagtactaatttaatctaagttggaactcgaattgatggaatttctgtggtcacacgatcttttcactttcttctctcttaaactggatctctgataatgatgtcttaaactgaatttgttcagtcgattaaaatacccgtgaaattgtattcattccaagttccatccacattgattgctatgaataatgttgcaagggggtgataatataataaaatatttaaatacaacaataaaacaatgttctgagtaaaccagtgtgttttgcattatggctcatgggtttaaaatacaagtaaggctttaaaaaggatcctgaaatgctgaacataaccaacggatgcaaaagcttatgcttcgaaattcgtgtaataatatactttattatgcgaaattttctgctacgaaattcgtgtaatttgtacccaagatgcccatttaaatgataaatgaagtgtttttcatcgactcgccggtggtcgtcggcatctgcggctctcgttcttaattaacttgcgcgccaatgaagtgtcaacaagttgccaacacgctggatccgcaggagggggaatggcgaaattacaggatgtctgacacgaccataactatcgatcgcccgcggaggaggcatcggagggatcgcccccagaaggaggcgacaatggttgccaactgcaactgcaactgcaagtgaagcggcgactggaagtgcgaaaatggcattggaatcggcatggtggcattgtggcattgtggcatggtgttgcggcaccggcggccaatgtgagtggaattttaaagcaggtgcccgggggagctggacatggccatcctgggcgaaggtgtgaagttgcgagaaactttcccaagaccactactctgaatatgccaacaataaatcagtggctaaaaataattgccgcgacaattgcgcgcagttaaattatgcaaagcgcacaaaaaacgatgcgaaaaaacacgctgccataattgtatcacgtgcacgccgcgattccgtatcctggccaatatcgccaatatcactccttgccactccactcgaaaccaatgcactccactccactccacaccactccacttcataaacaatgctaaaaggcgttgaggatgcgcgcaaggaaactgacggcgaggaatgcacagccagcagggcatataccggggtatcggtacaagaagactcctgatcatggccagattggaatgccctggcatgactatgactgacag

SEQ ID NO: 15533 - DNA, 2178 bp, DROSOPHILA
gcggaaagtgttgtgctcaagtgatcaaaggattcgaaccaagttgcggcaaagttattggatagccggcgaattcagtgctctaagtttaagattttcactggtttttggttttggtcttggatcggatcggttctggccgggcctggacgccgtccgaattcgtggaagccgtaaaaagtcttcggggagtgggccgccagcatcatccagcatcgaacatcagttcgagcaacgccatttgggcctgagactgagcatcctaatagcccggcgaccacgacgacatccatcaaagcgtttttatgacgttcttgcttgaaatttgattaaaattcagcgattaactaagcagcagcagcagcatcagcagcaacgggacgaaagacaaaaaaattaaaagacttaagacaaacaaccaacagcaaataaaccaaaatactttacggaggctaagcgactgcgagcgactaccgatagcatcggatcgtatcgaatcactttcggattgaattggattggattggctcgcattgaattgaattgttgatcacatttcagccatgccgcatacaggtcaagctggagtcaaccaattgggcggagtttttgtgaatggccgtcctttgccggactgcgttcgtcggaggatcgtcgacttggctttgtgcggagtgaggccctgtgatatatcccgccagcttctggtttcccatggctgcgtttccaaaattctaactcgcttctatgagacgggctccattcgaccgggatccattggcggcagcaagaccaagcaagtggccacgcccaccgtggtgaagaagatcatccggctaaaggaggagaacagcggcatgttcgcgtgggaaattcgcgagcagctgcagcagcagcgcgtctgcgatcccagttcggtgccctcgatcagctccatcaaccggattctgcgcaacagcggtctgtggaccgatgagatgacatccagtcagcagaatgccgcagctgctgcagcggcggcagcggcagcggctcatcaggcgggcagtggtccatcgaatggatatggcggccaagctccgcctcctccggtaaccgtggctccgcccacaccggcagccacgccctccatcgcacgctacgccaagccgccggcgttgatgatgaactccgccggcgagatgccaattaaacccgctcccaaaatgccgcccagcatgggacatggccacagtcacggcctgaaccccaatgtttcgggcctggacttgagttactccgctctacacaagcactggctgtggaatccctccctgctctactacacccaggctcacattcaggcccaggcggctgcgtcgggtggtcaattcctgccctatgccggtggctatttgccccatgccatggcagcggcggccgcatcttccacatccgccttgggtggtttcaccaagtcggagagctccatcgatctttcgactcccggagcggctggcgatgcgcttagcgactgcgactccggtaaatcctccccggcggcactctcactaaccgcttctggaggtggaaatggcgccggatcagctccagaggcttcaccaggatcgacactcagccacagccgcaagcggaatccgtactccatcgaagaactgctcaagaagccggagaaacgactccgactggatagcaaccgtctggagtgcctggaatccagttcctgcgagagcagccaggatagtccagttgctccacccttggaaacgccagaggatgaggatcccgccgaggcggaggaggagcaagaggaggaagacagcgttgaggtagtcaactaaatccactgagtgcgtctcgccactgacccagttttgatctgtgtatatatagcaacctagtttaatcgtaaacgccccattcaaacagtactaatttaatctaagttggaactcgaattgatggaatttctgtggtcacacgatcttttcactttcttctctcttaaactggatctctgataatgatgtcttaaactgaatttgttcagtcgattaaaatacccgtgaaattgtattcattccaagttccatccacattgattgctatgaataatgttgcaagggggtgataatataataaaatatttaaatacaacaataaaacaatgttctgagt

SEQ ID NO: 15534 - protein, 425 aa, DROSOPHILA
MPHTGQAGVNQLGGVFVNGRPLPDCVRRRIVDLALCGVRPCDISRQLLVSHGCVSKILTRFYETGSIRPGSIGGSKTKQVATPTVVKKIIRLKEENSGMFAWEIREQLQQQRVCDPSSVPSISSINRILRNSGLWTDEMTSSQQNAAAAAAAAAAAAHQAGSGPSNGYGGQAPPPPVTVAPPTPAATPSIARYAKPPALMMNSAGEMPIKPAPKMPPSMGHGHSHGLNPNVSGLDLSYSALHKHWLWNPSLLYYTQAHIQAQAAASGGQFLPYAGGYLPHAMAAAAASSTSALGGFTKSESSIDLSTPGAAGDALSDCDSGKSSPAALSLTASGGGNGAGSAPEASPGSTLSHSRKRNPYSIEELLKKPEKRLRLDSNRLECLESSSCESSQDSPVAPPLETPEDEDPAEAEEEQEEEDSVEVVN

SEQ ID NO: 15535 - DNA, 4621 bp, DROSOPHILA
gtttcaaccgactttttatggaggagaatttaaactaatcacggaattaactacagtagggcaggcgtaggaagtccacggactgtgacttcagtatgccgggtatctcctgctgcaacagttcgtgcagcgactgaccactgtgcttgtagatccatctgcccgccgccacagtgccgacgaaatcgtatcgcttgggaccgctggtgggcgaactgagccagatctgcttgttgggcgtctgccggttgatcacataggtgccgtgttgtcctcccaggttcacggttagcacgccatcctgtggaagcggaaaccccgcgaggattagcaggtcaatggaatgatgtaatagccgaatgtcacctacgctgtaagccacatccgtgccctgcagctcggaggcgttctccgtcagctcctcgaagtagtcgcacagtgcgtccagggtgtcggagcacacacgctcgtaggtggcgccgtccaatgtggattccgtctcaatttgactgctaaacaatcgccggttggcagtgaattcctcgcattgaatagcaactgcggctatcgctggtgtgctgggcaggatcacttggctggcgtgtgcttggggctttgaccacctgcccatggtggccaagcatgcccgaccaacgatcgaacggaccatcaaacgaccggcaaacattttttagttgtttacgatttgtttatattttacaaatcccagttgcggggctgccaacttaatggaaaatgatttgccgttggtattttctagattctagtgtggtataatttttgatttctataaagctgaataaaaatgagaagttacagattttttttattagtagcagcaattcagctaaagtgttctgctagttttaggtaactaaaattttgtatattctctagcagttactatttccttatcatatatattccgctatatataccaattcccggcttatatgatttttcttagaatcagatacggccacacctccaccaacgccgacagaaaatggcgtctgtctgaaaattgttatttctcttggaaaatccatacaaatttgaccagcgaattgcacaaagatggccctgccaagcaactacaagcagatagccgttggcggccagggatcggccacaccactccagggcggcggcggtggctccggcggcggcagccggtcgcgttcatccggcggcggaggtggtggcgatcgcaacaaggatcagacgcccatcttcacgcacagcaactatgggaatccggcattcacgccacagaaggtaaccaagtcgtcgagcagcaagaaccagaacgaatcaaggctacccaagccaccaaagccgccggagaagcccattttgccctacatgcggtattcgaaacgcgtctgggatagcgtcaaggcgaagcatccagagctgaagctgtgggagctgggtaagaagatcggtgccatgtggaagttgctgcccgaggatgagaagacggagttcattgacgaatacgaggcggagaagctggagtacgagaaatcgctaaaggcctaccaccagacgcccgcctatcaggcctacatgtcggccaagagcaaggtgaagaccgacgtggatatgcatgagacaccgtcacgcggtggcggcagtaagtcgcagcatgagcgacgcatcgacattcagccggcggaggacgaggatgaccaggacgaagggtatacgaccaagcacttggcctacgcccgctatctgcacaaccatcgcctgattaacgagatattctcggaggccgttgtaccagatgtgcgttcagtggtgaccaccacgcggatgcaggtgctcaagcggcaggtcagctcgttgacgatgcaccagaccaaacttgaggcggaactgcagcagatggaggagaagttcgaggccaagaagcagcgcatggtggagtccagcgaagccttccaggaggagctaaagcgccactgcaagccggcggtcgacgaggaaactttccagaagatggtgcttcgcatgtacgaggacatcaagcgcgatcgccagcgattggatgaaccgaatgcgaatgcgaatagcgcagcgaatcctgctgcagctgccgctacagctgccgccgctccagtgacgaggagcgaggaggcagtgaagccgccaacgcagccaggtcagcccgctgccacacccgctggccaagagccggcgtcggcggtaccagcgccagcagctccgcccaaggagacaccgccggctgtgaagcccgctacactcaatcccacaccgagttcaacgcctacgccggcgccagcggtgcacgtgcacgaaactgccagcaaaacggatcccgagcccatggacattgagccaccgccgaagccatcggttccgccgccacccatcaagccagagaagctggagatggccgctgccctgcctccgcagtcaacgctagtcgagccacccaaaacggaacccgccaaagtggtggcccagcccggcaaggtgcccacaccggtgccgacacccacaccgccgcctgaggtggctccagcggccggagcagctactgcagcgaccacaacaacgacgacgacaccaacgccaccgccggtgccacaacaggtgccactgccgcagcaacagggcgggccagctccaccgcccggcatgccgcagatgcatccacatcccggccatccgccacccggacattccttgatgccaccgcacatggggccgcatcagccgccgccgggaatgcccggtctgccgccgccacctccgcacacgggttatgctaactacggcggaccaccacatggcccgccgcctggaccacccggtggaccagcacgaccctattaccagccccagtacggcggacatcccacgccacagccctactacgcaccgttctcgccgtatcagcagtcctatggcccgccacctggctcgcactacatgtcaccgcgtccgccgccgccgcagcacaatggcaatcccgggcatccgtatgcgccggagcatggaagcaatccaccgccaccacagcagcagcaacaacaacaaccgccaccaggacacctgcacgagccgagcggtggaggacccggggccccaggcggtggagctggagcggcagcagcagcggcgcccggagccggagtgtatcccacgcccggggcaggagcgggaccaggagcaccacctggaccagctggaggagcaccgctgggcgaggccgcagtagctgggggagtagctccgccagcggcaacagcacctggcaagcatccagaggcggagaagcacgaggcggactaagacaaggaatcccaccacccagatcctagttgtggtccctaacttatatatgaatcgatccctggtgttgtaacatagctgtcccctcccggaacttccggaaggcaaacaaccggaatgctcttaacttgaaatccctatttaggcgccacacctaagaactccacatcaatcccattctcaaattaagtttatatcacttttttttcgcgaagcctaattttaatattttaataactgagtgtgcgtcgcattctggactgtatgctaaatatgcaaataaattaaatgtacgattatatgtaagtggaaaggtgtttaaattttgcgttcaatttgcaatttaaatgggtatgcttgagttataacgatatttacactgacaaaaagatggaaaacattggtaacttaaattaaataaattattgcttcaatgtacattattataaatatcaacatttaattacaaagataagcccttaacccctattgggcgtcttagcttacgaacaaaggggtttattaacacttattgggcgcctgtggcacagaaccaccgctaggtggcgccagttaatagcagccttgaaaacgcaaatcaaagacaaacaaaaaaaagggggcagcgccaaagccacccacacacatacagctgcagccagccaaacttgcacacacagaaacgagcaagagtaacacacatacacacgcacgcaccgagattaacacacgtaaacaaagcaaatgacgtttggtttcgatttttggagtcaactgtaccatcgccacctatcccgcccgctcgtacacactattcccgtctcgctttcgcagaaaatacaattcgttggtgttgggtttttttggtttcttctatagaaaaaaccgtttattttttattttcttttttttttttgctgatgtttccagttatttttgctgttgctgtcactgatttgttgttgtaaattgtttttgtgttttgtgggggattcgttttttgttttctgttttcatattggttcttgtaagctacgacgatacgaatagacacatatttagtccgatttgtttaaatgttcaatgtgaaactagttatcgacaccaatttacagctatatgtatatttatatatatatatatgcatgttttatgggcgtttacaattgattattttgcatgtgtttcaaactacatataaatattgggaaatattcaatgctctgctcggcgcttttgcttttattttgtattgttatgtgatttctgtctt

SEQ ID NO: 15536 - DNA, 2621 bp, DROSOPHILA
ccacacctccaccaacgccgacagaaaatggcgtctgtctgaaaattgttatttctcttggaaaatccatacaaatttgaccagcgaattgcacaaagatggccctgccaagcaactacaagcagatagccgttggcggccagggatcggccacaccactccagggcggcggcggtggctccggcggcggcagccggtcgcgttcatccggcggcggaggtggtggcgatcgcaacaaggatcagacgcccatcttcacgcacagcaactatgggaatccggcattcacgccacagaaggtaaccaagtcgtcgagcagcaagaaccagaacgaatcaaggctacccaagccaccaaagccgccggagaagcccattttgccctacatgcggtattcgaaacgcgtctgggatagcgtcaaggcgaagcatccagagctgaagctgtgggagctgggtaagaagatcggtgccatgtggaagttgctgcccgaggatgagaagacggagttcattgacgaatacgaggcggagaagctggagtacgagaaatcgctaaaggcctaccaccagacgcccgcctatcaggcctacatgtcggccaagagcaaggtgaagaccgacgtggatatgcatgagacaccgtcacgcggtggcggcagtaagtcgcagcatgagcgacgcatcgacattcagccggcggaggacgaggatgaccaggacgaagggtatacgaccaagcacttggcctacgcccgctatctgcacaaccatcgcctgattaacgagatattctcggaggccgttgtaccagatgtgcgttcagtggtgaccaccacgcggatgcaggtgctcaagcggcaggtcagctcgttgacgatgcaccagaccaaacttgaggcggaactgcagcagatggaggagaagttcgaggccaagaagcagcgcatggtggagtccagcgaagccttccaggaggagctaaagcgccactgcaagccggcggtcgacgaggaaactttccagaagatggtgcttcgcatgtacgaggacatcaagcgcgatcgccagcgattggatgaaccgaatgcgaatgcgaatagcgcagcgaatcctgctgcagctgccgctacagctgccgccgctccagtgacgaggagcgaggaggcagtgaagccgccaacgcagccaggtcagcccgctgccacacccgctggccaagagccggcgtcggcggtaccagcgccagcagctccgcccaaggagacaccgccggctgtgaagcccgctacactcaatcccacaccgagttcaacgcctacgccggcgccagcggtgcacgtgcacgaaactgccagcaaaacggatcccgagcccatggacattgagccaccgccgaagccatcggttccgccgccacccatcaagccagagaagctggagatggccgctgccctgcctccgcagtcaacgctagtcgagccacccaaaacggaacccgccaaagtggtggcccagcccggcaaggtgcccacaccggtgccgacacccacaccgccgcctgaggtggctccagcggccggagcagctactgcagcgaccacaacaacgacgacgacaccaacgccaccgccggtgccacaacaggtgccactgccgcagcaacagggcgggccagctccaccgcccggcatgccgcagatgcatccacatcccggccatccgccacccggacattccttgatgccaccgcacatggggccgcatcagccgccgccgggaatgcccggtctgccgccgccacctccgcacacgggttatgctaactacggcggaccaccacatggcccgccgcctggaccacccggtggaccagcacgaccctattaccagccccagtacggcggacatcccacgccacagccctactacgcaccgttctcgccgtatcagcagtcctatggcccgccacctggctcgcactacatgtcaccgcgtccgccgccgccgcagcacaatggcaatcccgggcatccgtatgcgccggagcatggaagcaatccaccgccaccacagcagcagcaacaacaacaaccgccaccaggacacctgcacgagccgagcggtggaggacccggggccccaggcggtggagctggagcggcagcagcagcggcgcccggagccggagtgtatcccacgcccggggcaggagcgggaccaggagcaccacctggaccagctggaggagcaccgctgggcgaggccgcagtagctgggggagtagctccgccagcggcaacagcacctggcaagcatccagaggcggagaagcacgaggcggactaagacaaggaatcccaccacccagatcctagttgtggtccctaacttatatatgaatcgatccctggtgttgtaacatagctgtcccctcccggaacttccggaaggcaaacaaccggaatgctcttaacttgaaatccctatttaggcgccacacctaagaactccacatcaatcccattctcaaattaagtttatatcacttttttttcgcgaagcctaattttaatattttaataactgagtgtgcgtcgcattctggactgtatgctaaat

SEQ ID NO: 15537 - protein, 749 aa, DROSOPHILA
MALPSNYKQIAVGGQGSATPLQGGGGGSGGGSRSRSSGGGGGGDRNKDQTPIFTHSNYGNPAFTPQKVTKSSSSKNQNESRLPKPPKPPEKPILPYMRYSKRVWDSVKAKHPELKLWELGKKIGAMWKLLPEDEKTEFIDEYEAEKLEYEKSLKAYHQTPAYQAYMSAKSKVKTDVDMHETPSRGGGSKSQHERRIDIQPAEDEDDQDEGYTTKHLAYARYLHNHRLINEIFSEAVVPDVRSVVTTTRMQVLKRQVSSLTMHQTKLEAELQQMEEKFEAKKQRMVESSEAFQEELKRHCKPAVDEETFQKMVLRMYEDIKRDRQRLDEPNANANSAANPAAAAATAAAAPVTRSEEAVKPPTQPGQPAATPAGQEPASAVPAPAAPPKETPPAVKPATLNPTPSSTPTPAPAVHVHETASKTDPEPMDIEPPPKPSVPPPPIKPEKLEMAAALPPQSTLVEPPKTEPAKVVAQPGKVPTPVPTPTPPPEVAPAAGAATAATTTTTTTPTPPPVPQQVPLPQQQGGPAPPPGMPQMHPHPGHPPPGHSLMPPHMGPHQPPPGMPGLPPPPPHTGYANYGGPPHGPPPGPPGGPARPYYQPQYGGHPTPQPYYAPFSPYQQSYGPPPGSHYMSPRPPPPQHNGNPGHPYAPEHGSNPPPPQQQQQQQPPPGHLHEPSGGGPGAPGGGAGAAAAAAPGAGVYPTPGAGAGPGAPPGPAGGAPLGEAAVAGGVAPPAATAPGKHPEAEKHEAD

SEQ ID NO: 15538 - DNA, 4672 bp, DROSOPHILA
attatggtgatttttccgacgttactgaagtagagtgagtaaaaaccagggtttaatcgactattcttaatggttttgtttgtgcagcgactcttcggactattctgaaaaagagtcttttagcgaaaggcagtacaggaagacctgtggaggacaacgctagcaacgagggaaaaacagttaaacatagaggttgtgagcgcatacacgttatgcagatagctcagaaatataatatttccacctattaaatacctgatattccaacaatttaatatatggttataggtgagttattcaataaaaataactcttgttattgctgatctgatgtcagtgcaattcctacccttcaccgcccatggaagtcgcaatacggggactgcgttgtttggcgagcttctgggctgaaattattatttaattaaatactacagcgacaaatggctacacagcaattcagaaaataaccttgttctcacccctgttttcgattttttcttttttatcaaaggcttgtttgcttgatacctatttttatttcttcttgggctatgactgtaacgtgctgttgaacatcttctcattattgttgactttctctttacgactgtttaataaattctgctcttcccccacatgcggcttccatttaccaagcttatacgagcatttattatataacacccgtcgacttgcaccgatccctctagaccctatatcgacccctatccacttgaccaccatcgttgacagtcaaccacacacactcgaaaaacaatggagctcatcttttcgaacggatttttgtgcttgtgcaaggtaatgcccggtccgttcggatgatatcaagttactattgggtagttttgtttgacactcgatcgatcgccgttgtgtctcttagatagctgatgcgtgaacatttcatcagtgccatccagattcgctttcaggccgacgaattattttgttttattgagaataccatttttcctatctaaaaaactgcttttttgtttgggtacccaaagaaaccaatgcttttaagctccataagaagctcgtggtcgttgccaattgccttgaaaatggctttctctaactcgtcgtattggaagtgtggcgaaaagggcatgtcgttcagggcgttgaagagcgtgttcccgcgctcgttgccaataaccaatgtgcgaccacagtgggaaaacctaagaattggtaaaggaaattcctattcaattggccatttttgcggaaagcaataaaagcttacctggccacagtattaaaagaagagtccatcttgtgcttggacatgggtcttagcaaatttcggcgaaagtcccagacgttagcggtttcccggttcaccgtcacaataatcgtagagtgggtggggctccacttggcccaatgcactggggtcatctcgtctagcagttcgagaagaggtcgcgtgatgccatcgacccaaatgcgtacgaacctgcagaatagatactatctttagctacccttgatagagggccacttcctaccaatcgttgccgcaggtgaggaagagtttgggagaccaaggcgagaactccattacggtgacacccccgtcgtgacaacgcaggacttccaagtactgatgctgataattgattgagcacttgtggatgcagccctcatctgtcagcacgtagtaaatgtccttgtgcagaggatgtgtagtgatgcttaagccttgcgggtggcggttagactcgcaggggatacgcgacgatgggtgaacgaaaatgccctcaggatgcccctcgactcgctccagaatcatttgggtaaaaccaagcaggaagggacttttgataatccggaagcgggtgaccgagccatcctgggagaggctcaggaatggatcgatgtctgtttcatgatcgtcgtctgaaacttgtttgatccagcggatggcaaccaccggcgaggagcctggcgaagtgctgcgctgcgagaccgcaacgggtgtgtcctgcaaactgctcacatctcgcacttccacgctgccgtcgtacagaccaatggcgagcaaggatggcaagaatggcgagaagtttattgccgttactggcacatcgtagtagtatgcgcgctccggctcgcctggatttttaatgctccacaggaaaacgctgccggaggtcggtacgtgctgtgaggaaaatgagtacagtccgtaggctacagccaggatgtcaccattgctgcggcagaaatcaatgtcgcttacggccttgcgctcgtctttgctgggctccggtaccagccgaaagagcaagttcatcgagtagacgtactcggcctccgcgttccagcgttccacctggtcaaagttacggaagcgtcgtaaccccgcctcgtttgtgttgctcgagagcgtgcggcccatgtacatgatggcgttgcgaaactcggggctccggaacaggcgctctatctggctgctgaccttgtctttttcggcaacggcctcgtcgtcctcaaaggtatccgcatcctccgtctgcgctagagccgaggtcaggtcctttaccgaactcatagtggctgttgcgaactccttggtgatattgttcagcgtgtcgtacatctcaaagttggaaacgtaagagctgacggtggccttggttatgaggatggtgttgactgcccgagtggtgaagagcagagtatctgtctgagcgtcattgtctgagcgccggcgaattttgcctttccctattgtcagatactcgtagtttcggttgtctcgctccgcatcgtcgccctcgggcgatcccttggccaccgtcgtctgcgtctggctgtgaatttcgaagaagtcagacttgcgtaaggtgatctttaaaaaggacttggtatacggctttggctcgtacgcctcttcgagagcctcaacagtgctgtacggttcccagttaatagtttcataaagtatctagtggagaatgacgattcccgctgggatgatacaaaaaagtttatataaacttaccccgttcatcaggtcgtcaatggactgcttattgccgcctattccggcccgaacactagaccgcgtgcgggatctggtcgtgctcttcgctaccattgtagtgaagttagtcatttggtgcatgacatttaggttgtacttcatgaactgctccacataggtgtcatcttggatcgacttaggtgtcatatcaacctcctcgccatagatcttttccaaaacctaaggggagtttgcaattagtggtggtgagtttgtaagtcctttgggttcacctttatctgagatcgatactgcaggtcggcaagtgtttccacactgtaatagtgcgtagtatctttcttcttagccttagactcttcggcttgtgtctgattaaccaccacggacttctttttgagttcgttgtctaagttactggaccgctttttgacgcgtggggaacggtgttctatgtaagaagtgcaaattagatcttccagtaattacttactttaaagatactcccattttcttggctagtgactgtatttcttactgacgcggacatgacttgtattttgttatgtactcctcttgatttcgtccaaatttttaatgagtattttgttattttattattttgagggcactggtttctggtaatacatatgttttaactgctgatataacttttttttaccaaacattagtttcatagtgtacttatctttctttaaagatttaaaatgtaatcaaaaactgaaatgcttggaaatcaatttaaaaaattaatattgtgtaatattaaatttgaagtttaaaaactccgaataccacgaatttttaccgtacggtaacgaaagggctttgtgctacttaacaggagcactctcttactctccgtttccgtgagcgttttttaccgagctccccctgcgcctgctcgttagataataccgaaataaagttgtcaaccaagccaccctctgtgggcgaaggacgaccggctgccttttgaggttgcatatggttgagttagttagattcggagtcgccagccatgcaaacctggttcacactcgcgtccgtaatcgtgcttttgtttgggatgtattccaatgtgtagagattcgatttctcaatgtaggtctgcttattttttggtacgctcctgatatgaaaaaaacttgcggcagcatcaaaatctaaaaggcatctaacctaacaagagctaacaattaatggagtgtcaaagtgaaaaccgagtaccagaaaactcaattagtaatgttgcaacgtaccatactctgcccgaatcccaaacctcatcggttttggccaagcatcagcagcgacagctgaaagaaccgcaacagccgccgcagtacgttataaattcagtggcaatgcacgccaagacgaccacggcgaactccatcacgggcggcacactgcatcgggcaaaaagtgcgcaggtacgtccagaatgttataaattaaatggatagtatccgaggaagtggatcgaagtaaagcgatgtgatcgcgatgcttattggaggtaaacctatttgacaggaattgatattgactgccaactaggtgcgcttaatcggtggggaaactggatttatatatttgtccatggat

SEQ ID NO: 15539 - DNA, 2377 bp, DROSOPHILA
gtgccctcaaaataataaaataacaaaatactcattaaaaatttggacgaaatcaagaggagtacataacaaaatacaagtcatgtccgcgtcagtaagaaatacagtcactagccaagaaaatgggagtatctttaaacggtccagtaacttagacaacgaactcaaaaagaagtccgtggtggttaatcagacacaagccgaagagtctaaggctaagaagaaagatactacgcactattacagtgtggaaacacttgccgacctgcagtatcgatctcagataaaggttttggaaaagatctatggcgaggaggttgatatgacacctaagtcgatccaagatgacacctatgtggagcagttcatgaagtacaacctaaatgtcatgcaccaaatgactaacttcactacaatggtagcgaagagcacgaccagatcccgcacgcggtctagtgttcgggccggaataggcggcaataagcagtccattgacgacctgatgaacgggatactttatgaaactattaactgggaaccgtacagcactgttgaggctctcgaagaggcgtacgagccaaagccgtataccaagtcctttttaaagatcaccttacgcaagtctgacttcttcgaaattcacagccagacgcagacgacggtggccaagggatcgcccgagggcgacgatgcggagcgagacaaccgaaactacgagtatctgacaatagggaaaggcaaaattcgccggcgctcagacaatgacgctcagacagatactctgctcttcaccactcgggcagtcaacaccatcctcataaccaaggccaccgtcagctcttacgtttccaactttgagatgtacgacacgctgaacaatatcaccaaggagttcgcaacagccactatgagttcggtaaaggacctgacctcggctctagcgcagacggaggatgcggatacctttgaggacgacgaggccgttgccgaaaaagacaaggtcagcagccagatagagcgcctgttccggagccccgagtttcgcaacgccatcatgtacatgggccgcacgctctcgagcaacacaaacgaggcggggttacgacgcttccgtaactttgaccaggtggaacgctggaacgcggaggccgagtacgtctactcgatgaacttgctctttcggctggtaccggagcccagcaaagacgagcgcaaggccgtaagcgacattgatttctgccgcagcaatggtgacatcctggctgtagcctacggactgtactcattttcctcacagcacgtaccgacctccggcagcgttttcctgtggagcattaaaaatccaggcgagccggagcgcgcatactactacgatgtgccagtaacggcaataaacttctcgccattcttgccatccttgctcgccattggtctgtacgacggcagcgtggaagtgcgagatgtgagcagtttgcaggacacacccgttgcggtctcgcagcgcagcacttcgccaggctcctcgccggtggttgccatccgctggatcaaacaagtttcagacgacgatcatgaaacagacatcgatccattcctgagcctctcccaggatggctcggtcacccgcttccggattatcaaaagtcccttcctgcttggttttacccaaatgattctggagcgagtcgaggggcatcctgagggcattttcgttcacccatcgtcgcgtatcccctgcgagtctaaccgccacccgcaaggcttaagcatcactacacatcctctgcacaaggacatttactacgtgctgacagatgagggctgcatccacaagtgctcaatcaattatcagcatcagtacttggaagtcctgcgttgtcacgacgggggtgtcaccgtaatggagttctcgccttggtctcccaaactcttcctcacctgcggcaacgattggttcgtacgcatttgggtcgatggcatcacgcgacctcttctcgaactgctagacgagatgaccccagtgcattgggccaagtggagccccacccactctacgattattgtgacggtgaaccgggaaaccgctaacgtctgggactttcgccgaaatttgctaagacccatgtccaagcacaagatggactcttcttttaatactgtggccaggttttcccactgtggtcgcacattggttattggcaacgagcgcgggaacacgctcttcaacgccctgaacgacatgcccttttcgccacacttccaatacgacgagttagagaaagccattttcaaggcaattggcaacgaccacgagcttcttatggagcttaaaagcattggtttctttgggtacccaaacaaaaaagcagttttttag

SEQ ID NO: 15540 - protein, 764 aa, DROSOPHILA
MSASVRNTVTSQENGSIFKRSSNLDNELKKKSVVVNQTQAEESKAKKKDTTHYYSVETLADLQYRSQIKVLEKIYGEEVDMTPKSIQDDTYVEQFMKYNLNVMHQMTNFTTMVAKSTTRSRTRSSVRAGIGGNKQSIDDLMNGILYETINWEPYSTVEALEEAYEPKPYTKSFLKITLRKSDFFEIHSQTQTTVAKGSPEGDDAERDNRNYEYLTIGKGKIRRRSDNDAQTDTLLFTTRAVNTILITKATVSSYVSNFEMYDTLNNITKEFATATMSSVKDLTSALAQTEDADTFEDDEAVAEKDKVSSQIERLFRSPEFRNAIMYMGRTLSSNTNEAGLRRFRNFDQVERWNAEAEYVYSMNLLFRLVPEPSKDERKAVSDIDFCRSNGDILAVAYGLYSFSSQHVPTSGSVFLWSIKNPGEPERAYYYDVPVTAINFSPFLPSLLAIGLYDGSVEVRDVSSLQDTPVAVSQRSTSPGSSPVVAIRWIKQVSDDDHETDIDPFLSLSQDGSVTRFRIIKSPFLLGFTQMILERVEGHPEGIFVHPSSRIPCESNRHPQGLSITTHPLHKDIYYVLTDEGCIHKCSINYQHQYLEVLRCHDGGVTVMEFSPWSPKLFLTCGNDWFVRIWVDGITRPLLELLDEMTPVHWAKWSPTHSTIIVTVNRETANVWDFRRNLLRPMSKHKMDSSFNTVARFSHCGRTLVIGNERGNTLFNALNDMPFSPHFQYDELEKAIFKAIGNDHELLMELKSIGFFGYPNKKAVF

SEQ ID NO: 15541 - DNA, 2885 bp, DROSOPHILA
cttgcagcttgacctcacttcatggctctcgtcgtggcaagactcagtggcaccgacctctgaccaactcaatcttcaactcgcactttaaggagaccagcaagaacgatctgtaccgtatcgatcatttggtggccaagggagcctttggcgtggtcttcaaggtgtccagcaagagtgacattagtcagtgctacgccctgaaagtgctaaagaaatcaaaggttgttaagcattcggttcggatactggcagagataaaataactcccctactttttttatacagctcatcgaagacaacagtgtacggcagataaaggacgaggcggacattcagaaggtttgcggccatcatccgtttatcgtgaagcaaatagatctgtggcaaaaccgccacaacctccatattcgtgcgttgagataaaactatactaacgattttatgtgtatactaaatactctaatccactgcagtatcggagtacgtacccaacggcgagttgttctcaaaaataactcacttctccattgatctggttcgtttatacattggcgagatagcacttgccttgggtgagtaaaagaggtcttaggccagcaaaccaatatctcacgtacgctctttttagattttctccacaacgctgggattatatatcgtgatgcgaagccggagaacatcctgctaactgaacagtttcacataaagctaaccgacttcggccttagcaagtggctcaaactgggggcaaacacgcgcaccatgtgtggcactttcaaatacatgggtacgatctaatccaacttaaacatacaaacacttaagaaatagatttagctgttaagaggcgtgccgatccatcgcaatccaaatcgttcaaaggtattttcgaaaagaaagcccatcaaagtaacttagaagaaaaagggaacagagcagtataggaaaatagagcatatataacaacctgttactctaggatactaatatttaagctataaaacaatgtacatttaatgagacaggcaacaattcaactataaacattactgtgagccagtaaacattatcagagaacgaagatcagacttaggaggcataacatagcagttaggcgatagtaagagatcaagggatccaaagtcacaatactgacgtaacactgtatataggcaacacacaaacgtaaacccaatctcaaactcaagccgtagaagttatcgcaatgaacgcgcgttcgcaggtttttgatctgaccatggagggtcgtcaggtggacgaggcggtggccaccatttttcacaccgtcctcttccaccgctgcttgggcaagtacatgtacacgggcgacgcccaatactcgattggcacggtcggctacacggacgtcgattgcaacttcatcgacttcacctacgtgtgctgcacctcggacagcttgacacacaaggtgaagcgggccatcaactcgttcagcgagaagctgcgctccaacgagagctgtggctcaggccagatcagcctggagttctttcagaaaaagaagaaccgctggccctttccgcaggagtcgatcccatgggaggtgtggacggtgcacctggatctgatcaagcacgagaacgaggatgagaggcagctgtgccgcgagaatgtctccgatctcctgaccgaaaaggtcatatacatcaccgagctgatgaatcggcacgattacgtgcccaaaacgcccagccagagcgaactggacctgatcttcgacacatcctttccggacgtgcagccgtatttgtttaagtttgactactccacctcgggctcggctgcaccctccatgggtaacgccatgaagaagatcatcaaggaaacgctcgcaatgtgacgggctgtcgggggaacgcaaatcctcccatcattgtgtagttttggtggccactacttagtttctcgcgagttaatttattagtactttcttttttttttttcaaccttctacgcctggtgtttcgttgcccatgaccaaggttgagtcataggcaagggtgataggatgaaacgcgaagtaaatacaataattatttatggcatatgacacgtccctgctgaactagatcgtttaacatataggcttcgtcttaattgttctgccttaataattttagttgttatcattgctttagatatctaataggttccattgaccaccgcttgacccacaagcatgctttgggtaaattctggactaacatgtccacggtacgatttaaaagcagaagggagacttgcgtagatgtagatagccatggatagccaaaagcagatggatgtagattgcataggcggcccactatccagatcccaccaaatgtataagctaaatcccctttatcatccatgcaaaacgttccaaaaacaagctttgcgctccactagcaagcagttagctgtcagtcgagcaaatataatgtgttaattatatcttaatcgccaatgtaaataacgaaaacgatgaaagctatgaacagagcagaacagatgaaaagcaacctttaacgaattcagaacccatttaaaatcttatgtttagatcgaggcaagtagcggtgaggcggtagaaatgtatgtataaaagattgtgattgtacttgtagtgattaaactatagtacggactccatgtatccatggatatccaatatgtagacatgtatgtatgtaaatcaatgtttatctatatgtccaagctataaaagtaaacgataaatgtactttacgacttaactaatattgtaaaatcgaattaagcggaataaatcctttgaagcacacgttcaaagtagaaatgtaattggcctttttgcgagcattatcccaaataatcca

SEQ ID NO: 15542 - DNA, 885 bp, DROSOPHILA
ataaaacaatgtacatttaatgagacaggcaacaattcaactataaacattactgtgagccagtaaacattatcagagaacgaagatcagacttaggaggcataacatagcagttaggcgatagtaagagatcaagggatccaaagtcacaatactgacgtaacactgtatataggcaacacacaaacgtaaacccaatctcaaactcaagccgtagaagttatcgcaatgaacgcgcgttcgcaggtttttgatctgaccatggagggtcgtcaggtggacgaggcggtggccaccatttttcacaccgtcctcttccaccgctgcttgggcaagtacatgtacacgggcgacgcccaatactcgattggcacggtcggctacacggacgtcgattgcaacttcatcgacttcacctacgtgtgctgcacctcggacagcttgacacacaaggtgaagcgggccatcaactcgttcagcgagaagctgcgctccaacgagagctgtggctcaggccagatcagcctggagttctttcagaaaaagaagaaccgctggccctttccgcaggagtcgatcccatgggaggtgtggacggtgcacctggatctgatcaagcacgagaacgaggatgagaggcagctgtgccgcgagaatgtctccgatctcctgaccgaaaaggtcatatacatcaccgagctgatgaatcggcacgattacgtgcccaaaacgcccagccagagcgaactggacctgatcttcgacacatcctttccggacgtgcagccgtatttgtttaagtttgactactccacctcgggctcggctgcaccctccatgggtaacgccatgaagaagatcatcaaggaaacgctcgcaatgtga

SEQ ID NO: 15543 - protein, 218 aa, DROSOPHILA
MNARSQVFDLTMEGRQVDEAVATIFHTVLFHRCLGKYMYTGDAQYSIGTVGYTDVDCNFIDFTYVCCTSDSLTHKVKRAINSFSEKLRSNESCGSGQISLEFFQKKKNRWPFPQESIPWEVWTVHLDLIKHENEDERQLCRENVSDLLTEKVIYITELMNRHDYVPKTPSQSELDLIFDTSFPDVQPYLFKFDYSTSGSAAPSMGNAMKKIIKETLAM

SEQ ID NO: 15544 - DNA, 2827 bp, DROSOPHILA
agcatccccatcacggagcaagattatcacaattgaatttaacgagatgaatggagaaagtgttaccgcatctattggtatttcctcaatcaaattgaaccagcagcttatgtattccaagattagttccagcaagtccggaggacgcccgagtagcggatccaccccggacaccctatgccgtataccgcacacactgcctccgcgagcactggttatgcgggcggggcgtgttccccatagacataccactactaggtactatgatttaccctactatgtaaatgtaaactatgttgtttttatatgcgtcgcgggacgtctcacaaatctcacgctcacgtttcacaactctaattattatttgtattatcgtattataaatatatatatatatgtatatttaatcattattttcattgtgcaaagaacaaaggcgataaatgcaactaagcgtatttaatagaccaaaactctgtcagcgctatcaatattgatattcaagtgttaataatattcgaattgtttaataaataaattagcatgatatatactaaaaatgatgtgtttctcattggtgaaagggtatcgttatatggcttttccctatatcgaactgatatgcccaacaatagaacggaaaggtacgattacaacctcataaatgggtgatatacaactttatgatcagcccacaagtgctgtcttcgctatcacgtgtgcacattggttcaagatcagctaaatcctgaaattaacgtcacaattattgatgatgttcaacgaagtgaaaactagtttctagccatgaatcatcgcaccaatggaagtgatctttgcgttttgggaaagcaaaaaagggcctaaaaatgccagttggcataaaagcttgcttatcgtggaaggggcttttcacaattttccatcggcgctagaaatcaacattgtccaatcagttcacccactgcgataaagtttattccgctgtgtccattaaactattatttctaggtgttagctgttgccagcgctggatagccttgactggtttcgccatccagatactaattaattggactggaaattttaataaatccgtagatatccgctgaatcagagtgaagcttttgctttgttatcacccagctggcttggtcagcagagtgataacgccacgaaaaaaaaaccgtattatcatctttttgggctgacacgctacacgtaacatggatgacatagtacccgatgtgctggatgcggttcccgctggcaccattaaggtcatctatggcgatgacttggaggtcaagcagggcaacgagctaacccccacccaggtgaaggaccaaccgattgtcagctggtctgggctggagggaaagtccaacctattgaccctgctcatggtggatcccgatgcaccgactcgtcaagatcccaagtaccgtgagattctgcactggtctgtggtcaacattcccggcagcaatgagaatccttctggtggccactccctagcggactacgttggatctggaccgcccaaggacactggcctgcatcggtatattttcctcctctatcgccaggagaacaagatcgaggagacgcccactatatccaatacgtatgatatatattaagatatttatcagtttactgtgacactgatcaattcccattcacagtactcgcacaggccgtttgaacttcaacgcccgggactttgccgccaaacatggattgggcgagcccattgccgccaattattaccaggcccagtatgatgactatgtgccaattcggaataaaacgatcgtaggctagatttgtgcatatatcatgcagggttttcaattccccgtcaataaagtttaaccaattgcttatctcgctatctatgcgttggggtattaactgaaaagtgcacggaactgattaggcggcggactccgtcgataaaaggccagacatcagggatccgggccagagtcaactcgctaacgctacaccgagcagaagcaacagaactaccagctaacatggacaccgccggcattattcccgacatcatcgacgtcaagcccgcctccaaggccaccatcacctatccttccggcgttcaggttgagctgggcaaggagctgactcccactcaggtgaaggaccagcccactgtcgtcttcgatgccgagcccaactccctgtacaccatcctgttggtggaccccgacgcacccagccgcgaggaccccaagttccgtgagctgctccactggctggtgatcaacattcccggcaacaaggtgtccgagggccagaccatcgccgagtacatcggtgctggaccccgcgagggaaccggcctgcaccgctacgtcttcctggtgttcaagcagaacgacaagatcaccaccgagaagttcgtgtccaagaccagccgcactggccgcatcaacgtcaaggcccgcgactacatccagaagtacagcttcggcggtcccgtggccggcaacttcttccaggcccaatacgatgactacgtgaagaccctcatcgagacggtccagtaatctggccaccaactgatcagctctctgtgaaataataaatattaaatatgtactagttctcataaaagttatctcatacatgcttgtgggcgggtcttttgctatgcgatttccataagcagctgaagtatatttttataagaattacttttgataacatttccggaattaatttaaacttgcccgaggctttgatatctttctttgaagttaagtttataaaagcgagagaaagaaatgtttataattaatca

SEQ ID NO: 15545 - DNA, 766 bp, DROSOPHILA
attatttctaggtgttagctgttgccagcgctggatagccttgactggtttcgccatccagatactaattaattggactggaaattttaataaatccgtagatatccgctgaatcagagtgaagcttttgctttgttatcacccagctggcttggtcagcagagtgataacgccacgaaaaaaaaaccgtattatcatctttttgggctgacacgctacacgtaacatggatgacatagtacccgatgtgctggatgcggttcccgctggcaccattaaggtcatctatggcgatgacttggaggtcaagcagggcaacgagctaacccccacccaggtgaaggaccaaccgattgtcagctggtctgggctggagggaaagtccaacctattgaccctgctcatggtggatcccgatgcaccgactcgtcaagatcccaagtaccgtgagattctgcactggtctgtggtcaacattcccggcagcaatgagaatccttctggtggccactccctagcggactacgttggatctggaccgcccaaggacactggcctgcatcggtatattttcctcctctatcgccaggagaacaagatcgaggagacgcccactatatccaatactactcgcacaggccgtttgaacttcaacgcccgggactttgccgccaaacatggattgggcgagcccattgccgccaattattaccaggcccagtatgatgactatgtgccaattcggaataaaacgatcgtaggctag

SEQ ID NO: 15546 - protein, 179 aa, DROSOPHILA
MDDIVPDVLDAVPAGTIKVIYGDDLEVKQGNELTPTQVKDQPIVSWSGLEGKSNLLTLLMVDPDAPTRQDPKYREILHWSVVNIPGSNENPSGGHSLADYVGSGPPKDTGLHRYIFLLYRQENKIEETPTISNTTRTGRLNFNARDFAAKHGLGEPIAANYYQAQYDDYVPIRNKTIVG

SEQ ID NO: 15547 - DNA, 4155 bp, DROSOPHILA
tgagatcgtggtcaaggtaaaacagtcccaagcggatcagatggaacacgatgtccaggcggtgacccagggaaacggtcttctcgtaggtcttgcggaaggcagtctctgcggcagccttgtcgccgatgcggcacaagtactctgacttcttaagattcgcctcgcgcacttccatctcgcccagattcttctccgcatcctcgattgccgcatctagctgctccacctctacgcggttgttctccttcattcgcgccagcagatccttgtctacggtccagccgagttccgagcagatgtgctcgtaccacggggccatattctccgtgcgaatcgcctccagaagcttcgccttcaatgccgcatcctgcttgtattccgccagggtaagcaggaacttcgtctgggccagctccaggttcgggttcttctccagaccctgctcctccaagttttcggcaggcattttggtcggatttgttggcttcggttttttaaacacagaaaaatagttgattttcttgacaaaactcaattttgtttttgtcaaatcgcagagtcatgtactaccagtgtgaccccaaaattatcgataaattataccgcatatttttacattgccaaaaataccagagcgatgtccatcaagatagcgacgaaattagaacagtgcaattgccaattgggaatttgtattttaatttatttttaaattctgaaagtaatttaaatttaaaaaaaaaacttgagagctgtctagaaaagaactgatgtttcatgataactttgtcgaagaattaagaaatatttagttgtaaaataattgttgaatctatttttttccaataacacgacttatatattttttgaaaatattcgagctaaatcccaagaagtaaactcaatctgggatttgaagtgcccagaactcgaataaacacttctttttaaataattgtaagaccgtatcacttatggtatatactgacctcgaagggccacactaagggggagtgaaaattgattttctgataaaaattttcgcttgaagctacagcatcgtccactgtccatgtatatatcttatatttgcatataaatatatatattacaccgacttggactaaccatcagatagcgcacaagatgattggcggcctgttcgtctacaaccacaagggcgaggtgctgatctcgcgagtttaccgcgacgacatcggtcggaatgccgtggacgcctttcgggtcaacgtcatccacgcccgccagcaggtccgctcgccagtgaccaatattgcgaggaccagcttcttccacatcaaggtcggtgaacaaagttcctatgtcacaatcaccaaccctcccacttatcatcaaaactcctttcacagagagcaaacatttggctggcggctgtgaccaagcagaatgtgaacgccgcgatggtgtttgagttccttttgaagatcatcgaggtgatgcaatcctacttcggcaagatctcggaggagaacatcaagaataacttcgtgctcatctacgagctgctggatgagatcctcgactttggctacccgcagaacacggactccggcaccctgaagaccttcatcacacagcagggcatcaagtcggccaccaaggaggagcagatgcagataacctcgcaggttaccggccagattggctggcgtcgcgagggcatcaagtaccggcgcaacgagcttttcctggacgtattggagtacgtgaacctgctgatgagcccgcagggtcaggttttgtctgcccacgtggccggcaaggtggtaatgaagtcgtatttgtcgggtaagttagcataaataatctagacattattccttttaataatcgccatgttgtaggcatgcccgagtgcaagttcgggattaacgacaagatcgtgatggagtctaagggacgcggtctctccggaaattcagaggcggaaacctcacgctccggcaagcccgtcgtggtcatcgatgactgccagttccatcagtgcgtcaagctaagcaaattcgagacggagcattcgatcagcttcatcccgccggacggggagttcgagctgatgcgttaccgtaccaccaaagacatttcgctgccattccgagtcatcccgctggtgcgggaggtgggccgcaccaagatggaggttaaggttgtgctgaagtccaactttaagccctcactgctgggccaaaagatcgaggtgaagataccaaccccgctcaatacatcgggcgtgcagctcatctgcctaaagggcaaagccaaatataaggcttcggagaacgcgatcgtgtggaagattaagcgcatggcgggcatgaaggagacacagctgtccgcggaaatcgaacttttggagacggacaccaagaagaagtggactcggccgcccatctccatgaactttgaggtgccattcgcgccgtccggcttcaaggtacgctacctgaaggtgttcgagcccaagctcaactactccgaccacgatgtggtcaaatgggtgcgctacatcggacgcagtggcttgtatgagacgcgctgctagggcgcccaagcatccccatcacggagcaagattatcacaattgaatttaacgagatgaatggagaaagtgttaccgcatctattggtatttcctcaatcaaattgaaccagcagcttatgtattccaagattagttccagcaagtccggaggacgcccgagtagcggatccaccccggacaccctatgccgtataccgcacacactgcctccgcgagcactggttatgcgggcggggcgtgttccccatagacataccactactaggtactatgatttaccctactatgtaaatgtaaactatgttgtttttatatgcgtcgcgggacgtctcacaaatctcacgctcacgtttcacaactctaattattatttgtattatcgtattataaatatatatatatatgtatatttaatcattattttcattgtgcaaagaacaaaggcgataaatgcaactaagcgtatttaatagaccaaaactctgtcagcgctatcaatattgatattcaagtgttaataatattcgaattgtttaataaataaattagcatgatatatactaaaaatgatgtgtttctcattggtgaaagggtatcgttatatggcttttccctatatcgaactgatatgcccaacaatagaacggaaaggtacgattacaacctcataaatgggtgatatacaactttatgatcagcccacaagtgctgtcttcgctatcacgtgtgcacattggttcaagatcagctaaatcctgaaattaacgtcacaattattgatgatgttcaacgaagtgaaaactagtttctagccatgaatcatcgcaccaatggaagtgatctttgcgttttgggaaagcaaaaaagggcctaaaaatgccagttggcataaaagcttgcttatcgtggaaggggcttttcacaattttccatcggcgctagaaatcaacattgtccaatcagttcacccactgcgataaagtttattccgctgtgtccattaaactattatttctaggtgttagctgttgccagcgctggatagccttgactggtttcgccatccagatactaattaattggactggaaattttaataaatccgtagatatccgctgaatcagagtgaagcttttgctttgttatcacccagctggcttggtcagcagagtgataacgccacgaaaaaaaaaccgtattatcatctttttgggctgacacgctacacgtaacatggatgacatagtacccgatgtgctggatgcggttcccgctggcaccattaaggtcatctatggcgatgacttggaggtcaagcagggcaacgagctaacccccacccaggtgaaggaccaaccgattgtcagctggtctgggctggagggaaagtccaacctattgaccctgctcatggtggatcccgatgcaccgactcgtcaagatcccaagtaccgtgagattctgcactggtctgtggtcaacattcccggcagcaatgagaatccttctggtggccactccctagcggactacgttggatctggaccgcccaaggacactggcctgc

SEQ ID NO: 15548 - DNA, 2034 bp, DROSOPHILA
gccacactaagggggagtgaaaattgattttctgataaaaattttcgcttgaagctacagcatcgtccactgtccatgtatatatcttatatttgcatataaatatatatattacaccgacttggactaaccatcagatagcgcacaagatgattggcggcctgttcgtctacaaccacaagggcgaggtgctgatctcgcgagtttaccgcgacgacatcggtcggaatgccgtggacgcctttcgggtcaacgtcatccacgcccgccagcaggtccgctcgccagtgaccaatattgcgaggaccagcttcttccacatcaagagagcaaacatttggctggcggctgtgaccaagcagaatgtgaacgccgcgatggtgtttgagttccttttgaagatcatcgaggtgatgcaatcctacttcggcaagatctcggaggagaacatcaagaataacttcgtgctcatctacgagctgctggatgagatcctcgactttggctacccgcagaacacggactccggcaccctgaagaccttcatcacacagcagggcatcaagtcggccaccaaggaggagcagatgcagataacctcgcaggttaccggccagattggctggcgtcgcgagggcatcaagtaccggcgcaacgagcttttcctggacgtattggagtacgtgaacctgctgatgagcccgcagggtcaggttttgtctgcccacgtggccggcaaggtggtaatgaagtcgtatttgtcggtaggcatgcccgagtgcaagttcgggattaacgacaagatcgtgatggagtctaagggacgcggtctctccggaaattcagaggcggaaacctcacgctccggcaagcccgtcgtggtcatcgatgactgccagttccatcagtgcgtcaagctaagcaaattcgagacggagcattcgatcagcttcatcccgccggacggggagttcgagctgatgcgttaccgtaccaccaaagacatttcgctgccattccgagtcatcccgctggtgcgggaggtgggccgcaccaagatggaggttaaggttgtgctgaagtccaactttaagccctcactgctgggccaaaagatcgaggtgaagataccaaccccgctcaatacatcgggcgtgcagctcatctgcctaaagggcaaagccaaatataaggcttcggagaacgcgatcgtgtggaagattaagcgcatggcgggcatgaaggagacacagctgtccgcggaaatcgaacttttggagacggacaccaagaagaagtggactcggccgcccatctccatgaactttgaggtgccattcgcgccgtccggcttcaaggtacgctacctgaaggtgttcgagcccaagctcaactactccgaccacgatgtggtcaaatgggtgcgctacatcggacgcagtggcttgtatgagacgcgctgctagggcgcccaagcatccccatcacggagcaagattatcacaattgaatttaacgagatgaatggagaaagtgttaccgcatctattggtatttcctcaatcaaattgaaccagcagcttatgtattccaagattagttccagcaagtccggaggacgcccgagtagcggatccaccccggacaccctatgccgtataccgcacacactgcctccgcgagcactggttatgcgggcggggcgtgttccccatagacataccactactaggtactatgatttaccctactatgtaaatgtaaactatgttgtttttatatgcgtcgcgggacgtctcacaaatctcacgctcacgtttcacaactctaattattatttgtattatcgtattataaatatatatatatatgtatatttaatcattattttcattgtgcaaagaacaaaggcgataaatgcaactaagcgtatttaatagaccaaaactctgtcagcgctatcaatattgatattcaagtgttaataatattcgaattgtttaataaataaattagcatgatatatactaaaaa

SEQ ID NO: 15549 - protein, 438 aa, DROSOPHILA
MIGGLFVYNHKGEVLISRVYRDDIGRNAVDAFRVNVIHARQQVRSPVTNIARTSFFHIKRANIWLAAVTKQNVNAAMVFEFLLKIIEVMQSYFGKISEENIKNNFVLIYELLDEILDFGYPQNTDSGTLKTFITQQGIKSATKEEQMQITSQVTGQIGWRREGIKYRRNELFLDVLEYVNLLMSPQGQVLSAHVAGKVVMKSYLSVGMPECKFGINDKIVMESKGRGLSGNSEAETSRSGKPVVVIDDCQFHQCVKLSKFETEHSISFIPPDGEFELMRYRTTKDISLPFRVIPLVREVGRTKMEVKVVLKSNFKPSLLGQKIEVKIPTPLNTSGVQLICLKGKAKYKASENAIVWKIKRMAGMKETQLSAEIELLETDTKKKWTRPPISMNFEVPFAPSGFKVRYLKVFEPKLNYSDHDVVKWVRYIGRSGLYETRC

SEQ ID NO: 15550 - DNA, 4172 bp, DROSOPHILA
atcatagtattgtttgcgatccagatacattgaatccttctcgctcaggccctgatttagattgttctcgtgatcagccattttcaaattgttcgacagcaagcaggtgtcgtccagcaatcccagctcaatcacggactgagtgaactcctgtttgcgcaccagcatgcagatctgactgatggcgtctcgcagggcgtccttgtgctccagtagcttggcaatgacgccattctgtaaagtattaagacgatgaactggagatcttagccatccaagtgaaccagggagcttacaatctgacttgtggccagcttaaagcagaatttaaactccttccagcccagcttgtcgtccagtcgatcggataggttctccacgatgaagatgtaagcgggaatgtccataatcagttgctcgaggttttggttgattgtgctgcttttgctcaggaaatccatttcgcagaacgtagtcctgcaatgatttggagataattagttggttatcccaaccatggtccacgattaccgacttcttgtccttgattatttcgagcgccgccacaattctgccgtaaatgtcacgcattttccgcacctcgtacatgtagagcacaaacttgaggtcattttctgccgaacttagacgctgcttgtccgagagattatcgtagagcgttagacccactggagcaccgcgacgaggacgtggcgagggttcgcctccatcggcaatctgcagttgcatgacaatggcatcttccgcctgttgttgttgtaggggcagatccaagtgggagcatttaaggtcctgcttaggggaaaatagttattatagcttagtgaactcctgctaatcccaagctcaactcaccttacacatgatttccagtgagtttttgatttcctctatcacagcggtcaatacaaataaggttgattcgatcttttggatagaatggtttagtttcccaacctggaatataatcaattgcgctctaactcacttcaggtactaggtaattaaccagctcggctttctcgtccacactcagacccacaaagactccgagtacgttctgtagcagctgttgaatttgcgacataaagatgggaatgcgggtgcggatgtacttgacgatttcgttcttctgatatcgtgtcatgtgtgcggcatccgtaatgaagatattgcagaactgtagcaccttggcgcagcctaaaaagatgcatactcttataaatcctggataaatgatttcttcccagtgactcacctatggcacactcgcgcaaggcatcctgaaaggtcgcatagagttgcgccggatcgcgggttatattcccgggattgatgcactgtatgacccgattgagaatgccgtgcagatccattgtaacattgaccacaactaaaagcaatccgtaaggagttacgccgatatacaccggatataggcaatgtaatgcttacacttcttgagtcgtatcagccgcaggtatttgcgtgtcggctccaccagcttggttagcgatggctgcagttccgcgaagctgatgagcttctcgcacacatcctcgtccagatccggaagcagggactccgtgtacagccagtgcaggatggggcccagcaggaagttgggcagattacacagcacgcccacgggcgtcagcggcgacgatggcggcgtgtccatggagctgggaaaaggcgagggactgcgagcacggtacggcgatagtggtggcctccggatgctgcaaatggccagacctgtggtcggcggcatgggagtgggcgttggctgcagcatcaggtcctggcagaagttaaagatgttcttgcaatgcgactgcgatgtctccaggtgcgaatccgaatgcgaagtgggcggcagacggtacataccgccaccgccgccacattcgaggctcagcagacccgtggtcctgaccaccgactccgagtccccggcgttgccgttgctcaggcaattgaagctgctgctgaactgatgcacgcgctgggcgcccaatccggacgagggcatggtctgaaagtcgcacggcggttgcagatagatgggcgagagattcagacgcggcagggacttctcatgcccatcgtcgttggacgccggcgccacggagatgcgtatgggattcggggtgttcggaccactgtgacaggacctggccgcaggacgagcggcagccgatgacggggcactgttcacgcacatgctgcaatcgaagccattgagtcgcagtatggaggcgtgcagggcgtactccaggccactggagctcttcaccatcacatcgctaaagtaggactcctgtagggcctcgccgaagctcagttgcttctcctgaccagcggcttgattgtcctgcaggcgcttgcactccacggcataccagttctcgcagctgagaaccagcgtatcagtcggcgttaaggtgttggtctgtgcgtatgggaaaggtcaaaggttaaaccaagggctctgcagaacgtacacatatgtatatagcacttacgctgaactcgatgctgtggccggcaaaggcgccgaagaccaggcgcggattgatctcgtggacatcgaaggtctcgcagctgaagagaacactggccgattcgcaaaagttgccacagtctttcgattccggaagcgggctgaccagatcgttgtaccacgtaatgtcactggtgtcatccaggcggaacttgatgctgtatcggagaatattaggatgactctacgcttcttcaggattagcttacccctctagaccggacagctctcgttttccctcgaaggtgcagcagacaatctgagatttttggcgtgggtgtatatgttagatggacaaccgattcaggtagttgggatataacgaagcaactcacctcccaggtgcccaggaaagtgtgcaccagtgccatgtcggttttttttagtgtcctgcttggagttgcctaatctcgcgtagagccatgtatcctggccgattcagtgtatccgtgtgtgtgtgggtgtgcttttgtcctgcggtgtggaactgcagcttacccagcagcagcggcgaccaatttgcatgctccgctccttggatgcggccaggagtcgtgaccgatgtccactttttacttttcctacctttagaaaggaactcttctggatacggttatcgatgtgcgagcgtgcatgtgtatgtatttgttgttgccaataagtgtaactgcgctgccgctgttgctgcttcctccgctactccgccgccaggactctctgcaaggaaagcagcgagtctttcgcgctctcgctggcactctcgttcgctctcgttcgctctcctcccggctgttcgtgcccgcatcctggcgtaagcagcagctgacaaagctccggaaaagggggaaaagctccgggaaatgcgaaaaatcaccgtggttggttatgtatgacaatgccacccacgttcggcgagctttctatttactcgtccataaaatgtttgggcaaacacaacaggaaacccatttgccgtcactgattttccaacagcattcgctgtcactcaaaaaaataattccaaacgagatagtcctaaacaaatcatgaacataagttgaagatatttgataaaaaatattatataatatactccaagacgtttacaagcgaccaaaatatgacatctttccaaggttaaaatagctaaggcacccatataaaaacatttaacttttgagaacaagaaaaacatttattttggcgcattggactaaaattacttttcgagcttgaaaatacattgcaaacataaacggtgtaaaaatggcattcgaaatgcaataaaactcagattataaatttaaaatttatcactgcaagctttttgaatacatttgaattttttttttgctcaatatagcatatataatatggaatataatttattaataatatttaaacaatttgctatttgttcgattgtaaagaatgcaaacactatttcttcattttaaaggcatttgttaatcgagtcgagagtataagacttttgtacaaattgttagttgaatggaacgttgcagtttaaataataccaaaacaagtggaaaaaaatatggctgaacatcaagtcgatgtgatg

SEQ ID NO: 15551 - DNA, 1852 bp, DROSOPHILA
gtaggaaaagtaaaaagtggacatcggtcacgactcctggccgcatccaaggagcggagcatgcaaattggtcgccgctgctgctgggtaagctgcagttccacaccgcaggacaaaagcacacccacacacacacggatacactgaatcggccaggatacatggctctacgcgagattaggcaactccaagcaggacactaaaaaaaaccgacatggcactggtgcacactttcctgggcacctgggagattgtctgctgcaccttcgagggaaaacgagagctgtccggtctagagggcatcaagttccgcctggatgacaccagtgacattacgtggtacaacgatctggtcagcccgcttccggaatcgaaagactgtggcaacttttgcgaatcggccagtgttctcttcagctgcgagaccttcgatgtccacgagatcaatccgcgcctggtcttcggcgcctttgccggccacagcatcgagttcagcaccaacaccttaacgccgactgatacgctggttctcagctgcgagaactggtatgccgtggagtgcaagcgcctgcaggacaatcaagccgctggtcaggagaagcaactgagcttcggcgaggccctacaggagtcctactttagcgatgtgatggtgaagagctccagtggcctggagtacgccctgcacgcctccatactgcgactcaatggcttcgattgcagcatgtgcgtgaacagtgccccgtcatcggctgccgctcgtcctgcggccaggtcctgtcacagtggtccgaacaccccgaatcccatacgcatctccgtggcgccggcgtccaacgacgatgggcatgagaagtccctgccgcgtctgaatctctcgcccatctatctgcaaccgccgtgcgactttcagaccatgccctcgtccggattgggcgcccagcgcgtgcatcagttcagcagcagcttcaattgcctgagcaacggcaacgccggggactcggagtcggtggtcaggaccacgggtctgctgagcctcgaatgtggcggcggtggcggtatgtaccgtctgccgcccacttcgcattcggattcgcacctggagacatcgcagtcgcattgcaagaacatctttaacttctgccaggacctgatgctgcagccaacgcccactcccatgccgccgaccacaggtctggccatttgcagcatccggaggccaccactatcgccgtaccgtgctcgcagtccctcgccttttcccagctccatggacacgccgccatcgtcgccgctgacgcccgtgggcgtgctgtgtaatctgcccaacttcctgctgggccccatcctgcactggctgtacacggagtccctgcttccggatctggacgaggatgtgtgcgagaagctcatcagcttcgcggaactgcagccatcgctaaccaagctggtggagccgacacgcaaatacctgcggctgatacgactcaagaagtttgtggtcaatgttacaatggatctgcacggcattctcaatcgggtcatacagtgcatcaatcccgggaatataacccgcgatccggcgcaactctatgcgacctttcaggatgccttgcgcgagtgtgccataggctgcgccaaggtgctacagttctgcaatatcttcattacggatgccgcacacatgacacgatatcagaagaacgaaatcgtcaagtacatccgcacccgcattcccatctttatgtcgcaaattcaacagctgctacagaacgtactcggagtctttgtgggtctgagtgtggacgagaaagccgagctggttaattacctagtacctgaagtgagttag

SEQ ID NO: 15552 - protein, 545 aa, DROSOPHILA
MALVHTFLGTWEIVCCTFEGKRELSGLEGIKFRLDDTSDITWYNDLVSPLPESKDCGNFCESASVLFSCETFDVHEINPRLVFGAFAGHSIEFSTNTLTPTDTLVLSCENWYAVECKRLQDNQAAGQEKQLSFGEALQESYFSDVMVKSSSGLEYALHASILRLNGFDCSMCVNSAPSSAAARPAARSCHSGPNTPNPIRISVAPASNDDGHEKSLPRLNLSPIYLQPPCDFQTMPSSGLGAQRVHQFSSSFNCLSNGNAGDSESVVRTTGLLSLECGGGGGMYRLPPTSHSDSHLETSQSHCKNIFNFCQDLMLQPTPTPMPPTTGLAICSIRRPPLSPYRARSPSPFPSSMDTPPSSPLTPVGVLCNLPNFLLGPILHWLYTESLLPDLDEDVCEKLISFAELQPSLTKLVEPTRKYLRLIRLKKFVVNVTMDLHGILNRVIQCINPGNITRDPAQLYATFQDALRECAIGCAKVLQFCNIFITDAAHMTRYQKNEIVKYIRTRIPIFMSQIQQLLQNVLGVFVGLSVDEKAELVNYLVPEVS

SEQ ID NO: 15553 - DNA, 9871 bp, DROSOPHILA
tcacttgtgcttaaaatgtaaaactagaagcaggactctttcaattaaaaggaaacaaaacaaaaatgaagcttgcaagccgaagcttacatatccgtgcaataataataattatcagctaatcaaaaactacaaacattaataaacaattatagtttctgatcaaagagtgtttctatttggtatacattagattcttttatatataatttctgcaagggtaaatgtatcttgtaggacacatctttctgataagaatggaattaggaatttccaagtgtttcacttatgtatatgtatgtaagttaaattgaaaacaaattcctagaaatgcgcttgtcggaccggacttgtcttatcattaaaacactctttattccttttgtgcgtgattttctatggggatcacatatgttctagtcgagagatcgttaaccggttaattcgtgttgaacaatgcatccatgtgctaatttctatataaacagccattttacgttttccctacagttcgcttgttgtaaacactacaagcttgcgaaaatggaaataaagaataaatattaacagctggaacatggggaagattcaaagcggtgcctttgttgtaccgccaatcttatggatatctcaatataacatttttataaattcaataaaattttaaaatgctcaaattctcataaccatatgtacatgttcagtgattagatcagcattaacattcaatttaatcaatgattgtttttagtgaaagattaaaattactagatttaaattgaagtaaatatctttctcccgaactttactttcgaacattttcggcaaggtgttttggtttgagtcgtagctaagcagtgcaacgaacccaacctgcaataagctttgaagctcaacaaagttatatttgttgttattttttgatttcgttgctacaaattttgagaattcaaacattgcaagcgtagattgccgacttgagaaatcagttgccagcgagctttcaagcggacaacaggtgatcgcgactgtttcgcagaaaaggtgaaaatcgcgtacaaccgagagcgagtaaagtcgccccaaaaacgcgcacctcgtcttgggcaatctacggtgcttttattttggtgctgctgcaatctggcgtgagagtgagatagtgttcggcagcggtagtgcgagtgagaagcagcaacgcgcctgcccacggcaataaagttcgacttgatttttgttttaatatgtgatgccaatacacaattcgacaatcgagaaaacgtgtttacacttaattttgctaacgtgatttaaagacaaaccaaaaatgcgcctccagggagcggatatgggcgctattccagtgctaatcttagtcaccgcttgtttgctttgccaaacatctgcccaggggttagtatatcacacagacacacatcacttccacaggtgacacattcggcaagcgatagaaaaatggaagtatatttttaaatgccgcataatgacatcactcaactccagatgaagccaaaacaaatgacttagacgacgaactcgagagttcattgggaatttcaggaagatgccgccacgcagatctgtaattaacaacatgtaatcaagaaattagccctgggttttattactgtcataataagctgacaagaccgaaacaagacggcagattaaataacctgaagccaacgcgatttttggaggcgaactcagagcttcctacgcatactcaattcgatagggtgatgcaaggtggcaagatgctaaaaaggagatgcattccattggaaaagaaaaaatgttagcttgctcaatagttccgcatcccataaaatattcacttgctgtcgagtatggctagaattatttttgaaactaactaactaagcgttttgttacttttcaatatacatttgacccctatccaaaataaacattttctgtaataaaaaaaatttcgattgcttattttgacaatatctctgaagcagtaaattctaccataaccagtatcattcccttccctatcgactcaccctgatgctgtcgcctggttgaggtgacacattaacatggattgctacttgtgtactcatttccgatggctcaccttgaaggctgaccagtcgaagcgattttataatcactttgcgaatttattgagctgtgtgtgtagagcttcgccaagaactgtgattgatcgagtaatgatcactaccattggaggcgtctacttctggtacttttctcctgtttctcctcgatttcatgatctgtcattgagttggccgagctcaatctgccaccatatatgggccactcgttcaaggcttgatttcgccagttcatgtgggtgaatttcatacaattgaacccggatcggacaagagctatcctatgtctatgaatcgtgaaacctggttacattcgtttaacaccccatggcagaatcaatcaggtggaacatcgctactgcaactggaaacgtgaagcctgcattttgcggaccatttgagcaaaagcgaaattgtttttgccatttacctgttggttgaaaaccgttttgcgagagcgaccaccatcgagggaacctgtttttttaggctaacaaacgtgacataaacacaaaagaaaattttttggtgggaacaggttaaacccgccgcaccaattgaaattagaacaggcggtaagcagtgaattaccagagaaggtggcatagttaggaggcagctcataagtttagcaatttagctgacaactaaatgcatagcccgagcattttaaaaaggcagccaaatgtaaaaagcaccaaaaaggataaaaaaaagaaaaagcttacgtaaaaaactaaagttactcaagcaacataaggcacctttcgaaaacaagttaggtgtacgttagtttggctgcaaaataaatccattagttattagttacaacttttaaatcctgttttttttcataaattaactggtaataaggtagcttaaatataccatgataaatatattcaaataagccgaaaaatctttgattaacagctgcttattgtatggcttagctgatttaggaagcttccacattctgaatttcgatgagcccacaaaagaaaaccacacaaaagtagttatagctcgagccactctgccgtacttcccacaaccccgaccccaagaccacagaccaccaaaccacctccaaccatttccgacagatacctcaccgcagcgattgatgctgacccgaccgaaagttaaagtacaataccctctttcgggttggggtattgtcttccgttagacgcgtgaatgaatagcgaaaaaaagattcagatagcataacagcataggtgtaatccacttatctacgaacattaaatctgtagctctttttgtttatttattttacggcagtcgccggcttgaggttaagtcgggtttcgtttggaaaaaatgttgttcaaaatgtaaggggtatagtaataagtttaaaatcttcacacatagttttaaagatatatttctcgttttcactatttttgtaataatttaattgtagtttatactccatcattgctccgaatactttgcgtccgaactcgcaatttcatgtggctgtgagcttgcacaatgcacctgaatctgccacatttaaggtgggaatcctggggagctcttacacggactttaagaccgtggagttacggcccttttccacacagctattgcactttgaggtaggtggtaactatacatgatatagcaaaagacctcctatttatcacaaatcaactttagattcccgccttaagaactgacagatatcgcctaactgctgagggccttggaggagttcagtttaccaatgagactcaactgcactttgagtccaaacaacatacggttttggttcagacggacaagagcatctacaagccaggcgatttggttcactatcgagttcttattttggatgccaatctgaaacccgcgcgtggctatggacgtgtgcatgtggatatcaaggactccggtgataacattatacgcagctacaaagacattcgtctgaccaattccatttactcgaacgaactgcgattgtcggactccccgcgttttggcacttggtccattgtcgtggatgtttcggatcaagagcatacgcaaactttcgagatccttgatcatattctaccaaaattcgttgtagacatcgatacacccaagcacgctatttataaggatgggaaaatagcagccacagtcagagcgcagtaagcagtaaaattcttaaataaatttcaatgcgataatacccaaacgtttgatttctagctatgcatttggccagccaattgtgggtgaagccaccctatccatttatcccactttctttggctcgctccaaccttttgttaacgatctcatcacccgaaaagttgtgccaattgatggtaatgcgtactttgagttcgatatagagaatgagctccatctgaagcaggactatgagcgacaataccttttggatgccctcgttgaagaaaagtcaactggttcggtgcaaaactattcaacagtcttgacactgcacttgaaccattatcgcgtggaggccgtcaaggtgcccagctactatattcctggagtgccctttgaagctacagtaggtggccaaggaaaatgtctgttgataattatgaacattaattttgttccaggctcgcatagcccgcaatgatggcggccaattgagggacttcaatccccaaatcaccgcatatttgacgaatgtctatggcagcagtgagatgtacaaccgtactgcctatagcctggatgccagtggagagatcaagatgaagttcactgttccgattggagatcgagatgaatttcattccataatagttgactaccagggcgtgatcagtgaggtgggaaagatcccgagtaagcatttgcacagcaaaaactatatcactgctaaagtgttgaatgataggtcagttgagatatggaaaatacattttaactatttattaataatagtatcactatttaaagacccactgtaaaccaggaaatttctgtggtcgtacgctcctttgcgcccattaaatattttatgtaccaagttgtcggtcgcggcgatattatactgtctcgcaatgtggatgtaagtaaatattttttgtaccagaagtttattatgctttatcgatttggtaacttttccaaggtggcccctgggactttccacacaatcaaattcctggcatcatttgcaatgatgccgagagccaatctgctcgtatatacggtaatagatggggagtttgtttacgatgagcaggtcatacagcttgaagaaaatctactcaatgcggtaagagttattaggtatatctccgatttctattaattctcattcattactaataggtacaagttgacgctcccattagagcacctcctggtcaagatattgacataggcataagcaccaaaccctactcatatgtgggcctcatgttagtggatcaaaatgcaaacgaccttaggagtggtcatgatttaacccacaaacgactgatggatgctctgcgttcatacgaactgagcgatgtgaacactccaatgggatcacctggcaaggagtctggtgtgataaccatgtccaatacggattactttatcgaaaaggaagctgagagcaatccggctttggatcgagaggtttccaccgggcccgaggaagacaaattaacgactgtgcgaaaaaccgacattggacctgcccacaagatcgaggttaatacgttgcctcctggaaaaggccgatacgccttttcttataccccaaagcccttttggcataatccaagggtccatgtgatgcgcgatcctgcggatacgtggctcttcttaaacatctccgccagcagcgatggaaggaattcaatccacagaaggattcccagtgagatgacatcctgggtggtttccgcctttgctctggatccggtgaacgggttgggattatctccgcccaatggaaaattggaggcctacaaagagttttacataagcaccgagttgccctactccataaaaagaggtaaaacacgaattgggtaaaaaataaatgatataaacatatttaatatgtatattttcagatgaactcattgccattccgtttgtggtgcacaacaatagggacagtgatttgaacgtggaggtcacgttttacaactcagcgctggactttgatttcccacaactggatcctaaggccaccaaccaaccaagtgagttttccgtgttactgttatgacctttacgattctttaactatttatacaattttcagaggtggaactctacagacgtagatccttgcaggtaccgggacgatccgcccgctccgtgtccttcatcgtgactccgaagagagtggggcccctcttggtcaaggcaatggctgcctcctcccaggctggcgatacagtcgaacaaaatctgctggtggagcaccctggagccatggagcggatcaacagaggattcctcttcgaacttaactccaatgcccagaatagaaggaacgtcaccattgcggttccacgcaacgccattccggaatccacacgtattgaagtatcagccgttggcgatctcattggcagcttagtgggtaatctggatagccttatccttctgccaacaggctgcggcgaacagaccatggttaattttgtaccaaatctaatagtattacgttacttaggggtgagtcagattcggcgatattataacacctttttataatgtgaatgtgatgtgaaatcctctcaatagcgccttcgtcaactcacgcccgaagtggaactgcgtgccacaaacaatctggctataggctaccagagaattctttattatcgccatgagaatggtgccttcagtgcatttggattagatatcaagcggagttccacctggctgacagcgtacgtggctcgctcacttcgacaagcggctccattcactcaagtggatagcaatgtcctgcaaaaggcactaacctatttgggaagtgttcaatcagcaaacggtggcttcgaggagcgtggcgacgtattcgagagatttggcgacgatggcatcagtctgactgcatttgtgacactggctctgatggaaaatgtggtaaatggaatgacttaaaaattttacaatgatatttcattaatattatctaggatctgtatcccgaatatcgaaacaacatcaacaaagccctggactttatcaccaggggcttagatggatcaagtaacctgcacgccatggccataggcacttacgtgctctcccgagctaatcataatgccaaggcagcttttcttcagcgattagactcaatggccaccaacaagggcaagataatttattttttattaaaagtacttacgtaatagtgcaactatcttccagatggcctcaagtggtggaacaaaacggcgcccgctggtgagcaacaatcaccctggtataatgccactcgtagcgtcaacattgagatctccgcttacgccgccttggctctactggaaaataacttggtgggcgatgccctgcccgtcttgaactggttgatggaccagcgaaatcccaaaggtggttttgtggcatcgcaggatactgtagtcggccttcaggcgcttctcatgttcgccgaacgcttttccagtcagggcaataatctccaaatcggcttccattacggagaaggcgctgaaacgataattaatgtgaatgccgaaaactcactagccctgcaaacggtggaggtgagtgattaactttgaattaactaaaaatgatttatatttaattggcccactttctagctgccaaacaatcttaaaaacttgagtgtttcggccactggtcggggaatggcattggcccaagtcagctacacctataacacaaacgtgaccagtgcctggccacgatttgtactcgatcccactgtgaatcggaactcccatgcggactacctccatctttcggcctgtgccagctttgtttccgtggtgggcgagaacgagcagcgctccaacatggccgtgatggaggttcacctgcccagcggtttcgtcgtggacagggatacacttcccaccctggagtcgagtgagcgcatcaagaaggtcgagacccagaacaggaacaccaaagtggtcatctactttgattacctggacagaagggaggtgtgtcccaccctgcacgcttacaagacggtcaaggttacaaaacatcgaccggtggcagtggtcatgtacgactactatgacagcggtaggattgacaaattgaacaaatatcattaacctttgattaatttatcaatttacccttgatatacagctcgccgtgccagacagttctacagggcacccaaatccaatatctgtgacatttgcgagcacgccaactgcggtgacctatgcgaaaaggccgagaagcgcgagtccaagcgacctgatgactacacggcgatagcgggtcatagttcagggtcaagacacacagccattccactggcatctgtggttatggttctgtcgatgcttttgaaaacccttagctgttagacgatactgttaccgccacttaacgtggaaccaatatggaaatcgaagctttaacaacacccactcacatagtccctaagttagcctaatgaatgccgtgaactaaacctgttctaagtacatctaacgatgctaaagtgttgccaataaagtgttataacgtttactaaaaccagagcgcaatgtttgaattgggaaaaatcaagctatgaaaatccttactttgttttctatcgatatatttatgtgaaacattacgtaaagttacatttcttttgacaagtgtattatttacctcttcatatgcgtttgccagatgtaaaactcatacgctctgttgtactcgagtgctttaaacatgctcctctcttgacagaaacaaactcatgttcactcgctcgtttatttttgacagcatcaaataaaaagtgtaaaaatagatctattatttctcaaatccctgttggctttagttcagtatggtaaattcgaagttcaggcttgagtgacaatggcgaataatcagcccccgacaacgaatgctacgcgtaaagataagcgcatagagcgggacgagaaccgtggccaatggaagagcaagtcggagtttatcctctcgctccttggatatgccattggcattggcaatgtgtggcgatttccctatctctgctaccgcagtggcggcggtaagtcaccattaattcgcccacatagccacctgttcacccacttgagacaaccgaaccaaccgaaccaacaaccacccacccatctcgtccagcatatcgatgggtgagctcaagctctggccgctcccgaaatagcgcagcactgacgtcagtactgaacgagagttctgcactgagtggcgatgtttatttttaggctttagctttcgagtgaaagctggcaaagctccagcacacatgagggccatttggccgaccaaatagcgacgccttcgatagctcagttggtagagcggtggactgtagagtttccgaggcttggtgatgcgagcagaggcaggactctgggccaaacaataccatggccccagatagcgcttgctcttgtttcatcagttagtgaatcgcgatatgttgaaatccataggtcgctggttcaaatccggctcgaaggatattattttgggttttcttccgttttctt

SEQ ID NO: 15554 - DNA, 4745 bp, DROSOPHILA
ctttcaagcggacaacaggtgatcgcgactgtttcgcagaaaaggtgaaaatcgcgtacaaccgagagcgagtaaagtcgccccaaaaacgcgcacctcgtcttgggcaatctacggtgcttttattttggtgctgctgcaatctggcgtgagagtgagatagtgttcggcagcggtagtgcgagtgagaagcagcaacgcgcctgcccacggcaataaagttcgacttgatttttgttttaatatgtgatgccaatacacaattcgacaatcgagaaaacgtgtttacacttaattttgctaacgtgatttaaagacaaaccaaaaatgcgcctccagggagcggatatgggcgctattccagtgctaatcttagtcaccgcttgtttgctttgccaaacatctgcccagggtttatactccatcattgctccgaatactttgcgtccgaactcgcaatttcatgtggctgtgagcttgcacaatgcacctgaatctgccacatttaaggtgggaatcctggggagctcttacacggactttaagaccgtggagttacggcccttttccacacagctattgcactttgagattcccgccttaagaactgacagatatcgcctaactgctgagggccttggaggagttcagtttaccaatgagactcaactgcactttgagtccaaacaacatacggttttggttcagacggacaagagcatctacaagccaggcgatttggttcactatcgagttcttattttggatgccaatctgaaacccgcgcgtggctatggacgtgtgcatgtggatatcaaggactccggtgataacattatacgcagctacaaagacattcgtctgaccaattccatttactcgaacgaactgcgattgtcggactccccgcgttttggcacttggtccattgtcgtggatgtttcggatcaagagcatacgcaaactttcgagatccttgatcatattctaccaaaattcgttgtagacatcgatacacccaagcacgctatttataaggatgggaaaatagcagccacagtcagagcgcactatgcatttggccagccaattgtgggtgaagccaccctatccatttatcccactttctttggctcgctccaaccttttgttaacgatctcatcacccgaaaagttgtgccaattgatggtaatgcgtactttgagttcgatatagagaatgagctccatctgaagcaggactatgagcgacaataccttttggatgccctcgttgaagaaaagtcaactggttcggtgcaaaactattcaacagtcttgacactgcacttgaaccattatcgcgtggaggccgtcaaggtgcccagctactatattcctggagtgccctttgaagctacagctcgcatagcccgcaatgatggcggccaattgagggacttcaatccccaaatcaccgcatatttgacgaatgtctatggcagcagtgagatgtacaaccgtactgcctatagcctggatgccagtggagagatcaagatgaagttcactgttccgattggagatcgagatgaatttcattccataatagttgactaccagggcgtgatcagtgaggaaatttctgtggtcgtacgctcctttgcgcccattaaatattttatgtaccaagttgtcggtcgcggcgatattatactgtctcgcaatgtggatgtaagtaaatattttttgtaccagaagtttattatgctttatcgatttggtaacttttccaaggtggcccctgggactttccacacaatcaaattcctggcatcatttgcaatgatgccgagagccaatctgctcgtatatacggtaatagatggggagtttgtttacgatgagcaggtcatacagcttgaagaaaatctactcaatgcggtacaagttgacgctcccattagagcacctcctggtcaagatattgacataggcataagcaccaaaccctactcatatgtgggcctcatgttagtggatcaaaatgcaaacgaccttaggagtggtcatgatttaacccacaaacgactgatggatgctctgcgttcatacgaactgagcgatgtgaacactccaatgggatcacctggcaaggagtctggtgtgataaccatgtccaatacggattactttatcgaaaaggaagctgagagcaatccggctttggatcgagaggtttccaccgggcccgaggaagacaaattaacgactgtgcgaaaaaccgacattggacctgcccacaagatcgaggttaatacgttgcctcctggaaaaggccgatacgccttttcttataccccaaagcccttttggcataatccaagggtccatgtgatgcgcgatcctgcggatacgtggctcttcttaaacatctccgccagcagcgatggaaggaattcaatccacagaaggattcccagtgagatgacatcctgggtggtttccgcctttgctctggatccggtgaacgggttgggattatctccgcccaatggaaaattggaggcctacaaagagttttacataagcaccgagttgccctactccataaaaagagatgaactcattgccattccgtttgtggtgcacaacaatagggacagtgatttgaacgtggaggtcacgttttacaactcagcgctggactttgatttcccacaactggatcctaaggccaccaaccaaccaaaggtggaactctacagacgtagatccttgcaggtaccgggacgatccgcccgctccgtgtccttcatcgtgactccgaagagagtggggcccctcttggtcaaggcaatggctgcctcctcccaggctggcgatacagtcgaacaaaatctgctggtggagcaccctggagccatggagcggatcaacagaggattcctcttcgaacttaactccaatgcccagaatagaaggaacgtcaccattgcggttccacgcaacgccattccggaatccacacgtattgaagtatcagccgttggcgatctcattggcagcttagtgggtaatctggatagccttatccttctgccaacaggctgcggcgaacagaccatgcgccttcgtcaactcacgcccgaagtggaactgcgtgccacaaacaatctggctataggctaccagagaattctttattatcgccatgagaatggtgccttcagtgcatttggattagatatcaagcggagttccacctggctgacagcgtacgtggctcgctcacttcgacaagcggctccattcactcaagtggatagcaatgtcctgcaaaaggcactaacctatttgggaagtgttcaatcagcaaacggtggcttcgaggagcgtggcgacgtattcgagagatttggcgacgatggcatcagtctgactgcatttgtgacactggctctgatggaaaatgtggatctgtatcccgaatatcgaaacaacatcaacaaagccctggactttatcaccaggggcttagatggatcaaatggcctcaagtggtggaacaaaacggcgcccgctggtgagcaacaatcaccctggtataatgccactcgtagcgtcaacattgagatctccgcttacgccgccttggctctactggaaaataacttggtgggcgatgccctgcccgtcttgaactggttgatggaccagcgaaatcccaaaggtggttttgtggcatcgcaggatactgtagtcggccttcaggcgcttctcatgttcgccgaacgcttttccagtcagggcaataatctccaaatcggcttccattacggagaaggcgctgaaacgataattaatgtgaatgccgaaaactcactagccctgcaaacggtggagctgccaaacaatcttaaaaacttgagtgtttcggccactggtcggggaatggcattggcccaagtcagctacacctataacacaaacgtgaccagtgcctggccacgatttgtactcgatcccactgtgaatcggaactcccatgcggactacctccatctttcggcctgtgccagctttgtttccgtggtgggcgagaacgagcagcgctccaacatggccgtgatggaggttcacctgcccagcggtttcgtcgtggacagggatacacttcccaccctggagtcgagtgagcgcatcaagaaggtcgagacccagaacaggaacaccaaagtggtcatctactttgattacctggacagaagggaggtgtgtcccaccctgcacgcttacaagacggtcaaggttacaaaacatcgaccggtggcagtggtcatgtacgactactatgacagcgctcgccgtgccagacagttctacagggcacccaaatccaatatctgtgacatttgcgagcacgccaactgcggtgacctatgcgaaaaggccgagaagcgcgagtccaagcgacctgatgactacacggcgatagcgggtcatagttcagggtcaagacacacagccattccactggcatctgtggttatggttctgtcgatgcttttgaaaacccttagctgttagacgatactgttaccgccacttaacgtggaaccaatatggaaatcgaagctttaacaacacccactcacatagtccctaagttagcctaatgaatgccgtgaactaaacctgttctaagtacatctaacgatgctaaagtgttgccaataaagtgttataacgtttactaaaaccag

SEQ ID NO: 15555 - protein, 1413 aa, DROSOPHILA
MRLQGADMGAIPVLILVTACLLCQTSAQGLYSIIAPNTLRPNSQFHVAVSLHNAPESATFKVGILGSSYTDFKTVELRPFSTQLLHFEIPALRTDRYRLTAEGLGGVQFTNETQLHFESKQHTVLVQTDKSIYKPGDLVHYRVLILDANLKPARGYGRVHVDIKDSGDNIIRSYKDIRLTNSIYSNELRLSDSPRFGTWSIVVDVSDQEHTQTFEILDHILPKFVVDIDTPKHAIYKDGKIAATVRAHYAFGQPIVGEATLSIYPTFFGSLQPFVNDLITRKVVPIDGNAYFEFDIENELHLKQDYERQYLLDALVEEKSTGSVQNYSTVLTLHLNHYRVEAVKVPSYYIPGVPFEATARIARNDGGQLRDFNPQITAYLTNVYGSSEMYNRTAYSLDASGEIKMKFTVPIGDRDEFHSIIVDYQGVISEEISVVVRSFAPIKYFMYQVVGRGDIILSRNVDVSKYFLYQKFIMLYRFGNFSKVAPGTFHTIKFLASFAMMPRANLLVYTVIDGEFVYDEQVIQLEENLLNAVQVDAPIRAPPGQDIDIGISTKPYSYVGLMLVDQNANDLRSGHDLTHKRLMDALRSYELSDVNTPMGSPGKESGVITMSNTDYFIEKEAESNPALDREVSTGPEEDKLTTVRKTDIGPAHKIEVNTLPPGKGRYAFSYTPKPFWHNPRVHVMRDPADTWLFLNISASSDGRNSIHRRIPSEMTSWVVSAFALDPVNGLGLSPPNGKLEAYKEFYISTELPYSIKRDELIAIPFVVHNNRDSDLNVEVTFYNSALDFDFPQLDPKATNQPKVELYRRRSLQVPGRSARSVSFIVTPKRVGPLLVKAMAASSQAGDTVEQNLLVEHPGAMERINRGFLFELNSNAQNRRNVTIAVPRNAIPESTRIEVSAVGDLIGSLVGNLDSLILLPTGCGEQTMRLRQLTPEVELRATNNLAIGYQRILYYRHENGAFSAFGLDIKRSSTWLTAYVARSLRQAAPFTQVDSNVLQKALTYLGSVQSANGGFEERGDVFERFGDDGISLTAFVTLALMENVDLYPEYRNNINKALDFITRGLDGSNGLKWWNKTAPAGEQQSPWYNATRSVNIEISAYAALALLENNLVGDALPVLNWLMDQRNPKGGFVASQDTVVGLQALLMFAERFSSQGNNLQIGFHYGEGAETIINVNAENSLALQTVELPNNLKNLSVSATGRGMALAQVSYTYNTNVTSAWPRFVLDPTVNRNSHADYLHLSACASFVSVVGENEQRSNMAVMEVHLPSGFVVDRDTLPTLESSERIKKVETQNRNTKVVIYFDYLDRREVCPTLHAYKTVKVTKHRPVAVVMYDYYDSARRARQFYRAPKSNICDICEHANCGDLCEKAEKRESKRPDDYTAIAGHSSGSRHTAIPLASVVMVLSMLLKTLSC

SEQ ID NO: 15556 - DNA, 7403 bp, DROSOPHILA
cggcttgtggaaatgcatgctggtttggctttcggtaatatcatcctctaacatttaatacgttcatatgctcggttttgttgtataatacgatttttagaagtaattgtatgacgcttagctatgtacaacagtttcataaactatccgaatgcattcgtgttattgtatccccgtaaattaatttattttcatttttatttatttaaataactagctaacagttgtgaagtattctggtcgcaaacacttacaaactgatgcaaaacttgaaaactggaaacaaacaatgcagttcaacgaaatgtccataattcactacaaatgctaagattttcggcattctcttcaataatcgcctggcacgaaggcccttcgtttatagtattattatgcgtttatagtactatatgttatctgcttttgcccgacatttcacatctgcggcctgccgcagttcagtttatcatacattaaatgcttaatttaggatctataacattaatttatttatattcctccatgtctgcattcgcctcaactttttcaagtttatctccattacacttacgcagctcttcaagtttaactaagcataatcagtgtgtaaataagtcttatggtttatttctcgcgctgtatccgttcgattgcaaaaaccgatgttcgttgaaaatcaaatttacctctaaatctgtttaatattcgattcattcacttatctccaactgcctcactatcgtttctttttcgctcttttgtaaatagttgaaatgcattttattcactgactttaggtatggttttcaattcattttcatttagctggaagtggatttctttcaagtctgtcgaaatatcaatacaattttgaatttgtctccttgtttttgggtggatttacaaacaaattgtacagtttcgtcacgcgcaattttcgtttatacattcttgcagtttaagattacgtttaaaaattaactcccttcgtcctggtggcctagacatttatctggaaagcctcccggtgtagtttctgattggcacgcatccgtggcgacgtctgggtcttcgtcttgtcgttggcatccgaaaaacgagctggtggatttatgtggtcctgatagtttggtggatagttggatatgctaaacgtacagggttctgattacgtaagtagcggcaatcgacacatggcatttttcacgagatctcttacctaaaagtagtttcttcattgtggctcgaatagccactggaacttcggacgtgccgctttccgctcgttccgggctttccgcccttccgggcggcaaagggcggctttgacttccgggtcatgctagtgggtgtggtttccgaggaggacgaagtctcgtcctgagtatctgaaagtgcaaagtaccccattactagtagtaaactacatttccattatatttctaactagttaaggattctagagaatggtatccgggttactcccctggagacttaccacgttgtgctcgatacttggccgagtttagagctcgcgcagacacatcattgtcggactcggagccgagtgtgtcatattctgtaattgggatgtgaagcgttaggattttcctaacttcggaatctgttgaacctggattgtccgattctaaaaagtttagtacggattcgatggatttgtacgttgtttgttggtttttatcgagatgatgtacgaatgtgtgtggagaaaaacgttgagagcaatgagaaaaagatgggttaaaccaagggtacgggggatcgtttggattggcatctggatgggatgggatggggtgcgattatgacaagcgatgattcaatttggcttacggctagatggaatcagtggattggcggtaggactggggcttgtacgaatgacaggagggatgaacgttaagaccatctcatagctaccttggctctctgaatgaggatccctgaggcgacccacttttcgccgcactttggtgtactccggttccttggactaaataaataatatttattaacaaaaatatttcgtgtatgatagagctctttgcgattttactgtactcacgtggtagctttccggcttgacatcgtggtagacaaaggatccgcgcaccgagtggtagggcccactgtagacattgccgctgtaggagctctcgctataagtctgtttgttcagttgaaaggttgcatacgggcagatgtcctcgatgtactcgtttccctccgccttgccaaagctgccggaatcattggagttggatccccgcggagcagatgtgcccggattgcatcgcacggctaggtactgctggtcccgattctgtttgttctgcagattggccagggatggcgactccgacatcgaggaactggccagacgggcctggctggctagctctgaattttgggtttaaaaaaggacctttaattacatttttcatttccatttagcggcacttacttcgcttcctgaggaatagagcggcaccaatcaaagccagcaacatcagtagggaaaagcatatgggcagcagtagtttgaaattggcatagaagggcaggtcgctcaggtgggatacaggtgtggagtgatcgttgttgtaaatcactaaaatatataattttaattaatatttatttttttccccgagaagagcatgattctagaacctacctccttgtgtagacagtgtggtaaagttgtagatggcagtggtggagccggcattattgtgtgccgtgactttcagttggtactttgtgccgggcaccagatcgctcaccgtgtatatcctctcagtcggcggaatgtgattggacaccactgcccacgaggatcggccataaaccctggactcgatcatgaagtacaggatgccacagccaccatctccccaggaatccagccagcaggtgacgctcgttgagttgttggtaatcatctgggagtgcttcggttgcacgggcggatttcccttcgtataggagttgactatgtcgcagggtaagcccgttccaatcttattgtaagcggttatgtacaactgatagcgagtgccacaccacaggttggtcagcaggtgcgacgtggtcttcgagtccacctgcagctcttcccaatcgccgttgtcgcgcttgtaattgatcacataacccagaatgggactaccaccatgactattgtccatccattcgaggagcagactgtccgtgtaggcatttatcaccgtgagattgggcgcctctggtggcacctttaccacaatgttgtacacgatctcgtccttgccccaggtgttctccacactgcaagtgtagttgcccgcatcactcgcctggcactccttcatgtagagcgtgccattcttggctatcgtcttgcgggcactcgtctccatattgtgaccatcctggcgccaaatggtaaccggagcaggtgctcccaccttccggcatggcagctccagatgctccttccagggcgtgactattcgctggctgaaggacactatgcgggcgggcaccttattgttcggcggcacagttaccacctgcgtcttctcgccctcgcccatcttggtggaggcagtcagccagaactggtacgtggccgactcctgggtgcgcaccgtttcgtgcatttccacgaagggacctaggaggcgcttgtgggtgccctcctcgcgtccaccctccagcatggacatgtagaaggtgtagccggtctgaaaaaatacgggacgatggataacattcataaattaaagaaaaagtttaatgcagtttcaggggatcctgaattttccgaaaaataatattacttagattactttgcaaatattcgtttagagagggctgaccttgaccagactgccctgaccaacaatccaatgataatgtccccccataggatgtatcccaaaaatatactcacaatgtcaccattgggcaggtcgggcggcagccaggatattatgattttcgagctcgacgcgggtatcgccttgatggcctgcggggccgagggcactacattccacgattgcgattgcgattgcacaaataaatgaacgtatatatagtatatgaataaatgtatatgtcagcagatgggagtgtgcctggtgttgcatggaaattgccggcgcggcaacgacaacgaatcgaggtggctggcgaggattcgggaatgggaagggcagggcagggcagggcaggattgcgcgatgggtaagatggctgaatgggattgggggtatgccgcacctcgtttgcgttcattgaaccgaacgccacttaccatcctcgtgggtgcggcaataaaacggtttggttttcatgccatcgcctactttggtgtaagccaaaacccagaccgtgtagttggtgtatttgcgcagattctcgatggtgacgtattgatttgttgacttgacaacctccggatcggtttctgagcacgtgtatccgaggcagtgcagcaggagcagcatgaacagaagcagaaacaggaacagatgaagcagcatgaaggagaaggagagacgagaacaattagcactgattggaaatatgaggaccatgaagtgggctaattaattgccgagtgccataaatttcaaaaataagttggccaaggggcgttcgatttggtcgatagcattctggtcacattccagcgtggtaattgaccatcgttggcatcgtggcataaatgcagtggaatccaaatgaaactgccgtagtttattgctgatgagatgtttaattgcaaattattcataatggtaaggaaacaacgaatctcatcataatcacacattttgtgaaaattacaaaaatattagcttatttcgcaatggccttttaaataaggtactatatctgggggaaatttgaggcgaacttaccgtacagctcgtccaccgatatgtaaaacactttatagcccttgatttttccattttggccatcaatgtccggcggtgaccaggtgatatagatcgaagtggagcccaggacatcgcactgcggcgattcaggcggcgatgagggaactgtgggagagggaaaaatgtttgttaaacgattttcttacactaaccgaaatttttatgatgtttgagttgtgttgccttttaaatcattaaattaagcccagcacctcttgttcgtgaattgtataagtaatagattaggcttctctttcaaaagtttaaagtttaaaaacatgtttttttcttgatatttctgagtgcatgcctctcgagtcagagaggccagccgtggaccaggtcaaaattcgtgtacggccaattaacaaaagcaatcaatgtgagcccaacgcaaccccactgccccatcccacctccaacactcaccgtcctccattgtttgcacggcaatctccttgctcggtggtccgctaccctggctcgtgtaggcctgcacaatcacgtggtattgggtgaacttgttgagattggccagcaccgtctcgccaccgaaatgagagcgcacctcgacggttttgaagctgaatccctgcgtgggattcacctccttgtcctcgggcgtcagcgacatctggtagcccacgtagtagccgagcaggatgccgttccagtgatcccgttccggtgcatcccacgtgacgaagatctcggtggagctcttgggctcagcccgaacggcaagtggtggacccgagggtacctcctccagcgtggtcacttgcaccacctccgagaactcggaggcgcccagcttgttctccgccgacatgcggatgtgataggcttttgccggtcgcagctgctggatgttgatcacggtctgggctccggcgatggtgaggtgctccgcattttgccaaatgtctgagggtgaaaagaaatctaattatgtgtgtattttaatagtcagatgtcagcagagaataatttcaattaattgagttaattatgaaaacaaaggatttgatttttcatcaacatatatctaacatatttttgattttagttattttttgtttattataattttgttatatataaaattgttaatttgagaatccgttcaacgaggcggatactcaatatttttcgctgtcgtatacgcgataattatatattgagtatagattacatattttgcatttaaataagttcagattttttgataattttccaacagatttattcttcttgttcctacctgatatttgtttgtagtagatgtggtactcctcgatgggactatttccggcaaagggttggctccacgtgagctgaaggctgcgcgactgttgcgagttgatgcgaaggttcttcggctgctcgggcacttcctgcacgatgagctgaatggacatctcgtcctgccaaaatggaaaatcgaatggttttgtatcaatttcgcctagcaattcggttgacgacaacaatgatgatgatgatgatgatgattatagtggtaatgggcatggacttgggccgagttggcgcattaagagttcatttgcgcccagtgaaagtcatgacaggcagccagttgcagctgctgttcgagtctcattcaaattgccataaattaaggttaacagcagtggtgactggaaaggggaaaggagatcttctgaccaacttgcagacagacgaggctggggcgaaacttttttgacagtgtgtgagttgtgcgtgctgcagacaagcttgtagattttgtacacagtaaattagtttaagtgcttacttaaatcgctagtattgactttgtaaaagcaagctgaagtaagttattattttatggcttgcgaagaagaaaaacgtataaattattttaaaattgaatagcaacatatatattggttttttttcaaaacccaacaaggatgttaataattttatgaggctaatagacttttaggcatatataatgttcagatatttctgtgatttttatggctgggtctaatgtgttcttcggatataactggatcatgctgacacatttgaaacatatctttctgtgtatatcccggtgatttatcgctctcacacagctgacaactttgcgaatagagatcgaaatgaactagagctcggcccaattccattagtccaccgacagtttgatttaagtcaactcgatacataataatatcaggggctcggtgtcgtgtgccacacaaaagtgtcagccttgcaacttacctgtccgaatgcattgctcgcctgacagatataaatgcccgtatcctggcgatatgtgtgcgaaatgcccaattcggagaccatgccgtcgtcgagcacttgatctcttattgtgtagctgtgtgtgtgtgtcgtgtgatttatatgcaagtaaatgcattcaag

SEQ ID NO: 15557 - DNA, 3351 bp, DROSOPHILA
gacgagatgtccattcagctcatcgtgcaggaagtgcccgagcagccgaagaaccttcgcatcaactcgcaacagtcgcgcagccttcagctcacgtggagccaaccctttgccggaaatagtcccatcgaggagtaccacatctactacaaacaaatatcagacatttggcaaaatgcggagcacctcaccatcgccggagcccagaccgtgatcaacatccagcagctgcgaccggcaaaagcctatcacatccgcatgtcggcggagaacaagctgggcgcctccgagttctcggaggtggtgcaagtgaccacgctggaggaggtaccctcgggtccaccacttgccgttcgggctgagcccaagagctccaccgagatcttcgtcacgtgggatgcaccggaacgggatcactggaacggcatcctgctcggctactacgtgggctaccagatgtcgctgacgcccgaggacaaggaggtgaatcccacgcagggattcagcttcaaaaccgtcgaggtgcgctctcatttcggtggcgagacggtgctggccaatctcaacaagttcacccaataccacgtgattgtgcaggcctacacgagccagggtagcggaccaccgagcaaggagattgccgtgcaaacaatggaggacgttccctcatcgccgcctgaatcgccgcagtgcgatgtcctgggctccacttcgatctatatcacctggtcaccgccggacattgatggccaaaatggaaaaatcaagggctataaagtgttttacatatcggtggacgagctgtacgcccacttcatggtcctcatatttccaatcagtgctaattgttctcgtctctccttctccttcatgctgcttcatctgttcctgtttctgcttctgttcatgctgctcctgctgcactgcctcggatacacgtgctcagaaaccgatccggaggttgtcaagtcaacaaatcaatacgtcaccatcgagaatctgcgcaaatacaccaactacacggtctgggttttggcttacaccaaagtaggcgatggcatgaaaaccaaaccgttttattgccgcacccacgaggatgtgccctcggccccgcaggccatcaaggcgatacccgcgtcgagctcgaaaatcataatatcctggctgccgcccgacctgcccaatggtgacattaccggctacaccttctacatgtccatgctggagggtggacgcgaggagggcacccacaagcgcctcctaggtcccttcgtggaaatgcacgaaacggtgcgcacccaggagtcggccacgtaccagttctggctgactgcctccaccaagatgggcgagggcgagaagacgcaggtggtaactgtgccgccgaacaataaggtgcccgcccgcatagtgtccttcagccagcgaatagtcacgccctggaaggagcatctggagctgccatgccggaaggtgggagcacctgctccggttaccatttggcgccaggatggtcacaatatggagacgagtgcccgcaagacgatagccaagaatggcacgctctacatgaaggagtgccaggcgagtgatgcgggcaactacacttgcagtgtggagaacacctggggcaaggacgagatcgtgtacaacattgtggtaaaggtgccaccagaggcgcccaatctcacggtgataaatgcctacacggacagtctgctcctcgaatggatggacaatagtcatggtggtagtcccattctgggttatgtgatcaattacaagcgcgacaacggcgattgggaagagctgcaggtggactcgaagaccacgtcgcacctgctgaccaacctgtggtgtggcactcgctatcagttgtacataaccgcttacaataagattggaacgggcttaccctgcgacatagtcaactcctatacgaagggaaatccgcccgtgcaaccgaagcactcccagatgattaccaacaactcaacgagcgtcacctgctggctggattcctggggagatggtggctgtggcatcctgtacttcatgatcgagtccagggtttatggccgatcctcgtgggcagtggtgtccaatcacattccgccgactgagaggatatacacggtgagcgatctggtgcccggcacaaagtaccaactgaaagtcacggcacacaataatgccggctccaccactgccatctacaactttaccacactgtctacacaaggagagctagccagccaggcccgtctggccagttcctcgatgtcggagtcgccatccctggccaatctgcagaacaaacagaatcgggaccagcagtacctagccgtgcgatgcaatccgggcacatctgctccgcggggatccaactccaatgattccggcagctttggcaaggcggagggaaacgagtacatcgaggacatctgcccgtatgcaacctttcaactgaacaaacagacttatagcgagagctcctacagcggcaatgtctacagtgggccctaccactcggtgcgcggatcctttgtctaccacgatgtcaagccggaaagctaccacgaaccggagtacaccaaagtgcggcgaaaagtgggtcgcctcagggatcctcattcagagagccaaggtagctatgagatggtcttaacgttcatccctcctgtcattcgtacaagccccagtcctaccgccaatccactgattccatctagccatgccaatccaaacgatcccccgtacccttggtttaacccatctttttctcattgctctcaacgtttttctccacacacattcgtacatcatctcgataaaaaccaacaaacaacgtacaaatccatcgaatccgtactaaactttttagaatcggacaatccaggttcaacagattccgaagttaggaaaatcctaacgcttcacatcccaattacagaatatgacacactcggctccgagtccgacaatgatgtgtctgcgcgagctctaaactcggccaagtatcgagcacaacgtgatactcaggacgagacttcgtcctcctcggaaaccacacccactagcatgacccggaagtcaaagccgccctttgccgcccggaagggcggaaagcccggaacgagcggaaagcggcacgtccgaagttccagtggctattcgagccacaatgaagaaactacttttagcatatccaactatccaccaaactatcaggaccacataaatccaccagctcgtttttcggatgccaacgacaagacgaagacccagacgtcgccacggatgcgtgccaatcagaaactacaccgggaggctttccagataaatgtctag

SEQ ID NO: 15558 - protein, 1114 aa, DROSOPHILA
MSIQLIVQEVPEQPKNLRINSQQSRSLQLTWSQPFAGNSPIEEYHIYYKQISDIWQNAEHLTIAGAQTVINIQQLRPAKAYHIRMSAENKLGASEFSEVVQVTTLEEVPSGPPLAVRAEPKSSTEIFVTWDAPERDHWNGILLGYYVGYQMSLTPEDKEVNPTQGFSFKTVEVRSHFGGETVLANLNKFTQYHVIVQAYTSQGSGPPSKEIAVQTMEDVPSSPPESPQCDVLGSTSIYITWSPPDIDGQNGKIKGYKVFYISVDELYAHFMVLIFPISANCSRLSFSFMLLHLFLFLLLFMLLLLHCLGYTCSETDPEVVKSTNQYVTIENLRKYTNYTVWVLAYTKVGDGMKTKPFYCRTHEDVPSAPQAIKAIPASSSKIIISWLPPDLPNGDITGYTFYMSMLEGGREEGTHKRLLGPFVEMHETVRTQESATYQFWLTASTKMGEGEKTQVVTVPPNNKVPARIVSFSQRIVTPWKEHLELPCRKVGAPAPVTIWRQDGHNMETSARKTIAKNGTLYMKECQASDAGNYTCSVENTWGKDEIVYNIVVKVPPEAPNLTVINAYTDSLLLEWMDNSHGGSPILGYVINYKRDNGDWEELQVDSKTTSHLLTNLWCGTRYQLYITAYNKIGTGLPCDIVNSYTKGNPPVQPKHSQMITNNSTSVTCWLDSWGDGGCGILYFMIESRVYGRSSWAVVSNHIPPTERIYTVSDLVPGTKYQLKVTAHNNAGSTTAIYNFTTLSTQGELASQARLASSSMSESPSLANLQNKQNRDQQYLAVRCNPGTSAPRGSNSNDSGSFGKAEGNEYIEDICPYATFQLNKQTYSESSYSGNVYSGPYHSVRGSFVYHDVKPESYHEPEYTKVRRKVGRLRDPHSESQGSYEMVLTFIPPVIRTSPSPTANPLIPSSHANPNDPPYPWFNPSFSHCSQRFSPHTFVHHLDKNQQTTYKSIESVLNFLESDNPGSTDSEVRKILTLHIPITEYDTLGSESDNDVSARALNSAKYRAQRDTQDETSSSSETTPTSMTRKSKPPFAARKGGKPGTSGKRHVRSSSGYSSHNEETTFSISNYPPNYQDHINPPARFSDANDKTKTQTSPRMRANQKLHREAFQINV

SEQ ID NO: 15559 - DNA, 4304 bp, DROSOPHILA
aaattgaagttgaaattccttggcataacttaacccgtctatggtataatatctaggttctgcaagttccatttataaggcgttttatttatataacggagaaaggaaaagtttattcatatatttaggttccaaataaagtacttcatactttaacattgtttaataacttaatattgcgtatataggtaagtttggacatatttgaaagtttaaaataccctgcatcttttttggttacaatattttaaaatatttcaaatgtttttttttttattaaaacgcaagtaaatcgtgtttgctttgatctctgcttatgacatcctcttgtaagtcagatacgcggctctttggttggttcttgaattacatgttaattttgtaagcctggcttagaaaggtaagcagactgcagactcttgagatccagtttctcagttttcgtcagttgcagctgcagaattgaaaaagtttttattatctaaaagacataccgcacaataaaaaaaaatatagaacatggctcgtacatacgtttatgttttacttatacaatgcgaacttgaaacagctttcaggtgagtttatttaataaatcagctaaatttaaaaacgaattgtcgaaaggagcgtgtcagacgattatcttcatcgaaatgaagatgaacactgtaatggcaaattttaaaaaagaaattagccaaatttgtttttgttacttttgccatcaaaaggttctttatgcaaaatgttatgtttgactcaaaaacatgttactcaccacctttcacttcaaccaaagcaacaagtaattaaaagtacttcgtagatgctaaataagttgggcccaaaatcgaaataagtacttaatatgcatttacttacaattagacaaccatgttgactggaatgtaaacacttcgttttaactcaattttatggcgaaaacacaaaaacaaatacgaaaatttcagtaaatgttactattattgattttccccagtcgcgattcgaaattgagcgtaaaacccagcgaatcagctgtttggcggcaacgacagcacaacaaaacaattaaatatccgccgcagccgcaaaacaatacaaaaaaaaaaacaaaagcaacaacaaaataaacgaacaacaacaacaaaaaccaactgcgccgcgataaaattgtttgccaataagaatcgggcttagtgcggattggcatccgaaagatacaggaacgtggtggctgcagctgcaacgggaagaccatggttttcttcaagttcttgaagagcaaactgtaacgtatataaaggcaaccacaacacaaagtaaacacacgcgaaaatcctaacgaaatagagagatacaacaaaaagatacgaaaaaagatacaacccacgagaataacaatgcgcgaaattcaggcgtaagtatgcgaaggcgaaggtgtgggcgcgcgttgtttacgtctaggaagtatctggtgtcccccgagtattcggctacctggtactggtgcctacataggcggggaatctgcaagagaatccgagaaccagtgggattcgaactgggaccgaaaacgcgaaagcgaacgagaacgtggcgagcaaaacacaaaaacccaaaacgacgccgagccagcaaatagtatctgtgtgaatgaatgggccagctttattgggggtgtgttcgtgtgattatgctgccgtctggacatcagataatgcgaattatattttgtttttgtctcgtcatgttggcccagccgcgcgcgattttgccgcgctttgtatctatcagatacactagccgaaaagtatgtgcggaatgcgccgtgctttcgtatttcggattgttttttgttttccttctttttttgtcgaggtttcgcgggcttccgccactggaccgcgcttcaatcgcatccggacggtgtcgaggtgagcacacattcaaattctctagtcacgaatctcggttgtacggcgctcggcagttctagtggaaacatcggtacccttatcatccgctgtctgacattagctactagcacctccaaaaagattgcacttcacccccagccaaccggacaactaagtcccccactaaactttatggtggataaaccgaaagcaaaataaagaggcgaggttagataaagcttagaataaagtgtcactgcgttggaattacgagcaaaacccgcgggccatcgaaaaagtccttgaattacattgaaaactggcttaaatcgcaaacgtttactttttggagtagtaaagtcaagattaatagtaaactttaaaaaagtgctggtttaagtttaggccgtaacacttcttatattattacttattatatttatgcacttcatgtatttatgcaactttcaaaagtatctctttcccatccagctcccaatttatgacgaaaacaaatcgcttggtgattttgaggcatggcgaaagtgatttcaacattgagaacaaattctgcggttggcatgatgcgccattgagtgaattcggtgagattaggattaaaatagtttaaaatacccagttaacttcttatttatctaacaactaggcgtccaggaggccctgactgtggcgattcccgcgctcgtccaatccgagttggaattcgacgtggtctattcatccgtattgagcagatctcgtcaaacggccgaattgatactctccaagttgaactgcgcctatgtgcccattaaggaggattggcggctgtgcgaaaggcactacggaaatctgactggttgccggaaacgagtggtagccgatcgctatggggaggagcaggttcaggcctggcgacgtggatacgactgcgtaccgccgcccatcgatgagaagaaccgctacttctacaccatttgcagcaatcccatattcgatgatgttcctcgcggtgagttccccctcgcggaatcccttcacatgtgcgtcgatcgagtgaaacccgtgtggaaggaggtcaggcgggaagtgttccaaggcacccgggtactaatgtgcgtccacggaactgtggcccgtgctctcgtccagcacattgagggtaagttagataggcttagcaatagcttatggtttacatcgatggtcactccgtaggaatctccaacgaggccatcgaaaaggttaacattccaaattgcgtgccacgcgtctatgagttcgatttgaaaacgggaggcttggttggagctgccatcaatctgggggatcaggagtatattaggcggaagacagcccaggtggcagccattggtgactgattgtggagcactcctctcgacttttttggaatttacatcgatatgtggccgactgcatttacttaagcctttgccgcttaaagtccgagaacatcggctgataaggatattatgactactatttattggtctacaccatctgatattttcggccaaaaatatacaatttatacaaaatataattgatggagaagattacatatacgtacataaatataataaaaataagctatttcgttgtatgacgtcaaattggatgctacaccaaaaaaaaaaaaacattttttccaagtgtatagtttattaaattgtttttctcaagcttcgttacgatcgaaaagacgatctagtaaatgcattatgtaatactttcagttgttgccacagccatttgcctgaagtgcaattagtagtagctctgctcgttgtagagcggacccaagttgtttggcaggatgtatatgtcctcgggacgaccgttgaacacgaacggacgcttcagcgatgtcagcttggagtcctgctgaggaaccggcatggaggcgagtccaaagctctgctgagagcctccataaccacccatcgaaggcgacgacatgggtctgtagggattactaggcgtcggtggccgcattccatatccaccgccacccaagccaggtgtcagggatcccatcgcctcacccggagatccgttcacttggtagactccagtgggctttccgttggccaggaagttcacgggcaaattgaataccgaaccgtaggcggagaatgagggcatgggctggtaggtcagcagtggtgagaatccacccccaaatggagccgttggcatattgggcaaaaacatatacggtgtgggcggcagtcttacgtagtagatgggcgaattgcgggctgatgacgcgtgattggccccaggacgccgaccaccggaggctcgtgacatcaccacatcctcgagatcgttgctggcgccagaaaaggcgggatagaa

SEQ ID NO: 15560 - DNA, 1066 bp, DROSOPHILA
cagtcgcgattcgaaattgagcgtaaaacccagcgaatcagctgtttggcggcaacgacagcacaacaaaacaattaaatatccgccgcagccgcaaaacaatacaaaaaaaaaaacaaaagcaacaacaaaataaacgaacaacaacaacaaaaaccaactgcgccgcgataaaattgtttgccaataagaatcgggcttagtgcggattggcatccgaaagatacaggaacgtggtggctgcagctgcaacgggaagaccatggttttcttcaagttcttgaagagcaaactctcccaatttatgacgaaaacaaatcgcttggtgattttgaggcatggcgaaagtgatttcaacattgagaacaaattctgcggttggcatgatgcgccattgagtgaattcggcgtccaggaggccctgactgtggcgattcccgcgctcgtccaatccgagttggaattcgacgtggtctattcatccgtattgagcagatctcgtcaaacggccgaattgatactctccaagttgaactgcgcctatgtgcccattaaggaggattggcggctgtgcgaaaggcactacggaaatctgactggttgccggaaacgagtggtagccgatcgctatggggaggagcaggttcaggcctggcgacgtggatacgactgcgtaccgccgcccatcgatgagaagaaccgctacttctacaccatttgcagcaatcccatattcgatgatgttcctcgcggtgagttccccctcgcggaatcccttcacatgtgcgtcgatcgagtgaaacccgtgtggaaggaggtcaggcgggaagtgttccaaggcacccgggtactaatgtgcgtccacggaactgtggcccgtgctctcgtccagcacattgagggaatctccaacgaggccatcgaaaaggttaacattccaaattgcgtgccacgcgtctatgagttcgatttgaaaacgggaggcttggttggagctgccatcaatctgggggatcaggagtatattaggcggaagacagcccaggtggcagccattggtgactga

SEQ ID NO: 15561 - protein, 253 aa, DROSOPHILA
MTKTNRLVILRHGESDFNIENKFCGWHDAPLSEFGVQEALTVAIPALVQSELEFDVVYSSVLSRSRQTAELILSKLNCAYVPIKEDWRLCERHYGNLTGCRKRVVADRYGEEQVQAWRRGYDCVPPPIDEKNRYFYTICSNPIFDDVPRGEFPLAESLHMCVDRVKPVWKEVRREVFQGTRVLMCVHGTVARALVQHIEGISNEAIEKVNIPNCVPRVYEFDLKTGGLVGAAINLGDQEYIRRKTAQVAAIGD

SEQ ID NO: 15562 - DNA, 7072 bp, DROSOPHILA
tcccgttcgctgacatttgtcctcggcggccggcaaaccggcaaactgcacatgtggccaatcccttgggacccaatgatattaatgctcccgcttcagctggaaaatacctacatacatacatacatacagtgaataaaaaataatgaacgggagctgggattgatttaagccagctgcggcgacgccatcagaaacacatccaacattgaacatcccacatcgcagaaccaatccatagaagtccatcattcttgcggcggaggcgagaacaatttgcactcggccggagattatgtttcgggtgaaagataatgactccgcatatccacacatgtaaatatttatgggctcatgagcagaaacacaagaagtgtgtgtgtttttttttttattttttgcccaaatgacgaaagcatgttttccatgtcacactgaagttagaaaatataagcaaatattcgaaataaaaatccattaaatattaacgaaatatatccctaaccctaaaggctttaaatttgattataaaataaaaattctaaacgaaatcaatattttaccattaccaaaataagattatttgaatcccgcattgaaaaaaaaaaattttggccttatttgccttattaaatccacaatagaactaaggacaaaccactttcagttggaaacagttatttggaattttataccatttttaatattttgaatgcaaccaaacggaaattggtataaaaaatgtgaaagcgcgtttagagccatatttccattacagcgctctgaaaaaaaacaacaatactctatgtatggatgtaaatattctgttaataatcataaaaaagaattggttttttttttgtttcacttttaaaagtgctggcaaacaatcgatatattcagctatcgttggcgttgttatcgcccgaacgacggacggtcacactggaaagctggaaaaagaaaagaaaattgtcaaaaaggcttcgacttggactcaattttcgtaacaagtgatcaacgaagctggtggatgtcaaagacgtagataaataatctaaattacctaacgcagccatagtaagtaacgataagcacgcgggcataagccgcccccttttgtcgataagtgaacgcgaatgcgaaacattcgtgtgcgcaaaaaagtgaacaagaaaattggaaaatcagaaggcttcgctttgatacggaaataaagtgagagacagaccaaggtaagtactgatcctagaccattttcgttcattggcgttctcttcttttggcctgatgcccatacccatctgcaggaaacgatgagcttcctgccgggcgagccggtaccgcccggtttcgaggaggacgtgtcccgcacggcggtcattcaaaagcagatcgagagctacacagccggaccactgatcggcaccgaatacaccatcgagctgcacgagccggcccaactgcgtccgaattacttctgtgtgctctgccaaacgtgctcggatggacgcaacgtctttgtgcactggacatcgcaggcgcaccgcaccaagtacctgcaaacccatttccagaaggcctacaaggagctgcaaaagctaaagcgcacgcccaacagctctggggatctggtgactgccactgggaatttggtcaagtgcattgagaagcatttcggcaggtcacgcaatctaataactgcaactggtgatgattttcgccgttatcgctccaaaatgtgcagtcaggtgcgggatagctttcatttcgatgagtgtgccggatcagatttttccgaagaagctcagcgcgtgatccgcgaactcaaaccggatgagtccatcaagagcagcatgaagaagaacgtcgacggaaccggggatagcaacaagcagcatgatgatggaaatataattgccttggatgccatatccagtgatgatgagagctttggcggttcaacagcttcggttgtcccggtgccaaaggggcgacagaagaataatctgtcggaagatgccggcgggcgtagtaaaaatcaatcgccaccacctgcaggtggcgtgaacaaaacgcagcatttgcccacgcccaaggagctggccattcaggcatctaaaatttcccaggagcgctacaagtgggagaagttccgttgcatgctggaaatacagctcaagcagctgcgcagtgatacagagatgtacgaatcaaatcccgagaaacatcccgattatccggatgagtggaaacagttctggaatcgacgctacaagcagctgcaggaggagaagaaatgcgatccgaatcaatacgactataagccggagtggattagctactggaaagatcgtcgcatcgtactgttcgacattgcggtgaataaaataaagaaagatctcaaagagaagttcaagctgggcgacgaggacgaagagaagaccttggagctaatggagcgctacaagatccgtgtggccagtccgcgtagagcgcctgccaccaccaattccgacaattgtcgcaaaacgaagccgaattttcgcaacaatcgtccgattgttgcgacaagcaaactacccgacgccgtcatcgatatcagcgatgatgatgttgatagtcctccatctcgtagtcgtcactcccacaaacgccgctccatctctcgttcgttgtcccccaagcgcggcggacgtcgtgccgtgcgtcgctcacgcagtcgttcgccgcgtcgcagctataatcgaggatctacgcgctcgcgttcgcgcagcatgcgacaccggtctcgctcgccggcccactatcgtggccgcggtcgtggtcgtgaaccagcatccaaagagcgcggctcgtcgtccagggatttcggtggtcgtcacagtttgcagcgtgagcgcgaacgctcttccgagtactatcaccgcaacgagggctatgctcgatcatcgcgcggctatgagtctgtggagacgttccgcgtgctggattcccgcgtatatcccgagtacaaagtgaccaagacgagctcgatttcgcccaccgcttcgtccaacaaggagaaggagaaggaggcatcggagcccattgaggagggaccactgactgtcgttagtgtcttgcgcatgctgtccgccgtcgaggagcatctgggcagcctgggacccaaggcgctcaatttgcttagcaaggcactggccatggagttggtaaagccaaatgcagctgaagatttgctgcgaaacgaagacaactgtgtgttcctcgagaccacaaaggagaagcttaagggcattctcattgccgaggtactggacgatccgcaaaaggtgcgcgtgatcaagaaactaatcacgaacatagccgaaatcatctatcaggcgaccttcaaaggtaagtccaccaccaaacccgctcaatccgtatccgtctctctcgctctttttcgcggtcgcggttagaaatcaggaggtaagtaaaccaaacaaatcaaatcaaaaaaagggttacccatcggaacaatcgttcgtttttcgcgcgttttcaacggctttttatgcaaagttgcagagtttattgtgagttttgtgccattcggtggaatacctttagattcttcattcgaaatatttctattctcctttttcgaaaggaaccttttttatgtgctggtgataaagaaatatatacatatgtacattagatactccccactttagtctactaaactctgcggttaaacatttagttacgttttaagtttagcaccttatgaaataaagaatctttgactttggctgttgtatgaattgggatcacaatctcatttcacatttcttctttctcactaaaacataaacgaaatcttctgagcgagtatttttgaaataatacaaaatagcgctgtgttttattaccattttaaacaatattataagtatacatatatatatataaagcgtgttctgaattgctggtcttgtctctgcaattcgtaggatttttcgaatttaagaaacctatttttaagacctttactttgggttcaaaaagggttaaattgatattaaaaagacctgcttgcaatgagaaacataaatggtcataaggtcttccttctatgttgtatttatgataatatagtaattatatcgtatatttggatagactctttggtcgaatcgctggtgatatcgttcctaatcgtttttcggtaagctttcccttatttttgctgggtgtgtgaatcaagtgtaaagaaaccaaccgtgagctgtccaatcgccatccacaccatccataagtataaatgtaatttgcgtagcttcgtgcgataacgatcctccatctgccgggatctgaaacagaaacacactctcacctgttaatcctaactgattgatttctttgtgttgttccctccccaaaccacccgtaaccggatgatctctaggtaccaacgatgccgtcgatgtcaaggttaaggcaaatgccaatccggcgcccatacagctgcccttcgatcgcaatttggtggcgcccaaattggccaatgctttggtactcaacggctacaataatgtgtccaccggcgatatgaacaacttgctacacatgctaacgctgctgatgaagacggacaaacagcggcgccagctggacaacaacaacggcctgaaattcgaggagataaaggtaaagctcggactgcaaaataatccgtcgcccgatgacatgggcatcgatctggacgagctgatgaaggaggtggagcatcagctgcacaaggagtccgtcgatattgtgaataaacctacgggagcaccggccaaggtacaagccgccgatacagtcggtggcagcactggcttggaatcgctaacagattcagatctccagaccctactccagaactttaagtttttgtcgaacgaggagcaggttcatctcattggccatctgcgcaagttggaggtacaggatccgtcgcgcgtcgatcgtctgcgcaagtatgtgaatctggtggagctccgaggcgatggcgagtcctgcagtgatttcctggcgcgcgtggtgaaaattggtggggctagcaaggcgaaaccggctaccaagttcaaggcttcggttatgggtggtagaacctcctccgccatggccgccagctccgccagtgccacggctccgaaagtgggtcactccatgctgagcgctcagcgccccaatttggatcgtgatatgtccagtatgcccatcaataagcagagacgcggccggaacacgcccagtatcatgctcgatgacgatgacgaggaagatgatgattacaactttgatgatttggtgatgaaggcctgcgattcgaatggaagtgctagtgctggtggtggtggtggtgtcgttggtgctggtgtacacaataagccaggagtgccgcccattataggcgttgaatcatcgccaaatgcgctcactttcaagccagcagcagcgaccaagatttcgctaaaagacaccgagaacatcatagccaatctaatgggcactttaagcaagaatggcacttctggaggttcacccgtgggtggcaatcgcaactatatgatgaaccagcagcatggagcgccaaatgcgcagaatgcaccgaatttgggtcagaatccaggccaaaatcttggccaaaagcagcccggagcgggctattccaatgcgggctatccagggcaacagcagcagcagcagcagcagcagcagcatggccgcaactttggccaggaggcacagccactgatgagcggcttgagcggcggaccgaatgccaatcactatccaaatcagcagggctacggcggctatcatccgtttgcgggcaatggcgtgcagcagaactacggcggcatggtgccaccaggtccaggtggctacgtgggtccgccccctaatccgtgggccagcaatgtgccgccacagccgcccttcaaccagatgccccagaactttatgggtgcccagcagcagcagcagcagcagcagccgcactttaacaacatgttcggtggacgtcactagagtgtcgtagacttagatatccatactattaacgttatgcaatttaaacgtaatgtagaaacgagaataacgccctttgaagtgcccgtgtatctgctagctggcaagtgatttttattatttttttttttaccatacatgtgtgctgctgccaaaaaaaagaaaagaaaataatcactaccttcatttgtttataaaacaccgaacaacaatagaattcagaaaacataaatctgaagagcacgtgaataaacatacacaataattccggaaatcaactttaatcgactttcgtttggaattattagctgggggagctttgagttctgaattctgtgtattgaaataaaaataaacgaaatggaacgtacaagtgacaaataataaaataaaataaaatatgtatagctacatatgatgttcttcaatggtgatttgattattattatttgatttatacattaaacaactgatttttaagtttattcctctcaaaaacaacaaatttaaacttcgaaaccaaaactaatcgtacataaatgaataagcgaatgcaaagcatttataccagaagctaagcttcacagctccagggaagtataagtatatacctttgctcatccgcagcagcagcagttccatgtatatcgagtgaccactgtgccaacagatgaagaacaataaatatatcaaaatcgaacgtttcaaccgactttttatggaggagaatttaaactaatcacggaattaactacagtagggcaggcgtaggaagtccacggactgtgacttcagtatgccgggtatctcctgctgcaacagttcgtgcagcgactgaccactgtgcttgtagatccatctgcccgccgccacagtgccgacgaaatcgtatcgcttgggaccgctggtgggcgaactgagccagatctgcttgttgggcgtctgccggttgatcacataggtgccgtgttgtcctcccaggttcacggttagcacgcca

SEQ ID NO: 15563 - DNA, 3937 bp, DROSOPHILA
attttcgtaacaagtgatcaacgaagctggtggatgtcaaagacgtagataaataatctaaattacctaacgcagccatagtaagtaacgataagcacgcgggcataagccgcccccttttgtcgataagtgaacgcgaatgcgaaacattcgtgtgcgcaaaaaagtgaacaagaaaattggaaaatcagaaggcttcgctttgatacggaaataaagtgagagacagaccaaggaaacgatgagcttcctgccgggcgagccggtaccgcccggtttcgaggaggacgtgtcccgcacggcggtcattcaaaagcagatcgagagctacacagccggaccactgatcggcaccgaatacaccatcgagctgcacgagccggcccaactgcgtccgaattacttctgtgtgctctgccaaacgtgctcggatggacgcaacgtctttgtgcactggacatcgcaggcgcaccgcaccaagtacctgcaaacccatttccagaaggcctacaaggagctgcaaaagctaaagcgcacgcccaacagctctggggatctggtgactgccactgggaatttggtcaagtgcattgagaagcatttcggcaggtcacgcaatctaataactgcaactggtgatgattttcgccgttatcgctccaaaatgtgcagtcaggtgcgggatagctttcatttcgatgagtgtgccggatcagatttttccgaagaagctcagcgcgtgatccgcgaactcaaaccggatgagtccatcaagagcagcatgaagaagaacgtcgacggaaccggggatagcaacaagcagcatgatgatggaaatataattgccttggatgccatatccagtgatgatgagagctttggcggttcaacagcttcggttgtcccggtgccaaaggggcgacagaagaataatctgtcggaagatgccggcgggcgtagtaaaaatcaatcgccaccacctgcaggtggcgtgaacaaaacgcagcatttgcccacgcccaaggagctggccattcaggcatctaaaatttcccaggagcgctacaagtgggagaagttccgttgcatgctggaaatacagctcaagcagctgcgcagtgatacagagatgtacgaatcaaatcccgagaaacatcccgattatccggatgagtggaaacagttctggaatcgacgctacaagcagctgcaggaggagaagaaatgcgatccgaatcaatacgactataagccggagtggattagctactggaaagatcgtcgcatcgtactgttcgacattgcggtgaataaaataaagaaagatctcaaagagaagttcaagctgggcgacgaggacgaagagaagaccttggagctaatggagcgctacaagatccgtgtggccagtccgcgtagagcgcctgccaccaccaattccgacaattgtcgcaaaacgaagccgaattttcgcaacaatcgtccgattgttgcgacaagcaaactacccgacgccgtcatcgatatcagcgatgatgatgttgatagtcctccatctcgtagtcgtcactcccacaaacgccgctccatctctcgttcgttgtcccccaagcgcggcggacgtcgtgccgtgcgtcgctcacgcagtcgttcgccgcgtcgcagctataatcgaggatctacgcgctcgcgttcgcgcagcatgcgacaccggtctcgctcgccggcccactatcgtggccgcggtcgtggtcgtgaaccagcatccaaagagcgcggctcgtcgtccagggatttcggtggtcgtcacagtttgcagcgtgagcgcgaacgctcttccgagtactatcaccgcaacgagggctatgctcgatcatcgcgcggctatgagtctgtggagacgttccgcgtgctggattcccgcgtatatcccgagtacaaagtgaccaagacgagctcgatttcgcccaccgcttcgtccaacaaggagaaggagaaggaggcatcggagcccattgaggagggaccactgactgtcgttagtgtcttgcgcatgctgtccgccgtcgaggagcatctgggcagcctgggacccaaggcgctcaatttgcttagcaaggcactggccatggagttggtaaagccaaatgcagctgaagatttgctgcgaaacgaagacaactgtgtgttcctcgagaccacaaaggagaagcttaagggcattctcattgccgaggtactggacgatccgcaaaaggtgcgcgtgatcaagaaactaatcacgaacatagccgaaatcatctatcaggcgaccttcaaaggtaccaacgatgccgtcgatgtcaaggttaaggcaaatgccaatccggcgcccatacagctgcccttcgatcgcaatttggtggcgcccaaattggccaatgctttggtactcaacggctacaataatgtgtccaccggcgatatgaacaacttgctacacatgctaacgctgctgatgaagacggacaaacagcggcgccagctggacaacaacaacggcctgaaattcgaggagataaaggtaaagctcggactgcaaaataatccgtcgcccgatgacatgggcatcgatctggacgagctgatgaaggaggtggagcatcagctgcacaaggagtccgtcgatattgtgaataaacctacgggagcaccggccaaggtacaagccgccgatacagtcggtggcagcactggcttggaatcgctaacagattcagatctccagaccctactccagaactttaagtttttgtcgaacgaggagcaggttcatctcattggccatctgcgcaagttggaggtacaggatccgtcgcgcgtcgatcgtctgcgcaagtatgtgaatctggtggagctccgaggcgatggcgagtcctgcagtgatttcctggcgcgcgtggtgaaaattggtggggctagcaaggcgaaaccggctaccaagttcaaggcttcggttatgggtggtagaacctcctccgccatggccgccagctccgccagtgccacggctccgaaagtgggtcactccatgctgagcgctcagcgccccaatttggatcgtgatatgtccagtatgcccatcaataagcagagacgcggccggaacacgcccagtatcatgctcgatgacgatgacgaggaagatgatgattacaactttgatgatttggtgatgaaggcctgcgattcgaatggaagtgctagtgctggtggtggtggtggtgtcgttggtgctggtgtacacaataagccaggagtgccgcccattataggcgttgaatcatcgccaaatgcgctcactttcaagccagcagcagcgaccaagatttcgctaaaagacaccgagaacatcatagccaatctaatgggcactttaagcaagaatggcacttctggaggttcacccgtgggtggcaatcgcaactatatgatgaaccagcagcatggagcgccaaatgcgcagaatgcaccgaatttgggtcagaatccaggccaaaatcttggccaaaagcagcccggagcgggctattccaatgcgggctatccagggcaacagcagcagcagcagcagcagcagcagcatggccgcaactttggccaggaggcacagccactgatgagcggcttgagcggcggaccgaatgccaatcactatccaaatcagcagggctacggcggctatcatccgtttgcgggcaatggcgtgcagcagaactacggcggcatggtgccaccaggtccaggtggctacgtgggtccgccccctaatccgtgggccagcaatgtgccgccacagccgcccttcaaccagatgccccagaactttatgggtgcccagcagcagcagcagcagcagcagccgcactttaacaacatgttcggtggacgtcactag

SEQ ID NO: 15564 - protein, 1231 aa, DROSOPHILA
MSFLPGEPVPPGFEEDVSRTAVIQKQIESYTAGPLIGTEYTIELHEPAQLRPNYFCVLCQTCSDGRNVFVHWTSQAHRTKYLQTHFQKAYKELQKLKRTPNSSGDLVTATGNLVKCIEKHFGRSRNLITATGDDFRRYRSKMCSQVRDSFHFDECAGSDFSEEAQRVIRELKPDESIKSSMKKNVDGTGDSNKQHDDGNIIALDAISSDDESFGGSTASVVPVPKGRQKNNLSEDAGGRSKNQSPPPAGGVNKTQHLPTPKELAIQASKISQERYKWEKFRCMLEIQLKQLRSDTEMYESNPEKHPDYPDEWKQFWNRRYKQLQEEKKCDPNQYDYKPEWISYWKDRRIVLFDIAVNKIKKDLKEKFKLGDEDEEKTLELMERYKIRVASPRRAPATTNSDNCRKTKPNFRNNRPIVATSKLPDAVIDISDDDVDSPPSRSRHSHKRRSISRSLSPKRGGRRAVRRSRSRSPRRSYNRGSTRSRSRSMRHRSRSPAHYRGRGRGREPASKERGSSSRDFGGRHSLQRERERSSEYYHRNEGYARSSRGYESVETFRVLDSRVYPEYKVTKTSSISPTASSNKEKEKEASEPIEEGPLTVVSVLRMLSAVEEHLGSLGPKALNLLSKALAMELVKPNAAEDLLRNEDNCVFLETTKEKLKGILIAEVLDDPQKVRVIKKLITNIAEIIYQATFKGTNDAVDVKVKANANPAPIQLPFDRNLVAPKLANALVLNGYNNVSTGDMNNLLHMLTLLMKTDKQRRQLDNNNGLKFEEIKVKLGLQNNPSPDDMGIDLDELMKEVEHQLHKESVDIVNKPTGAPAKVQAADTVGGSTGLESLTDSDLQTLLQNFKFLSNEEQVHLIGHLRKLEVQDPSRVDRLRKYVNLVELRGDGESCSDFLARVVKIGGASKAKPATKFKASVMGGRTSSAMAASSASATAPKVGHSMLSAQRPNLDRDMSSMPINKQRRGRNTPSIMLDDDDEEDDDYNFDDLVMKACDSNGSASAGGGGGVVGAGVHNKPGVPPIIGVESSPNALTFKPAAATKISLKDTENIIANLMGTLSKNGTSGGSPVGGNRNYMMNQQHGAPNAQNAPNLGQNPGQNLGQKQPGAGYSNAGYPGQQQQQQQQQQHGRNFGQEAQPLMSGLSGGPNANHYPNQQGYGGYHPFAGNGVQQNYGGMVPPGPGGYVGPPPNPWASNVPPQPPFNQMPQNFMGAQQQQQQQQPHFNNMFGGRH

SEQ ID NO: 15565 - DNA, 6399 bp, DROSOPHILA
gaaaccagccaaacggacgcactgaatccaaaccctcaagctaatgaatcgctcgcactgcgcccatcatgacaatcccttgtccttcagcatgaatttagaggcatacattaattttaaatttaaaaataaatgttatcgatttttataagatcaatgcaaatatactttatttgttagatatacgaatcaaactattcaaaataggtgcgagaaatggtatcggactgtttatcgataggctagaggctactgctactgccatctccaaagcgcggctgtgttttcttccaatgtttattaaatttgaagcagctaatgcaatttaaaggcttaagtgacaaaatattcataacataagaatgtggaacacttcaaatgtgtatgatgaaacgacctctgaaaatggcgacaacgaagagcagaaagcttcatacattaaagaagatcatatagaggtataattactaagttgcccttaaatttacaaatatttaaacgaaattatgcatttgcagaccgagaggaaaagtttgctactcatcaaacggaacaacgtagccctacagaaaagacagctaccctactcaaggccaacgccgcagaaccgccaggaacttgtcgagagcatcgaacaagaccgtaaagtgctgtcggcgtacttcaaaaggttgagctcccagcgagatgaagtcacttcaccaaatgcagctccaccggcggctgattcccctgttcctcagagaaacagctacgatcttttctttgagagcgcctgcatcagtgtcaaaggcttgccacccaaactggcggcggaagccaagagccgcatctcccagataatcaccgagttcgaaatccgcgccatatcagaaatggaggcccagcaggagcacaaaatgcgggcccagaacagaatggataatgcgtccggggttgtttacgagtttcgtccctgctcgtaaagtaggttgggtgtttgcctttcaactaccttaactcatcctatacacttcacatttggacgccacctaactctggactatcaaaattcataataaaaatttaaagcattctacatccagttaacacttaggcggtcatttggtcgcgtttcggccctaaattattgttgttcgttaatttaaagttggatcaatggccggaaagttgaaaatatgcatcattggggctgagggctggtaagttctttcaattaccaagtctaaaacacatttaactgctttcaaatggcttttctaggggctcggccattgccgccgtcgtgagcaacaatgtcttggagggagacttcgacagccgggtgcatttatatgtctacgatgaaatgattcgggacactgccctatcggagatcataaacactcgtcacgagaatgtcaagtatctgcctgggatcaagctgcccaataacctggtaaggaaattcttgcagtgttttggtatctgcattatacaaaatatttttgtattagatcgctgtaaatgatcttttggaagctgcccagaacgcagatatcttggtattttccaccccgctggagttcgtgcaatcctactgcaacattctgtctggtaatgttaaggagtcggcctttgctgtttccatgaccaaaggattgttgagcgagaatggggaggggattgagcttgtttcgcacgccattagcgagagtctgggtatcccgtgctactctatgatgtctgcacatagtgccatggagatggcacagggaaagctgtgtgaggtgaccatcggttgcagcgataattctcattccaagctgctgatctctgctatgcaaaccaataactgcagagttatttctgttaatgacgttgacggagtagagctgtgtggaacgctcacagacgtcgttgccttgggagcgggtttcatagatggtctgcgtctgggtgagaatgcacggttggcagccatccacttgggtgtcaaggaaattatgcggttcattaagacgttctttccttcctccaaaatgtccacattctatgagagctgtggcgtaaccaacgcggtggcttccagctttggtatgtacaaagaaaaatgaatcaattaataagtgtataatatcaactgcgctaatttaaagtcgataaaaacgtcacatttgcaaagagcctagtaacatcaggccaaaccattgaagaaatagaagcaaacctccatagtggccgcaagcttttgggtcccatggtggccagtaatgtgaatgcatttttggagaatgggcttatgcaacacgagtacgtataaactagattttaagaccctaataaacatacttctaaaactatagatttccgcttttcacggccatccatcttatatgccaaagtgaggctccgccggaactgatgatagaggcactgagaaaccacccggatctaaggtaagagattttaatgttcaaattacccttaactcatcattactccttttacagcagttcatccatttcacatttactgaaccatgaaagggacgagctaaaaacggaccaaggccttcccgaactgaggactgctttagataagatattgacggaggcggggaacgaaaacattaagcagctcaaggttatggacgattggacagaagtaaacgattacgacgtcgaggagacgtaccatgaaaaagtggcatcacgagattcctgtcttgagaccgaaattatgccaagccgtctgagcgtgcaagctgcacagctctataatgacatccgggatgggaatgttggggtggcctttaaaatggacatcgatgaaggcaatcgccaagtgcggctcttgctagagaaggaagacgaaatggctagcgatgcagccttgacagttatttcatcaagattgactgcgggccaagaggatgacaatgccaggataggccacggacacataacgaacacttccgcggaatccgatcatatgtccagcaaaagcattcccagtggcttgactacgaaggattcgcctgatgtcctggatttgagttgcgaatctgagccactacattcgtcaaaacaaaatagccagctgatggaagatgcggagacaaatttcacggagcgtttaaaagtgaatcaacttaaagagcagattgataaacaagaagcggccaattttaaagcccaagaaaatcttataaaatctataagacaaacaattcaggctctcggtgataaagaaaaaatggaaaaccttatcgcaaaaagcaaaatggaggaggaccccttccaactgaaaagccaagttgagtcttcgcaactgaagagccaagttgaaggggagtcttcggaactgaaaaaccaaatacaagaggaagcttatgaacctataagtcaagcagatgaggaaccatcccaaattagaagccaactagatgaggaatctgctcagctaaaaagtctaatggacgaagaaaatagacaacttgaaagcgaaatgcaagacgagagtagcctattgaaaagttcagcagataaatccgaatttgttgcatacaacgcggaagaagagcaacccattgaagaaccaacagataaccatcagtataaattaagatcagatactaataagcttaaagaacttatgttcaccgattccagggagcacttggagtccgagaagcacattgaagtgaaacttcaagacgaacatgactttgatctggatgaggagccagctataggaaaaaaagaccctacttacactaaagagaacttggagctccaggagaggctcgagtggcaaaagctaaagcaaacagataaaccccaccatccttattcttcagcggatcttgaagattcaactaccaatgaaggtaacgccaggcttccgatagagcatgacaatagattccagaatgtggataggtatcaggatagagaacttgttcaagtaagagctgagttgaaagagactagcggagccgagagcgaaaaggagatcaacttgattagcgagcaaaggccggatcaaaaccaagatgaggtcaacttgcgcccccatagccatatcaagacggaagaaactggccatcacgagtgggattggctaatgaacaatgaaaagatcgattccgacgagcaaaagttttatgccaacgagaggatggaaacacttagcgaatctgaccaggataagttgcagaatcttaattatcaactaaaagaagccttgcagcatgatttggatgtgatgtccgcaagcaggggtaatgattcaaatgaggtgctgtccgaggaggactctaatccagaagctgctaagaaaattacggagcaaccacttaaccccactccaaaccaaatccccgcagtccccttgccagtaacaatgcctagtaaacaatcacatatccgcgagggcagtccacagttccagaatcaacctagatctgttccaccaccctcgccacaaacaaaaccacagtcgccaaaggaacagcagcctcgccgcacaaatgcgcccgtcgaatttggaaacaaggacgaagccatggatctaaatgagtcagcttctgatcaagaggtacctaagcgtaaaaagatttcgaaaactgaggccgtgattgaaccagtcgctaaggatgtctccatggccgagccaaatgagtcgttacattctaaaaaggaaacttcaccagctagtttgagtaagcaggaaagcaaaaggaagcaaaaaaggagcttaaggagaccatctagtgattctgatagcactaagacaacgaacgaattcgagaagcaacgtcagattatagaaaaccagaaggcacagctggaaaaaatgggtaagaagatcagcgttatgcggcagggtcaggatcgtcgggttagctacaagggtcataacccctacagcgctgacccggatctggagtctaggccaccgatggacaccagcttcgaaaaggacagaacgggggattaccagggactgggccatcagcgtcgcaaagtagtcgtggcgccgccctttcatccgcctatcaatccacgagtacgcgtgccgcgaccacctttcgatggacgggatcatgagttccatacgatgactaccgcgccagtggacagacaccttgctccggcagctaagtggtcgtctttgcccacgactctgaagctgaatcgcaactccctggttgccaacatacaggtcaagcactttgccgctctgccctgtcaggcgttgccgaaacccatattaaagttgccgatgggagtgccacgcacgcccacgttttcaaagatcctctgcgccttgcagttgggattgctggcctcctacctcgcttgcaggaaggactaagtcctagattagtagctcggcttttcgattcccccaatagcagcatgatcagcatcagcatcagaagcatgatatagaatactttacttttttaaaaaataaatggtgttagattcaatctaaataaagggtgttcgaattcatttacatagagggtgttagatttaatctaatggctatagccatatcagttcttggagatgctcctgctgcagcggcactatatgttgacggtgaaatatcagtcgattctcctgcgattgtagtggccggaaattctttagcaacggccgaccgcgctcatctcggaggttccagaatttgggcagatcctggtgcgaaatgggaaggacctcaccgaacacgtgccactgaaccaccggtgagcatggtggcgtcgttagggagcccttgtacgtgtaaaagtttcccctgtcaagagatcccagcaaggatcccagggtgagccgttcctgcacagtgtagctggcattaaagttgcccaaatggaggagggaactaaagatttcactgagtccgggctgataaaagaatggccccgactaaaaagtgaattggtaaatcggtaagtagagcggtaaagttaagcaaatcccgcatctctacttactcgaacaaccttaaagagcaccgccagtactgtaacgccatcgctgtacttaacagcctcctccaagtttaaatactttgtgttccgatggactatgtgcatttccagatcaaagcggcgtccattgagcaggtgctccgagcccttgctctcgggggatccccaatggaaatgcacggcctcggcatcgtagcagtcccgcaagagacctcctgttacgtagggcttcacgccatagatcgtcgtcggaaccttaaattccactatcaacggaaatggattagttttccctttcacttggaagtccgtcttataaaaacctgtgtgtccactattcctaattgtcaccagctcatcgaagaactcatcataaagtgcgaaaatcagaggcggcaagttaaggggta

SEQ ID NO: 15566 - DNA, 3553 bp, DROSOPHILA
tcatcctatacacttcacatttggacgccacctaactctggactatcaaaattcataataaaaatttaaagcattctacatccagttaacacttaggcggtcatttggtcgcgtttcggccctaaattattgttgttcgttaatttaaagttggatcaatggccggaaagttgaaaatatgcatcattggggctgagggctggggctcggccattgccgccgtcgtgagcaacaatgtcttggagggagacttcgacagccgggtgcatttatatgtctacgatgaaatgattcgggacactgccctatcggagatcataaacactcgtcacgagaatgtcaagtatctgcctgggatcaagctgcccaataacctgatcgctgtaaatgatcttttggaagctgcccagaacgcagatatcttggtattttccaccccgctggagttcgtgcaatcctactgcaacattctgtctggtaatgttaaggagtcggcctttgctgtttccatgaccaaaggattgttgagcgagaatggggaggggattgagcttgtttcgcacgccattagcgagagtctgggtatcccgtgctactctatgatgtctgcacatagtgccatggagatggcacagggaaagctgtgtgaggtgaccatcggttgcagcgataattctcattccaagctgctgatctctgctatgcaaaccaataactgcagagttatttctgttaatgacgttgacggagtagagctgtgtggaacgctcacagacgtcgttgccttgggagcgggtttcatagatggtctgcgtctgggtgagaatgcacggttggcagccatccacttgggtgtcaaggaaattatgcggttcattaagacgttctttccttcctccaaaatgtccacattctatgagagctgtggcgtaaccaacgcggtggcttccagctttgaaatagaagcaaacctccatagtggccgcaagcttttgggtcccatggtggccagtaatgtgaatgcatttttggagaatgggcttatgcaacacgaatttccgcttttcacggccatccatcttatatgccaaagtgaggctccgccggaactgatgatagaggcactgagaaaccacccggatctaagcagttcatccatttcacatttactgaaccatgaaagggacgagctaaaaacggaccaaggccttcccgaactgaggactgctttagataagatattgacggaggcggggaacgaaaacattaagcagctcaaggttatggacgattggacagaagtaaacgattacgacgtcgaggagacgtaccatgaaaaagtggcatcacgagattcctgtcttgagaccgaaattatgccaagccgtctgagcgtgcaagctgcacagctctataatgacatccgggatgggaatgttggggtggcctttaaaatggacatcgatgaaggcaatcgccaagtgcggctcttgctagagaaggaagacgaaatggctagcgatgcagccttgacagttatttcatcaagattgactgcgggccaagaggatgacaatgccaggataggccacggacacataacgaacacttccgcggaatccgatcatatgtccagcaaaagcattcccagtggcttgactacgaaggattcgcctgatgtcctggatttgagttgcgaatctgagccactacattcgtcaaaacaaaatagccagctgatggaagatgcggagacaaatttcacggagcgtttaaaacttaaagaacttatgttcaccgattccagggagcacttggagtccgagaagcacattgaagtgaaacttcaagacgaacatgactttgatctggatgaggagccagctataggaaaaaaagaccctacttacactaaagagaacttggagctccaggagaggctcgagtggcaaaagctaaagcaaacagataaaccccaccatccttattcttcagcggatcttgaagattcaactaccaatgaaggtaacgccaggcttccgatagagcatgacaatagattccagaatgtggataggtatcaggatagagaacttgttcaagtaagagctgagttgaaagagactagcggagccgagagcgaaaaggagatcaacttgattagcgagcaaaggccggatcaaaaccaagatgaggtcaacttgcgcccccatagccatatcaagacggaagaaactggccatcacgagtgggattggctaatgaacaatgaaaagatcgattccgacgagcaaaagttttatgccaacgagaggatggaaacacttagcgaatctgaccaggataagttgcagaatcttaattatcaactaaaagaagccttgcagcatgatttggatgtgatgtccgcaagcaggggtaatgattcaaatgaggtgctgtccgaggaggactctaatccagaagctgctaagaaaattacggagcaaccacttaaccccactccaaaccaaatccccgcagtccccttgccagtaacaatgcctagtaaacaatcacatatccgcgagggcagtccacagttccagaatcaacctagatctgttccaccaccctcgccacaaacaaaaccacagtcgccaaaggaacagcagcctcgccgcacaaatgcgcccgtcgaatttggaaacaaggacgaagccatggatctaaatgagtcagcttctgatcaagaggtacctaagcgtaaaaagatttcgaaaactgaggccgtgattgaaccagtcgctaaggatgtctccatggccgagccaaatgagtcgttacattctaaaaaggaaacttcaccagctagtttgagtaagcaggaaagcaaaaggaagcaaaaaaggagcttaaggagaccatctagtgattctgatagcactaagacaacgaacgaattcgagaagcaacgtcagattatagaaaaccagaaggcacagctggaaaaaatgggtaagaagatcagcgttatgcggcagggtcaggatcgtcgggttagctacaagggtcataacccctacagcgctgacccggatctggagtctaggccaccgatggacaccagcttcgaaaaggacagaacgggggattaccagggactgggccatcagcgtcgcaaagtagtcgtggcgccgccctttcatccgcctatcaatccacgagtacgcgtgccgcgaccacctttcgatggacgggatcatgagttccatacgatgactaccgcgccagtggacagacaccttgctccggcagctaagtggtcgtctttgcccacgactctgaagctgaatcgcaactccctggttgccaacatacaggtcaagcactttgccgctctgccctgtcaggcgttgccgaaacccatattaaagttgccgatgggagtgccacgcacgcccacgttttcaaagatcctctgcgccttgcagttgggattgctggcctcctacctcgcttgcaggaaggactaagtcctagattagtagctcggcttttcgattcccccaat

SEQ ID NO: 15567 - protein, 1118 aa, DROSOPHILA
MAGKLKICIIGAEGWGSAIAAVVSNNVLEGDFDSRVHLYVYDEMIRDTALSEIINTRHENVKYLPGIKLPNNLIAVNDLLEAAQNADILVFSTPLEFVQSYCNILSGNVKESAFAVSMTKGLLSENGEGIELVSHAISESLGIPCYSMMSAHSAMEMAQGKLCEVTIGCSDNSHSKLLISAMQTNNCRVISVNDVDGVELCGTLTDVVALGAGFIDGLRLGENARLAAIHLGVKEIMRFIKTFFPSSKMSTFYESCGVTNAVASSFEIEANLHSGRKLLGPMVASNVNAFLENGLMQHEFPLFTAIHLICQSEAPPELMIEALRNHPDLSSSSISHLLNHERDELKTDQGLPELRTALDKILTEAGNENIKQLKVMDDWTEVNDYDVEETYHEKVASRDSCLETEIMPSRLSVQAAQLYNDIRDGNVGVAFKMDIDEGNRQVRLLLEKEDEMASDAALTVISSRLTAGQEDDNARIGHGHITNTSAESDHMSSKSIPSGLTTKDSPDVLDLSCESEPLHSSKQNSQLMEDAETNFTERLKLKELMFTDSREHLESEKHIEVKLQDEHDFDLDEEPAIGKKDPTYTKENLELQERLEWQKLKQTDKPHHPYSSADLEDSTTNEGNARLPIEHDNRFQNVDRYQDRELVQVRAELKETSGAESEKEINLISEQRPDQNQDEVNLRPHSHIKTEETGHHEWDWLMNNEKIDSDEQKFYANERMETLSESDQDKLQNLNYQLKEALQHDLDVMSASRGNDSNEVLSEEDSNPEAAKKITEQPLNPTPNQIPAVPLPVTMPSKQSHIREGSPQFQNQPRSVPPPSPQTKPQSPKEQQPRRTNAPVEFGNKDEAMDLNESASDQEVPKRKKISKTEAVIEPVAKDVSMAEPNESLHSKKETSPASLSKQESKRKQKRSLRRPSSDSDSTKTTNEFEKQRQIIENQKAQLEKMGKKISVMRQGQDRRVSYKGHNPYSADPDLESRPPMDTSFEKDRTGDYQGLGHQRRKVVVAPPFHPPINPRVRVPRPPFDGRDHEFHTMTTAPVDRHLAPAAKWSSLPTTLKLNRNSLVANIQVKHFAALPCQALPKPILKLPMGVPRTPTFSKILCALQLGLLASYLACRKD

SEQ ID NO: 15568 - DNA, 3331 bp, DROSOPHILA
gccttcccctgcggaaacaacaacaaagctcagcgttcacttacacccacacacacgggtctaccacgcatacacacgcaggccagccgataacctgtgtgtgaggcaatcgccgtcatcgttcgaaatcaaatctctaatcggtggaagcagcaacaacaataacagcagctgcagcataatcaacaattgattatatacgtatatagctaaaaataaggttcaaatatgggactgttattatcgcggctctggcggatgtttggcaacgaggagcacaagctggtgatggtgggtctggacaacgcgggcaaaaccaccatcctgtaccagttcctgatgaacgaagtggtccacacaagtcccacgatcggttccaacgtggaggaggtcgtctggcggaatatacactttcttgtctgggatcttggtggtcagcagagtctgcgcgccgcttggagcacctactacacgaacacagagctggtgatcatggtcatcgactccacggaccgggaacggttagctgttacgcgggaagagctctaccggatgctgcaacatgaggatctgagcaaggccagtttgctggtctatgccaataagcaggatctcaagggctctatgtcggcggcggaaatctcacgacaactggacctcacctccatcaagaagcaccaatggcacatccaggcctgctgtgcgctcaccggcgaaggactctatcaaggattagagtggatcgtgcagcgcatcaagaacaaatgacccgccacacatgctacatattagctaattaatcattaacgactagctgtctagagaaagtaaaccaattttgatataaacaatttttaagcgtttccaaattgtttgaaaagttgttgccaagccaattttatttagtgtaaaatacgtccgaacaggagtccctcgatgatttaaatctacgtgtatatggataatgtctaggagctaagccaatttaactacgatacttccaataaaattacaaaataaacgagtttatttcgacactgtcgcatatcaaattgaatacaaattacaaatagagaagtggacgtatttgcctctctgagcattgccttgtaattgacattgttggctcgattcgctgatgtgtgagattgtttgtactctatcgtcaaaaataaatacatggttgtgtaaaagttagtgtctaggattaggttaaagcattagaatactaatatatagccacaagaacaatttgatcacaaaagtaaaagcaaactaaagagcggatttaggtctaggtgagattgcatgagctgctgcaactctttaaaggctttccctggcccaaggtgatggtgttttctggcacctcctccacattgttggcatcgtgttggcgctgtaattggaacatcattagcttaggtaacaatagccggaatcgtactttaagttcgttggccaggcagcggaaggcgtcctccacgttcatgttctccttggcggaggtctccatcacgaacaggatctcaggtatatattgacacatctggcgcgcctcttcaaagtccacctcgcgctgctcctccaaatcgcacttgttgcccacgaggattatcaaaacattagaagcagtgtatctacgcacttcttcgatccatttttgcagattggaaaaggaagaccgcttggtgatgtcgtaaactgtcaggaggaaacacatggtattcaagtagggtaaacaaacaccccgctgataaggcgcttcgctattcaaatcagtgccaggcaatcactttaaagcgttctctggttatcagtagtacctatttggcatgacaaatggatgggcgtatgcctatgcccgacgaaacaaaagatacccatactgggactcaccaattaagaccccgttggccgagcgataatagctctgcgtaatagtgcgaaacctctcctgaccagcagtgtcccagatttgtagctggaagaggggcagaatatgagtcatattagtggcgggatctgggcaaatccgttatgcaccttgatttgtttgccctccacggcgatggtcttcatcgaaaagtccactccgatggtgttcccatgtcgctctatgtagttccctgtcttaaatctgtccactatgcaggtcttccccgtcccgcagtcaccaatgaggacgatcttgaacaggaagtcgaagtgttcctcgtttggcagtgccatcagtgtctgaggattgcgggcggtcatcttttggccgccgttctggccgttaactggtctcttttgcctgctgccctgcttttccaatgacaacaaagtgaagcaaaactaattttattgatacgcaatatcagctgttggcagtcgatagttgacctatcgatataggggtaaaataatactatacttttacttacaggtttttatttgactaatttatatgtactaattttagtttatattattctgtttagcttgctatatatactgcgaagctcatatatcgatattccattttacatgtgacatcgaccgttaggttttctcatcaccaaataaaatcgaaagcgtattttcaaatgttttactgatttaaaatattacgatttatttaatttgcactatatttggatggctacgttgtatttcgttcaagttacacatactctacttttttagaattgttaaattaaagttcattattgttatctataataaaatagtggccaaggaatgtaaataaacaattttattttattatattggattttctctttttaaatttggacaaaacgaatttacacaattttccaaatcgcaaatgccaactctcactgatggattagcaagggaaatctattgggctgattttatcattacgcaataaagcactaaatatgttgacaatttatttaattgactcacaaatggaaagccctcttgcgtgtaagtccatgtgaattgaggtacttgccccgattaatgcggcgatcacgtaggtcaggctttctgataacgcatgggactccaataaattttcaccacgtacattgatgatggcgccatttgacgctaaagagctggctttatgggtctgtaaatatttacgatgtgtttcgaagaaattcctcgggttttccccatgaaaataatgtacgcaaaatgcagaccttgacccacatatcaacttctatctctaggcagcgaaacgagactcactttcaaaccgcagcggaagcggctgggaaacatgttctatgtatctcaccgaatgcaaataagctgaccaactgcttcgattgccaaacgaattggaaac

SEQ ID NO: 15569 - DNA, 1026 bp, DROSOPHILA
actttgttgtcattggaaaagcagggcagcaggcaaaagagaccagttaacggccagaacggcggccaaaagatgaccgcccgcaatcctcagacactgatggcactgccaaacgaggaacacttcgacttcctgttcaagatcgtcctcattggtgactgcgggacggggaagacctgcatagtggacagatttaagacagggaactacatagagcgacatgggaacaccatcggagtggacttttcgatgaagaccatcgccgtggagggcaaacaaatcaagctacaaatctgggacactgctggtcaggagaggtttcgcactattacgcagagctattatcgctcggccaacggggtcttaattgtttacgacatcaccaagcggtcttccttttccaatctgcaaaaatggatcgaagaagtgcgtagatacactgcttctaatgttttgataatcctcgtgggcaacaagtgcgatttggaggagcagcgcgaggtggactttgaagaggcgcgccagatgtgtcaatatatacctgagatcctgttcgtgatggagacctccgccaaggagaacatgaacgtggaggacgccttccgctgcctggccaacgaacttaaacgccaacacgatgccaacaatgtggaggaggtgccagaaaacaccatcaccttgggccagggaaagcctttaaagagttgcagcagctcatgcaatctcacctagacctaaatccgctctttagtttgcttttacttttgtgatcaaattgttcttgtggctatatattagtattctaatgctttaacctaatcctagacactaacttttacacaaccatgtatttatttttgacgatagagtacaaacaatctcacacatcagcgaatcgagccaacaatgtcaattacaaggcaatgctcagagaggcaaatacgtccacttctctatttgtaatttgtattcaatttgatatgcgacagtgtcgaaataaactcgtttattttgtaattttattgg

SEQ ID NO: 15570 - protein, 219 aa, DROSOPHILA
MTARNPQTLMALPNEEHFDFLFKIVLIGDCGTGKTCIVDRFKTGNYIERHGNTIGVDFSMKTIAVEGKQIKLQIWDTAGQERFRTITQSYYRSANGVLIVYDITKRSSFSNLQKWIEEVRRYTASNVLIILVGNKCDLEEQREVDFEEARQMCQYIPEILFVMETSAKENMNVEDAFRCLANELKRQHDANNVEEVPENTITLGQGKPLKSCSSSCNLT

SEQ ID NO: 15571 - DNA, 3551 bp, DROSOPHILA
cgcatctctgccaccaattattttaaaagcgatagtatttgcagttagcccgcacctcggttccaagtactctccattgcccagagaacagaggactccaattgccagagctgtgatcgctgcaatagcgccccacatctgtacgatctgtcagcaaactgcccgagctgacagtcgatcgtttttataagtacatttaattgttaagagccttatctctaaaattcaaaattatttgtagaggcaacacatagtcggtatacactgaaatcgtaataactttatgagtaaacccctttttctttttaaattcaaggtctagaacacatttagctatctctcagcgttttacaagaattagatttgatttaaatgtacatgtgcaattatttgaatataagtggttatacccgttacttggaaatttagagggtatggtagattcgatggaatttacattcgtaatgaatgaaacaggttgaaagaagcgtttctttattcttgttcactcaggatatgagagcgagaaactcaactatagcgttctcttttctcaaatatttaaaagtgaccaaatagaatcttgggaaaaaacacatgataagaaaaacacatgctatttttagtttctacacattaaaaattataaatcccgtgtccagtgactcgactatcagatacccgttaaaataaatattcactttttcaaaaatgattcacttctgcgttgattgattgtataacctggtttttttttatcacattaatgagtgagtggtgagtagtttctcaatagaagaggtcgcaatacaggtattttttgggggcgcgttaccctttgcggaagagggtggctgtcagttggccaaaaaacggggtcaaacacccgaccaggagccatggcaacgtggccaggacacgggcttcagtgcgggtgtggttttgactttgtttacaagcagcccaggtaaaaagtgtccggattcgtatagcaaagctgccacaatgagcacgcgaaatgtgatgataacggacctggatcagccagatccgaaccagcagcagcatcatcaaaatcccaaaaagaaccgaaaggttctccaaactctgtcgggcaattttaatcgtcggtcacgaagcgtggaggtggaagtaaagcgacaggataacttgggtgttgtccacaaagatcgcaaaaaggatcgttcgtttaactcgctggtaagctcatcggattggtccacatatccccaaataaccatcctgaaacagttgcaagccaaggaccagcagttggagcagcttgtgcagcgattagccaccctgcatcgatacaacgaccaattcgccaaggagaatgaccaactacgcaaggacagcggccagctggagcggcgtcttacggaggcggagcagcaggttgccaattgcagccgctgtcaacagctcggccaacgactggacaccgttcttgcacagaatagaacattagccggcgacgtggacatgctgaagacgctcgtcttcaggctgaacgtgcaaattgagagttaccaggatcaacggcgtctcggtgagggtgcacccacttgtggaggatcaacgaaagtcagctcgtcatctgctccgtatccgccactgcccactcacacgttgggaccactcctgcaggcatacgatgaatctctaagggataaggacgctcttttggctcaatataacacagagttcgagcacttcactggggaactaaagcgagccctggaggagaacacaaagctggtaagcggcgaataatcaaccgtccaaatttaaattcacaccacctaaatgtaatgcccaacagctgcagtcccaggagcaactgcgtcgtgacctcggcggctggcgagaggagcgagtgtgtctgcaggcccaactaggagtatgccgctccaaagcggaggcgcaaactcgcaagacggacttggccaaggagaagctggtggaagtgatgcactgctacgaacagcgcatgcagacgctgatcctggacatggatcacctgcaggcggcctacgcgcgaactaaatccgaactagccgcgcttaaaagtgcctcatcggcggcgcccgctgcggttgctcctccagttcccgccgaatccgaggcactgcatcagtgcaaagccctgcttgagcaattgcggcaggagcatgcgagagagcgaacttgcctccaggaacagctgcaagccaccaccgcacgggcagcttcactggtccgcagcacggaaaaagccaagcacagcagagatcggcttaaggctcgtctgagaatggcgctgcagtgggcccaaaagctggaggcagggcaggctgaggtgcgcgatacctacgaggcggtacgccgcctggaagtacttgtccagcacaaggagtcacaattgcgcggattgcatgcccggaatgcagaagaaatggacaagttgcgtcataagttacagcagaaggaggaaacgatatgtgcgctgcttagaggcaaaatggagcgcagaccggcggtggattaacgcgtagaacatagtttttaacaattaaaaatatataatttcaatacaaaatacattaataacttagcgtagaaagcttttaaagcacagcagtccggaatcagccggactccacctgttcggagagcgtcctgtccgcaggcgctcccgatccggagccggagcccgcgcacaccacacaggccttgggcacagtctgctctatgtacatggtaatcctttcccgtacctcgggaaccacggagcacattacctgctcatatcgctgggatcccagctgtgcctgcaacgactgcagctgccacttgagatactcggtaagggggatcttgtaaacgggatctttgagcaccaactgcctgtggcggtcgtcgtgataggtcttggccgggtagcccttggtgtgaaattcctcgctgacaccgccgccactgcccagctgctgctgcagatcgtccagctcgtgttcgtcatgaatgaccaatgaatcatagaagcgaggcgtggcctgtgacgcaccctcctcggtggcggcgtactgcttgtccatcacttcgcccaacgtttcgtccaccagctgcaggatatgtggcaggcgagcaagcagcagctcattgcttccaaagatcgaggcgaaggccaggcagaagagctttctcttctctgcgtgcgtgtcgggaaccattgggaacatctcgatccaaacgtccaggatgcgggccaaagcgtccgcttgtggcaattgctgtaccaccgacatgaaaacagactggtcaatgagcagggtgcgggccacgatggtcagataccatcccattgtcatgggatactcctgcttaaggcacacctgctggaagacaaagggcagtgctgggcgcaccagccgcagtcccaacgccgcgtccgttttcaggcatgtctcgatgatccgcagcatggcaattattccctccacacgtatgtcctcgaaagagcgcacgcagtaggccacgaaaccctc

SEQ ID NO: 15572 - DNA, 1436 bp, DROSOPHILA
ccacaatgagcacgcgaaatgtgatgataacggacctggatcagccagatccgaaccagcagcagcatcatcaaaatcccaaaaagaaccgaaaggttctccaaactctgtcgggcaattttaatcgtcggtcacgaagcgtggaggtggaagtaaagcgacaggataacttgggtgttgtccacaaagatcgcaaaaaggatcgttcgtttaactcgctgttgcaagccaaggaccagcagttggagcagcttgtgcagcgattagccaccctgcatcgatacaacgaccaattcgccaaggagaatgaccaactacgcaaggacagcggccagctggagcggcgtcttacggaggcggagcagcaggttgccaattgcagccgctgtcaacagctcggccaacgactggacaccgttcttgcacagaatagaacattagccggcgacgtggacatgctgaagacgctcgtcttcaggctgaacgtgcaaattgagagttaccaggatcaacggcgtctcggtgagggtgcacccacttgtggaggatcaacgaaagtcagctcgtcatctgctccgtatccgccactgcccactcacacgttgggaccactcctgcaggcatacgatgaatctctaagggataaggacgctcttttggctcaatataacacagagttcgagcacttcactggggaactaaagcgagccctggaggagaacacaaagctgctgcagtcccaggagcaactgcgtcgtgacctcggcggctggcgagaggagcgagtgtgtctgcaggcccaactaggagtatgccgctccaaagcggaggcgcaaactcgcaagacggacttggccaaggagaagctggtggaagtgatgcactgctacgaacagcgcatgcagacgctgatcctggacatggatcacctgcaggcggcctacgcgcgaactaaatccgaactagccgcgcttaaaagtgcctcatcggcggcgcccgctgcggttgctcctccagttcccgccgaatccgaggcactgcatcagtgcaaagccctgcttgagcaattgcggcaggagcatgcgagagagcgaacttgcctccaggaacagctgcaagccaccaccgcacgggcagcttcactggtccgcagcacggaaaaagccaagcacagcagagatcggcttaaggctcgtctgagaatggcgctgcagtgggcccaaaagctggaggcagggcaggctgaggtgcgcgatacctacgaggcggtacgccgcctggaagtacttgtccagcacaaggagtcacaattgcgcggattgcatgcccggaatgcagaagaaatggacaagttgcgtcataagttacagcagaaggaggaaacgatatgtgcgctgcttagaggcaaaatggagcgcagaccggcggtggattaa

SEQ ID NO: 15573 - protein, 476 aa, DROSOPHILA
MSTRNVMITDLDQPDPNQQQHHQNPKKNRKVLQTLSGNFNRRSRSVEVEVKRQDNLGVVHKDRKKDRSFNSLLQAKDQQLEQLVQRLATLHRYNDQFAKENDQLRKDSGQLERRLTEAEQQVANCSRCQQLGQRLDTVLAQNRTLAGDVDMLKTLVFRLNVQIESYQDQRRLGEGAPTCGGSTKVSSSSAPYPPLPTHTLGPLLQAYDESLRDKDALLAQYNTEFEHFTGELKRALEENTKLLQSQEQLRRDLGGWREERVCLQAQLGVCRSKAEAQTRKTDLAKEKLVEVMHCYEQRMQTLILDMDHLQAAYARTKSELAALKSASSAAPAAVAPPVPAESEALHQCKALLEQLRQEHARERTCLQEQLQATTARAASLVRSTEKAKHSRDRLKARLRMALQWAQKLEAGQAEVRDTYEAVRRLEVLVQHKESQLRGLHARNAEEMDKLRHKLQQKEETICALLRGKMERRPAVD

SEQ ID NO: 15574 - DNA, 2602 bp, DROSOPHILA
tgcgatagttttgtatcgcgaaggaatcgtggatgtagaccctctccacgttgtatatctcgtggggatgattgtgttcacccgtcgccagtagatggtacacacccaaggtaactgtgctgcaaatcacatataattattcaattatattatattatttattaatttaaggtgcttacagctgagtgtactttacaatgcattcctcatcggtgcacatacaatgagcggccgtcaagacgaatttgttagtaattaccgatcctccgcagataaattcgtcattggtttttatgagggccatccacggattcttcagttcccccgcatccactccacctacaatcttcggtattaattgcatcggaactccacaatcctcgtccaaaaggcgggccgatcctcgtcccgccgtcagcatccaagcgaataaaacaacccaagctctgcacatttccagtgaaaaccttcaaacacactgaaagtgagctgctgtgcgtcgtgaatttgaagaaaagcttatcagctatgagaatgctgtttctattaatatttttactcttatcagaaagagcgggattttaccaaaatgtttttagcgctaaataacttgacctttttgaacaactgaaaaattaagaattttagatccaaattttcagaaaaatggatatttttcttaaaaccagaatataatttatggcaagctacttcttaattcctggaatttaaaacacatttaaaactaatacgctcgattagcaataaaaaaaacattaaagctcttaacagtattttcatttatttaaaaatcacaaataacactgtgccttacggtcacaccatcagaagataccgttacgctacggtactaaaatacctactaagaataccaatgcggtgctgttaggcgccttccagtgctgtagaccgcaactgtgtcatgtgatagagaccagctgacccgtacattttccagagttaggttttaatttcgctgtccacatcgctcgtaagaaaaaattagaaaaaaccaatcgaaatggctctgcactcggcaatcaagggaaaactgatcagcgttatcggcgacgaggacacctgtgtgggctttctgctcggcggagtgggcgagatcaacaagaatcgccatcccaactttatggtggtcgacaaaaatacggccgtcagcgaactggaggactgtttcaagcgtttccttaagcgggacgatatcgacatcattctaatcaaccagaactgcgccgagcttattcgtcatgtgatcgatgcccatacgtcgcccgtgcccgctgttttggagattccctccaaggaccatccgtacgacgccagcaaggactccattctgcgtcgcgcccgcggcatgttcaatccggaggatctggtgcgctaattcctcgaattctgctcgaggacactgtttcgtattgctgcaaccgccagagaattgctttacaccctgtaaacaactatccatagattcagtgcttcgcctttgttcttatcgtgtatttaaagacatttattaaatggttttcgttgtataaatagattaaaatcaaattgttccaaatcaaatactggaagtctgatatctggaggttttccattgaaaggtctttccagctatgtcaagtaacagtcttccagcaaagatacagtgcgcattcgataggtcaaaaatatattaagccactaaattggtgttcatccttacaactctcatttgcagatttgtaagaaatctaatttttggcaatggcattggttatttatttatcaatttgttgccagaataattttttttaccagtagataagaaacttgattaacagtatgccccgcataaatgtggtatctagaattttcattaaaataaattagctattaaattttgaaattagattagctgtgttaaatgttccatacattttcaatgagtttggtgttgctgattttaaggctaaaggaatatcttgtataaatttaccagataacaagttcagcgtgctgttaagtctgttatcagctattccaagggctgttagcgcaatcagctgttgtagagcggagtattttctagctggcaacgtaaacataaaatatatctttctgagaacctggccacaagttgatcgatcgtcattagtcatcttaccgctgcacgcacaccatgctaaaggccgttatcctgatcggcggtccccagaagggcacccgctttcgccccctttcgcttgacacgcccaagccgctctttccattggccggtcgtcctctaatcgcccatcatattgaggcctgcgcccagctgcccgatatacgcgagatcctgatcatcggctattatccgcagacccaaatggagggattcgtgggcgacatgcaggccctgtacagcagcagcaacatcaacatcaggtgggaagaggggctttggaagaacttgaatcttaagttccaagttgacctaccctttatcataggtaccttcaggagttcactgccttgggcactgcaggcggaatgtaccatttccgggatcagattagagctggtaacccccgagccttcttcg

SEQ ID NO: 15575 - DNA, 602 bp, DROSOPHILA
tccacatcgctcgtaagaaaaaattagaaaaaaccaatcgaaatggctctgcactcggcaatcaagggaaaactgatcagcgttatcggcgacgaggacacctgtgtgggctttctgctcggcggagtgggcgagatcaacaagaatcgccatcccaactttatggtggtcgacaaaaatacggccgtcagcgaactggaggactgtttcaagcgtttccttaagcgggacgatatcgacatcattctaatcaaccagaactgcgccgagcttattcgtcatgtgatcgatgcccatacgtcgcccgtgcccgctgttttggagattccctccaaggaccatccgtacgacgccagcaaggactccattctgcgtcgcgcccgcggcatgttcaatccggaggatctggtgcgctaattcctcgaattctgctcgaggacactgtttcgtattgctgcaaccgccagagaattgctttacaccctgtaaacaactatccatagattcagtgcttcgcctttgttcttatcgtgtatttaaagacatttattaaatggttttcgttgtataaatagattaaaatcaaattgttccaaatcaaa

SEQ ID NO: 15576 - protein, 124 aa, DROSOPHILA
MALHSAIKGKLISVIGDEDTCVGFLLGGVGEINKNRHPNFMVVDKNTAVSELEDCFKRFLKRDDIDIILINQNCAELIRHVIDAHTSPVPAVLEIPSKDHPYDASKDSILRRARGMFNPEDLVR

SEQ ID NO: 15577 - DNA, 3548 bp, DROSOPHILA
cattgaaagctggtacgaagtatacgtcaagagagttgtccacagtgctagccatggtttcgatctgccccgagttttgaataaggttcatgttgtcgcgcagccagttgaatgctgcaccggcaatggacacgcttccctcaagggcgtaaaatgggactgccttccgtcctagttggtagccaacagtcgttagtaatccgtgcgttgagtgtacaattgaaggtcctgtgttataaagcagaaaacatccagtgccataagtggctttggcctgacctttggccaggcattgttgacccactagagcggcttgctggtcgcccagaaccgatgttatgcctatgccttgcagaacgccctgcgcaatgctgccatagaactctgagctcgagcagatctccggcaaaatggtcttgggcagcccaaagaactttagcaagttggcatcccactgaagggtctcgatgttcatgagcatagtgcgcgaagcgttggtcacatccgtcttgtggacaccacagtccttcccgcccgtaagattatacattagccaggtgtcgatggtgccaaacatggccgtgcccttctccatagcctggctgacaaccggcacgttgtctcgaagccagcgtagtttcacgcccgaaaagtacggagacagaggaagtccgcacaatgggcgcaggtagttgatgttcctggcattgttcggaatagtctccaaaagctcctccaccgtgctggtggtacgattgtctagccagatgatagcgttcaccagcggttggccggagtttctatcccatacgactgtggactcgcgttggtttgttattccaatcgtgattatttcctgaaacgaggcgaaagcttaggattctatttcaaatattcgaattaagttaaaacggtcaactcttgtatattctttccttggttgtgtgtgtacacacttgtttgccattctctgggaaacgccgtaagctaggggaatggtaaagagagcagcgcagtaaacaactaggtaaaaataattgataacatcttacgacgtaacgattcgaaaattttccacagccggcgacccgtttcaatgtcaactctagttaataccacgagacgcagcattgtgatcgccattcatcagcagctacgcaggatgtccgtccaaaagaggaaggatcaaagtgcgaccattgctgtgggtcagatgcgctctaccagcgacaaggcggctaatcttagccaagtgatagagctagtggatagggccaagtcacagaacgcctgcatgctctttctgcctgagtgctgtgactttgtgggcgagagccggacccaaactattgagctctccgagggcttggacggcgagttaatggcgcagtaccgggaattggcgaagtgcaacaaaatttggatttccctgggtggcgtgcacgagcggaacgatcaaaaaatcttcaacgctcatgttttgctcaacgagaaaggggaactagcagcagtatacagaaagctgcacatgtttgatgttacgactaaagaggttcgcctacgcgaatcagatacagttacgccgggatactgccttgagcgcccagtgagcactccagttggccagatagggcttcagatttgctacgacctgcgttttgctgagccggcggtgctgctcaggaagctgggtgccaatttgttaacatacccatccgcattcacatacgcaaccggtaaggcgcactgggaaatcctcctgcgggccagagccatagagactcaatgctttgtggtcgctgcggctcagataggttggcacaaccagaagcgacagagttggggccacagcatgatcgttagcccctggggaaacgtactggctgactgcagcgagcaggagcttgatataggcacggccgaggtggacctttccgtgcttcaatctctgtatcagaccatgccctgcttcgaacatcgtcgaaacgacatctacgccttaacagcctacaaccttcgtagcaaagaaccaacccaggatcgaccatttgccactaatatcgtggacaagcgcacaattttttatgagtctgagcactgctttgcattcaccaacctgcgctgtgttgtaaagggtcacgtccttgtgtccactaagcgagtgactccgcgcctttgtggcctcgactgtgccgaaatggcggatatgttcaccactgtgtgtctggtgcaaagattgcttgagaagatttaccagacaacttccgccaccgtcactgtgcaagatggtgcacaggcgggacaaactgttccccatgtacactttcatataatgccccgccgtctgggagacttcgggcacaatgaccagatctacgtgaaactagatgagcgcgccgaggagaagcctccgcgtaccatcgaggaaaggatcgaggaggcgcaaatttatcgcaaatttctgacggacataagctagctttttaccccaccccttttcctgccatgtgatttatgaagaacatataataaagagatagattttcaatcggccatttcggaatagatcagatgagggaatcgattcatctgaaattgacgtacctcaaccttcccgcccacggccacaagtttcttgcaggcaccggtgatgcactcgttgaccgtattcactatggccatgggatcctgctcgcaccatccctccttctggaaaatagactccacttcaatctgatgaaagcacacaatttcgtcagtgcccgcacgaaatataataaatcgcgcggaagtggttccctcgtcaatagccccaacgaatggaccagatagcgtgggtggaggcggtgtcgtttcggttgtgggagaatccattttttttacgtggtgtccagagttcacctttacagtcaataaatgccagcacgctttctcgcgagattgtttcacactaaaattagttattggaatcttgtcgacatattcgacggaaattatgcgataagagataaggtgagcgagccttctctttgcaaatcgttacgatagcggtgtgtgcaagctaaaaacccgtcggatagtaaatatttactgcgaatgggcgcgacataacgtttatgcatcataaagaacgtgatttttgctatcgggaacaaaccttaaaattataaatcatttatttcttcattaagtgcattataatttaatatttacatattaaaattttgttataggtaatttttcacaaaatacacctatatataaaacgtattgcgcataaacgaacattcacaacgaaataatgtgtctggtaagtggggtaacacttttgcacgcaggctaaagagtatcagctgatctgaacgccaaactggataataacaaaaatatccagtttgttaccgccaagtaaactagtatattccgacatgatgatttcagacagtcagaagaaaggactgcgggagttacttctaaatgacaagaacttaactgttctgctacagttggccaaaggggccaccaaaaatatgtgcaaaaccgaagac

SEQ ID NO: 15578 - DNA, 1495 bp, DROSOPHILA
aaagagagcagcgcagtaaacaactagccggcgacccgtttcaatgtcaactctagttaataccacgagacgcagcattgtgatcgccattcatcagcagctacgcaggatgtccgtccaaaagaggaaggatcaaagtgcgaccattgctgtgggtcagatgcgctctaccagcgacaaggcggctaatcttagccaagtgatagagctagtggatagggccaagtcacagaacgcctgcatgctctttctgcctgagtgctgtgactttgtgggcgagagccggacccaaactattgagctctccgagggcttggacggcgagttaatggcgcagtaccgggaattggcgaagtgcaacaaaatttggatttccctgggtggcgtgcacgagcggaacgatcaaaaaatcttcaacgctcatgttttgctcaacgagaaaggggaactagcagcagtatacagaaagctgcacatgtttgatgttacgactaaagaggttcgcctacgcgaatcagatacagttacgccgggatactgccttgagcgcccagtgagcactccagttggccagatagggcttcagatttgctacgacctgcgttttgctgagccggcggtgctgctcaggaagctgggtgccaatttgttaacatacccatccgcattcacatacgcaaccggtaaggcgcactgggaaatcctcctgcgggccagagccatagagactcaatgctttgtggtcgctgcggctcagataggttggcacaaccagaagcgacagagttggggccacagcatgatcgttagcccctggggaaacgtactggctgactgcagcgagcaggagcttgatataggcacggccgaggtggacctttccgtgcttcaatctctgtatcagaccatgccctgcttcgaacatcgtcgaaacgacatctacgccttaacagcctacaaccttcgtagcaaagaaccaacccaggatcgaccatttgccactaatatcgtggacaagcgcacaattttttatgagtctgagcactgctttgcattcaccaacctgcgctgtgttgtaaagggtcacgtccttgtgtccactaagcgagtgactccgcgcctttgtggcctcgactgtgccgaaatggcggatatgttcaccactgtgtgtctggtgcaaagattgcttgagaagatttaccagacaacttccgccaccgtcactgtgcaagatggtgcacaggcgggacaaactgttccccatgtacactttcatataatgccccgccgtctgggagacttcgggcacaatgaccagatctacgtgaaactagatgagcgcgccgaggagaagcctccgcgtaccatcgaggaaaggatcgaggaggcgcaaatttatcgcaaatttctgacggacataagctagctttttaccccaccccttttcctgccatgtgatttatgaagaacatataataaagagatagattttcaa

SEQ ID NO: 15579 - protein, 460 aa, DROSOPHILA
MSTLVNTTRRSIVIAIHQQLRRMSVQKRKDQSATIAVGQMRSTSDKAANLSQVIELVDRAKSQNACMLFLPECCDFVGESRTQTIELSEGLDGELMAQYRELAKCNKIWISLGGVHERNDQKIFNAHVLLNEKGELAAVYRKLHMFDVTTKEVRLRESDTVTPGYCLERPVSTPVGQIGLQICYDLRFAEPAVLLRKLGANLLTYPSAFTYATGKAHWEILLRARAIETQCFVVAAAQIGWHNQKRQSWGHSMIVSPWGNVLADCSEQELDIGTAEVDLSVLQSLYQTMPCFEHRRNDIYALTAYNLRSKEPTQDRPFATNIVDKRTIFYESEHCFAFTNLRCVVKGHVLVSTKRVTPRLCGLDCAEMADMFTTVCLVQRLLEKIYQTTSATVTVQDGAQAGQTVPHVHFHIMPRRLGDFGHNDQIYVKLDERAEEKPPRTIEERIEEAQIYRKFLTDIS

SEQ ID NO: 15580 - DNA, 4703 bp, DROSOPHILA
tggccaagacctgcaaggaggccgaggctgccctctggcaccagaacctctttaacgacttggttcgcggcgctggtaccatcgatgcctctcacgcggctgccatcgctgccgttgaggctgccaccaaggccaaggcctccgccatcgtggtgatcaccaccagcggcaagtcggccttccaggtgagcaagtaccgcccacgctgccccatcatcgcggtcacccgtttcgcgcagaccgcccgacaggcccatctctaccgtggactggtgccactcatctacaagggtaggtttttgtttctccaggtcgttctttaaattataactctggcttgtacttgcagagcccggtcttggtgactggctgaaggacgtggacgtgcgcgtgcagttcggtctgcaggtcggaaagaagaacggcttcatcaagaccggcgattccgtcgtggtggttaccggctggaagcagggctccggcttcaccaacaccatccgcattgtgtaagtttaaattctagcatgtagatatatatgtatctgtgcaaaaattatatcaacaaaactaacgcaattatctatcatttcagcaccgtcgaataaattctgccgctcaggaagtacctggatgcgtcgcagctgccgcgggcgtcgcgttgattactgttaataaccaagttaatttattaattacacaatattcggaatattggaaactgcaggaggctgctggaaccgctgtcagaagcgccgaaggccggcccgggcctcaaacagacacacaaatatactataccattgttgaataatagagatttcttcgaaaattataataaagtcatcactgtatttatgtacgtatggaaagtaatgtgccattttctccttatacttggaacctttgggtattaggtctgcatgtacgagatccacatccagttccctataggcaattgattttattcgtttttgacaggtaacactacattttatttttgtttcggtgtatcaaaatttattcaaaattcatccatacgcaagaatccttagtccagggtccacagtgcccatatgttccacttgcctgttaaacctaagatatcgctgctatgccagcaaatgcaagaaagagaaggtaggacgttgttacgttgggagtcaatcatccgcttatgaattctttccagaaaccaccgaagttccgactggaccgcggaccattcgcctcccagttggattaccagtcgcgactgcagtaccaagcacctgccctgagtatccccctcagcagcatcatatgcaccattggaccctcatccaacagcccagaaaagctattggagctcatccgggctgggatgcgggtcgtgcgtatgaacttctctcacggctctcacgagtatcactgccagacaatacaggcggctcgtaaggccatcgccatgtacgtggagcaaacgggtctgcccagaacattggcaattgctctggacaccaagggtccagagatccggacgggcaaactggccggtggcaatgatagggctgagatagagctcaagaccggagacaaagtgacattgagcaccaagaaggagatggcagacaagagtaacaaggataatatctatgtggattatcagaggctacctcaactggtcaaaccaggaaatcgggtatttgtagacgacggattgattgcattgatcgtgaaggaatcaaagggagatgaagtgatctgtcaggtggagaacggtggcaagctgggctcccacaagggaatcaatttgccaggagttccggtagatcttcccagcgtaacggagaaggataagcaggatcttaaatttggggccgagcaaaaggtggacatgatcttcgcatcgttcatacgagacgcaaatgctctgaaggaaatccgccaagtacttggaccggctggagcgtgtataaagatcatctctaagattgaaaaccaccaaggtctggtaaacatagacgacattatccgtgaatcagatggcataatggtggcccgaggtgatatgggcattgagatacccacggaggatgttcccctagcccagaaatcgattgtggctaagtgcaacaaggtgggcaagcctgtgatctgtgccacccagatgatggagtcgatgacgaacaagccgcgacccactcgtgccgaagcctcggatgtggccaacgctattttcgatggctgcgatgccgtaatgctgtccggtgaaacggccaagggcaagtatccggtggagtgcgtccagtgcatggccaggatctgtgccaaagtagaagcagttctatggtacgaaagcctgcagaacagccttaaaagggaaatccggaccagtgctgccgaccacatttcggcagttaccacggcgatcgcggaggcggccacggtgggccaagcccgggcaattgtggtggccagtccgtgctccatggtggcccaaatggtcagtcacatgaggccgccatgtccaattgtcatgctcacgggtaacgaatccgaggcggcccagtctctgctctttcgcggcatctacccactcctcgttgaggaaatggttattggcagctttaactttcgacgcatcatgcagtcgggcctgaagctgatgggcaagatggacatcttggagccgggtcagaaaggatcggtggtgctggttaatgccatgtcggcagaaaagatcaccttccggctgttcactatccgtcagcagaccaaggaagaacgcgatcaggatgagcgatgccgaaaattggccctagagcagagctgcaaggagagggctgaaaaggaggaatgcagaaagctccagcaagcggaagaatgtcagaagcaaaaactggccaaaaaatgtaaacagttcgaagagaagcaaaaggtctgccccaaaaagaatgatactccgaagaatgattgtccgaagaaagattgtccgaagaaagaatgtcccaagcaagatgacgaaatctcaaagtgcaggcaaatgcaagaagcggaagctgaagaaaggaagtgcaaagaagagtttgaacagatgtgcaaattagctgaagaaaaaaggaaagaagctgaaaaatgcaggaaagcggacgaagaacgaaggaaagaggaagctgaaaagtgcaggaaattggaagaagataggaaatgcaaattggctgaagagaagaaaaggaatgaagaagaacttaagataatagaagcagaagtggccaaactggaagctgctgagaaggccaagcgtttgaaggaggaagagaaaaagaaggaagaactaatgaagtgcaagcaacgaaatgaagcgaaaaaaaagagggaagaggctgaaaggtgcaagagaaaggaaagagaaagggagctagctgaaatggaaaacaaatggaaacaggttgcggagaaaagaaagagaaagaaggcagcagagatgtgcaggaaaatagaggatgcaaaagaaaaagccgcggcagaatcggctgataagattctgaaagctgtgtgcgaaaaactaaagcaatctctctcggatccggacaaatcaaaaaagggcaagaaataaagtgaaagctaatggcagatttatatggaacattttaacttttaatacggtgttacacaccgaattccaaattattatataaaactattggaattttttaaattttctagtaaaacaatgtaaagaacgctattgtcgagttatttgactataggcgcgaacggaaaattttcaaatttgggcatatcgataaatattggaaaatacacatttgcttatcggttctttgaaaagtaataatttcatacctgctaaccaaattaaactatgtcattatgcacgttcacacctccactgataagatcgaagtcattgtaatcattggacatcacctctaaaagtcatattttatagagtcaacttttcgaaattaatcgcctacaattgatttcaccacatgatgaagataatgaaatattcgatattaatcgtatgcaagtgatttcaccacatgatgaggaatggcgaaattctaattctcccagctgcttgatgttgacagtatttaaaccaaacaaagggttagtttagagggttcttcatcgcgagaaaaaggtactaccatgtcattgcccacgaccagagccaccacggccacgaccactcacgctgtggtccaggctgtggaaacgtatattcagaaccagaatttgcttggcgagatcgctgagctggacgacatgctgtacgatttggtgtccatgcacaaagacaacgagctggccctgaagcgtgtgctgcagtgcatccacaacctgttgcagacgaacagcaagtataacgtccgctttggcccaaaagtttttcacaaactggtctccgtggtgattgccgacagtcgtgaggattcggccagccggcgtcaactggtggccaatttactggtctgcgtgcagcttcatatacggaagtttccgcgtatcgaagccaagttcgtgctgcagcagctctggtcgctgagtcagagcaatgagcggcaaccacatgcggcccagatcctggtacaccttttcgatgatttcgtcaacaacttgggaacggaatgcgcccaggaactgcttgtgctaacgcggaatcttctacagtctgatgtgcgcgatgatcgacg

SEQ ID NO: 15581 - DNA, 2651 bp, DROSOPHILA
tttcggtgtatcaaaatttattcaaaattcatccatacgcaagaatccttagtccagggtccacagtgcccatatgttccacttgcctgttaaacctaagatatcgctgctatgccagcaaatgcaagaaagagaagaaaccaccgaagttccgactggaccgcggaccattcgcctcccagttggattaccagtcgcgactgcagtaccaagcacctgccctgagtatccccctcagcagcatcatatgcaccattggaccctcatccaacagcccagaaaagctattggagctcatccgggctgggatgcgggtcgtgcgtatgaacttctctcacggctctcacgagtatcactgccagacaatacaggcggctcgtaaggccatcgccatgtacgtggagcaaacgggtctgcccagaacattggcaattgctctggacaccaagggtccagagatccggacgggcaaactggccggtggcaatgatagggctgagatagagctcaagaccggagacaaagtgacattgagcaccaagaaggagatggcagacaagagtaacaaggataatatctatgtggattatcagaggctacctcaactggtcaaaccaggaaatcgggtatttgtagacgacggattgattgcattgatcgtgaaggaatcaaagggagatgaagtgatctgtcaggtggagaacggtggcaagctgggctcccacaagggaatcaatttgccaggagttccggtagatcttcccagcgtaacggagaaggataagcaggatcttaaatttggggccgagcaaaaggtggacatgatcttcgcatcgttcatacgagacgcaaatgctctgaaggaaatccgccaagtacttggaccggctggagcgtgtataaagatcatctctaagattgaaaaccaccaaggtctggtaaacatagacgacattatccgtgaatcagatggcataatggtggcccgaggtgatatgggcattgagatacccacggaggatgttcccctagcccagaaatcgattgtggctaagtgcaacaaggtgggcaagcctgtgatctgtgccacccagatgatggagtcgatgacgaacaagccgcgacccactcgtgccgaagcctcggatgtggccaacgctattttcgatggctgcgatgccgtaatgctgtccggtgaaacggccaagggcaagtatccggtggagtgcgtccagtgcatggccaggatctgtgccaaagtagaagcagttctatggtacgaaagcctgcagaacagccttaaaagggaaatccggaccagtgctgccgaccacatttcggcagttaccacggcgatcgcggaggcggccacggtgggccaagcccgggcaattgtggtggccagtccgtgctccatggtggcccaaatggtcagtcacatgaggccgccatgtccaattgtcatgctcacgggtaacgaatccgaggcggcccagtctctgctctttcgcggcatctacccactcctcgttgaggaaatggttattggcagctttaactttcgacgcatcatgcagtcgggcctgaagctgatgggcaagatggacatcttggagccgggtcagaaaggatcggtggtgctggttaatgccatgtcggcagaaaagatcaccttccggctgttcactatccgtcagcagaccaaggaagaacgcgatcaggatgagcgatgccgaaaattggccctagagcagagctgcaaggagagggctgaaaaggaggaatgcagaaagctccagcaagcggaagaatgtcagaagcaaaaactggccaaaaaatgtaaacagttcgaagagaagcaaaaggtctgccccaaaaagaatgatactccgaagaatgattgtccgaagaaagattgtccgaagaaagaatgtcccaagcaagatgacgaaatctcaaagtgcaggcaaatgcaagaagcggaagctgaagaaaggaagtgcaaagaagagtttgaacagatgtgcaaattagctgaagaaaaaaggaaagaagctgaaaaatgcaggaaagcggacgaagaacgaaggaaagaggaagctgaaaagtgcaggaaattggaagaagataggaaatgcaaattggctgaagagaagaaaaggaatgaagaagaacttaagataatagaagcagaagtggccaaactggaagctgctgagaaggccaagcgtttgaaggaggaagagaaaaagaaggaagaactaatgaagtgcaagcaacgaaatgaagcgaaaaaaaagagggaagaggctgaaaggtgcaagagaaaggaaagagaaagggagctagctgaaatggaaaacaaatggaaacaggttgcggagaaaagaaagagaaagaaggcagcagagatgtgcaggaaaatagaggatgcaaaagaaaaagccgcggcagaatcggctgataagattctgaaagctgtgtgcgaaaaactaaagcaatctctctcggatccggacaaatcaaaaaagggcaagaaataaagtgaaagctaatggcagatttatatggaacattttaacttttaatacggtgttacacaccgaattccaaattattatataaaactattggaattttttaaattttct

SEQ ID NO: 15582 - protein, 744 aa, DROSOPHILA
MRVVRMNFSHGSHEYHCQTIQAARKAIAMYVEQTGLPRTLAIALDTKGPEIRTGKLAGGNDRAEIELKTGDKVTLSTKKEMADKSNKDNIYVDYQRLPQLVKPGNRVFVDDGLIALIVKESKGDEVICQVENGGKLGSHKGINLPGVPVDLPSVTEKDKQDLKFGAEQKVDMIFASFIRDANALKEIRQVLGPAGACIKIISKIENHQGLVNIDDIIRESDGIMVARGDMGIEIPTEDVPLAQKSIVAKCNKVGKPVICATQMMESMTNKPRPTRAEASDVANAIFDGCDAVMLSGETAKGKYPVECVQCMARICAKVEAVLWYESLQNSLKREIRTSAADHISAVTTAIAEAATVGQARAIVVASPCSMVAQMVSHMRPPCPIVMLTGNESEAAQSLLFRGIYPLLVEEMVIGSFNFRRIMQSGLKLMGKMDILEPGQKGSVVLVNAMSAEKITFRLFTIRQQTKEERDQDERCRKLALEQSCKERAEKEECRKLQQAEECQKQKLAKKCKQFEEKQKVCPKKNDTPKNDCPKKDCPKKECPKQDDEISKCRQMQEAEAEERKCKEEFEQMCKLAEEKRKEAEKCRKADEERRKEEAEKCRKLEEDRKCKLAEEKKRNEEELKIIEAEVAKLEAAEKAKRLKEEEKKKEELMKCKQRNEAKKKREEAERCKRKERERELAEMENKWKQVAEKRKRKKAAEMCRKIEDAKEKAAAESADKILKAVCEKLKQSLSDPDKSKKGKK

SEQ ID NO: 15583 - DNA, 2817 bp, DROSOPHILA
ctaaggtagaggagaaactaaacaacctgtgccaggtgcacgacgagatctgtgaaatcggaaaagctttgaacgagctgtggagctatcccattctatctctaatggcctatggttttctgattttcactgctcaactttatttcctctactgcgctacacagtaccaatcgataccatcgcttttccgttccgccaagaatcccttcatcactgttatagttctaagttatacgtctggaaaatgcgtgtacctcatctacctgagttggaaaacgtcgcaggcctccaagcgcacaggaatcagtctgcacaaatgtggcgtggtggccgatgataatcttctctacgaaattgttaaccacctatcgctaaaattgctcaaccactcggtggacttttcggcttgcggcttctttaccctggacatggaaacattgtatggtgtgagtggcgggatcactagctacctgatcatcctgattcagttcaatttggccgcccagcaggccaaagaggctatacagacgttcaactcgcttaatgacaccgccggcttggttggtgccgccaccgatatggataatattagctccacgctgcgtgatttcgtcaccacgaccatgacaccggcggtctaaactttgttttcttgaatgttttattcgatgtttcgagcacgtcctcctggcacttttacttatatttatttgtcacgaaataaactctcacgaagcagttctgcgtttgtactccgcacgggcatcctctatttcattaagaagatctgcgtaggttgcattcgctccgtcaaagtcaaggatagcaacgcaacaaatttgcgctcgcttttggagggcataagaaagctcccttctcagcagaggaaagcaatagggcacttgttgctgctggcattggaatttcaagccttctatagtcgcatctagaccacctttttaagcggatattattaatggctgatttgcgaacaattcgattactcactttcgccggggcagatttcgcagtcagtggccaggaacaacaatttcaccttgtttatccttagcctcgccagagcttctcgaacacccaaaaccaggcggggatgtgcacgcgctttaatctcgtttttggcaaaggcgcgcttctgaaatcgatccaggtcccttaacaactgagtggacaactccttgaggcgaggacgggtgcagttgtcacaatagctggaagagatcaaacatgatatttcaacgtttaaagaaggtacaaccagtgtaatcaaaccttctaaatcgccgtgagtgaatggcatgtactgtttttgcttgtgaagggttgttgggtgcaggggttttactaagtgataggttttgaacttgttgctccagcggaatagcattcggattgatatcttgaccaactactgggactccttcaagatcattctctgcgacttctctctccgccttctttgaagtgcgatatacacgtacggacttcttcaacctggtgatcttcttcttgggatcaaggcgggttttgcccttgggtttgtaaactatgtagctacctcttgttatggctaaatgtgtcttttgaagtttatgtgcctttgtttgcctttgtgtttttggtctcggcttgatgacaaagtccagaagagaggtttgctgctcccgtttcctgtgctggtttttgtacttggagctgcgtggagtaatcttgatcgctgtatcctggacatcctgattcctgctcctccttattttttcagtcatttattgtggattcttagtgcatctctaaaatagtgttggtcgtcgcggtaaatggtgaaatcgctttttcaccacacatgaatgcgaagaatcagcgcggtacaacaacgtaattaataaaatcaagaaccgcagcaaatgcggcctcattcgttcctaaaagttttgatttggaagttcaacgttaggcttctgtgaaaaaatgagtaccgctaatcattttcaaagaattcttgagaaattgtcaatctctgacaatgaaagggccgtatataccaaggaagccgaggaaattcaaaactatgtagttgacgaacttaagcgggtagacaaaacctttcgccaggtattcgacggactcagtcttggaggtaagttatttaattttaaatatctacatatattctacatatattctacatatatttctatataaaaacaaaacaaataaatagaataatgttagttacaagacattgtctggtcgattttctaatgcattcaatattatttttaataaaagtgtaaattgacggaagtaatacaaatgtaagtcgagataatccaacgctatacaattacaattgatatctcttgctttattttgttttatcatttttgcaagaaatgttgtactttcgtaaattcatcgttatgtatgtacattatgtacctaaaaatatatgtacacgtatcttttaggaagttacttggatcgcgtcaagctaaatttgcccgatgaatttgatctgcacatgaaactaaagtttccatttgatatccgaccgactcggatcgaccaagggtttatttatttagaggctgatctcaccgtaatcaatccccaacgcatccatcgtattgtacttcaagactggctacgcaatgcattccgcaaggtattcaggtctaatcagacaattgccactaccagtaatcgagtctacaaattaacctatactcttgaggggtatggttgtgcccataccattttagccgtttgtggtagtcgctcgatatcttttgatttggt

SEQ ID NO: 15584 - DNA, 756 bp, DROSOPHILA
ctattttagagatgcactaagaatccacaataaatgactgaaaaaataaggaggagcaggaatcaggatgtccaggatacagcgatcaagattactccacgcagctccaagtacaaaaaccagcacaggaaacgggagcagcaaacctctcttctggactttgtcatcaagccgagaccaaaaacacaaaggcaaacaaaggcacataaacttcaaaagacacatttagccataacaagaggtagctacatagtttacaaacccaagggcaaaacccgccttgatcccaagaagaagatcaccaggttgaagaagtccgtacgtgtatatcgcacttcaaagaaggcggagagagaagtcgcagagaatgatcttgaaggagtcccagtagttggtcaagatatcaatccgaatgctattccgctggagcaacaagttcaaaacctatcacttagtaaaacccctgcacccaacaacccttcacaagcaaaaacagtacatgccattcactcacggcgatttagaagctattgtgacaactgcacccgtcctcgcctcaaggagttgtccactcagttgttaagggacctggatcgatttcagaagcgcgcctttgccaaaaacgagattaaagcgcgtgcacatccccgcctggttttgggtgttcgagaagctctggcgaggctaaggataaacaaggtgaaattgttgttcctggccactgactgcgaaatctgccccggcgaaagtgagtaa

SEQ ID NO: 15585 - protein, 240 aa, DROSOPHILA
MTEKIRRSRNQDVQDTAIKITPRSSKYKNQHRKREQQTSLLDFVIKPRPKTQRQTKAHKLQKTHLAITRGSYIVYKPKGKTRLDPKKKITRLKKSVRVYRTSKKAEREVAENDLEGVPVVGQDINPNAIPLEQQVQNLSLSKTPAPNNPSQAKTVHAIHSRRFRSYCDNCTRPRLKELSTQLLRDLDRFQKRAFAKNEIKARAHPRLVLGVREALARLRINKVKLLFLATDCEICPGESE

SEQ ID NO: 15586 - DNA, 3642 bp, DROSOPHILA
ggaggactgtttcaagcgtttccttaagcgggacgatatcgacatcattctaatcaaccagaactgcgccgagcttattcgtcatgtgatcgatgcccatacgtcgcccgtgcccgctgttttggagattccctccaaggaccatccgtacgacgccagcaaggactccattctgcgtcgcgcccgcggcatgttcaatccggaggatctggtgcgctaattcctcgaattctgctcgaggacactgtttcgtattgctgcaaccgccagagaattgctttacaccctgtaaacaactatccatagattcagtgcttcgcctttgttcttatcgtgtatttaaagacatttattaaatggttttcgttgtataaatagattaaaatcaaattgttccaaatcaaatactggaagtctgatatctggaggttttccattgaaaggtctttccagctatgtcaagtaacagtcttccagcaaagatacagtgcgcattcgataggtcaaaaatatattaagccactaaattggtgttcatccttacaactctcatttgcagatttgtaagaaatctaatttttggcaatggcattggttatttatttatcaatttgttgccagaataattttttttaccagtagataagaaacttgattaacagtatgccccgcataaatgtggtatctagaattttcattaaaataaattagctattaaattttgaaattagattagctgtgttaaatgttccatacattttcaatgagtttggtgttgctgattttaaggctaaaggaatatcttgtataaatttaccagataacaagttcagcgtgctgttaagtctgttatcagctattccaagggctgttagcgcaatcagctgttgtagagcggagtattttctagctggcaacgtaaacataaaatatatctttctgagaacctggccacaagttgatcgatcgtcattagtcatcttaccgctgcacgcacaccatgctaaaggccgttatcctgatcggcggtccccagaagggcacccgctttcgccccctttcgcttgacacgcccaagccgctctttccattggccggtcgtcctctaatcgcccatcatattgaggcctgcgcccagctgcccgatatacgcgagatcctgatcatcggctattatccgcagacccaaatggagggattcgtgggcgacatgcaggccctgtacagcagcagcaacatcaacatcaggtgggaagaggggctttggaagaacttgaatcttaagttccaagttgacctaccctttatcataggtaccttcaggagttcactgccttgggcactgcaggcggaatgtaccatttccgggatcagattagagctggtaacccccgagccttcttcgtattgaacggagatgtttgcgctgattttccgctgcaagaactgtgcgactttcacgagaagcgcccggcgagtgctctggttactatcatgtccacggaggcgacacgtcagcaatccttgcactacggctgtctggttttcgatcggagtagcggagccgtttcgcattatgtagaaaagcctagctcctatgtgtccacatttatcaactgtggggtgtatgtctgttccatggatatattcacggtgttggcacagatttttcattcgagaggtcaggagtacagctgccaggcattttgcaatggaaacggaaatggaaatggacgagagcaggggcacatcaagtgggaacaggaggtgcttacgcccctggctggaaccgataaactctttgccatgccagtgcctaactggtggtcccaactgaagactgctgggtcggcaatctacgcaaatcgtcattatcttggcctgtacaagaaaacgcatcccgagagattggccaatgtggggatcaagcgcggagaaggggacggcagcttgatctgcacagtgcatccggacgtctatgtgcatcccagtgccactgtccatcacagcgcagtggttggtctagatcaaacttattttttagagtgcttctaacaaaaaggtcctgttccagctgggacccaatgtggcgattggacctggagtgacaattggaccaggtgtgcgcattcgcgaatcgattgttttggagcaggcacagatcctggaccatacgctcgtgctgcactctattgtgggcaggggctccaccattggagcttgggctcgagtcgagggcacacctagtgatcccgatcccaacaaaccctttgccaaaatggagaacccaccgcttttcaacaacgagggcaagctaaacccctcgataaccatactgggtaggtgttttgaattgagtgatgacattcttgaatcctaattttcaatttcaggctgtttcgtgcaggtgcccgccgagaaaatcctgctgaacagcattgtactgccgcacaaggagctcagtcgcagcttcaaaaacgagatcatcttgtgagaatgattttattttttatcttcgctctgtgtccctatcagtatgtcattttatatgtttatattgtgctatattctgaaaaactccctattaaatgtgtcttatcctctgcagccaattttactacgtctttgacccggtaaggtaaactactcggcactcgtgcttttatgattgaaagatggatatgtgatagttgggaaacaattttttttcgaatacctttacgtattaaactttttacggcggtattactttcttataaatgtggtcgagggatgcagttttctgcatttgtgtgctttttataaggaattgaattaggtatatccgttactcgtacagtatattctcgctcgcactcccactagcgtatctttcagatcaaaaacatgtagtagttattggtatatttgttataaaaaatcgaggcaattaagaataccagcattcatattgtttattttttttaaaggaagctaactattgttcgagtaaattatttatcttgcacctttaaaaggggagtttacattccgatatcgataagtgcaagtagttgggggtcgtgacacggttgctcctcaaaaaagcggcccacgcacaccaatacctgtgcgctcccgatgattttcccactctctctctcgctcccgctcttattcgttttgaccaaaacgcgtttacgttgctcggttgtcagccagttagtcgccgtcgcctgttgcttttgatctgtgcatatccaccgcttctaaaacagtgaaatttactacttagtatacttaccaaataatggccactagctggaaatgatgattctggccaaaaggtaaggtaaccaggtaagcagtctattctacgtgggcattcaccgttctccgttggtaattgagcaagcgaagaagaggaggaggaagaagaagagcagagcaaacagtatgcaggtgtacgtgtgtatgtgtggtggaggacgaatgtgttggtggagcagcacaggtaacttctatgcgagagggagcacgagaaagagacagagagagagaggaaaagcgcgggtcatgctcactgagcgtaactgtcttgcgcagcgtgggaaacttatagactagctctttgctttaagccaagctttattggcggagttt

SEQ ID NO: 15587 - DNA, 1347 bp, DROSOPHILA
atgctaaaggccgttatcctgatcggcggtccccagaagggcacccgctttcgccccctttcgcttgacacgcccaagccgctctttccattggccggtcgtcctctaatcgcccatcatattgaggcctgcgcccagctgcccgatatacgcgagatcctgatcatcggctattatccgcagacccaaatggagggattcgtgggcgacatgcaggccctgtacagcagcagcaacatcaacatcaggtaccttcaggagttcactgccttgggcactgcaggcggaatgtaccatttccgggatcagattagagctggtaacccccgagccttcttcgtattgaacggagatgtttgcgctgattttccgctgcaagaactgtgcgactttcacgagaagcgcccggcgagtgctctggttactatcatgtccacggaggcgacacgtcagcaatccttgcactacggctgtctggttttcgatcggagtagcggagccgtttcgcattatgtagaaaagcctagctcctatgtgtccacatttatcaactgtggggtgtatgtctgttccatggatatattcacggtgttggcacagatttttcattcgagaggtcaggagtacagctgccaggcattttgcaatggaaacggaaatggaaatggacgagagcaggggcacatcaagtgggaacaggaggtgcttacgcccctggctggaaccgataaactctttgccatgccagtgcctaactggtggtcccaactgaagactgctgggtcggcaatctacgcaaatcgtcattatcttggcctgtacaagaaaacgcatcccgagagattggccaatgtggggatcaagcgcggagaaggggacggcagcttgatctgcacagtgcatccggacgtctatgtgcatcccagtgccactgtccatcacagcgcagtgctgggacccaatgtggcgattggacctggagtgacaattggaccaggtgtgcgcattcgcgaatcgattgttttggagcaggcacagatcctggaccatacgctcgtgctgcactctattgtgggcaggggctccaccattggagcttgggctcgagtcgagggcacacctagtgatcccgatcccaacaaaccctttgccaaaatggagaacccaccgcttttcaacaacgagggcaagctaaacccctcgataaccatactgggctgtttcgtgcaggtgcccgccgagaaaatcctgctgaacagcattgtactgccgcacaaggagctcagtcgcagcttcaaaaacgagatcatcttccaattttactacgtctttgacccggtaaggtaa

SEQ ID NO: 15588 - protein, 448 aa, DROSOPHILA
MLKAVILIGGPQKGTRFRPLSLDTPKPLFPLAGRPLIAHHIEACAQLPDIREILIIGYYPQTQMEGFVGDMQALYSSSNINIRYLQEFTALGTAGGMYHFRDQIRAGNPRAFFVLNGDVCADFPLQELCDFHEKRPASALVTIMSTEATRQQSLHYGCLVFDRSSGAVSHYVEKPSSYVSTFINCGVYVCSMDIFTVLAQIFHSRGQEYSCQAFCNGNGNGNGREQGHIKWEQEVLTPLAGTDKLFAMPVPNWWSQLKTAGSAIYANRHYLGLYKKTHPERLANVGIKRGEGDGSLICTVHPDVYVHPSATVHHSAVLGPNVAIGPGVTIGPGVRIRESIVLEQAQILDHTLVLHSIVGRGSTIGAWARVEGTPSDPDPNKPFAKMENPPLFNNEGKLNPSITILGCFVQVPAEKILLNSIVLPHKELSRSFKNEIIFQFYYVFDPVR

SEQ ID NO: 15589 - DNA, 4739 bp, DROSOPHILA
atgagttgaaaaggtcaagtaactaaatatcgctattttcaaagctatcatgtacaaatatttaatcttaactgccagttaaagtgctgtgctcaaattccgtagcactcacatgctttatggaaatttgtacccccacccacaacttaccgtctttatattatatcttgtgtatcggcactgtcttttggtttaatctattcactatatcttgatttgtttgttcaggcgttatcacataatgttattaaccattcacttaagccctacgagtggaagcactttttctgcacatttacgtcagaaagcaacaaaaaataataacgccgcataaaaacgtgcgaagcggtgtgaccgttatcagttccaacaagaatgctaataagtactacctgaaagtgttgcaaaacacgaaactataacggtttcaactttcaaaagaaaagctgagaaatatctatagtaatttgtcgcacatagtcctttatttgaatgtaagtataaaatgcaattgagcagctaaaagctggtaggtcataaacactaatgctacgggcacatcccttgtctaagtacaatgaacacttctgagtttgtttaaggcgcacgcgtttggaacaaatcaacaacttaatgcatatgcatatggcctgggcgagtaagggctgtgtatggtgggtgctccggacagctaggaaatgtctctcaatgtgttcggcttggtgccgtccatgtcgaagcagcggcagttgcacgacgacacggggcactctgaattttgcctggcaaataaacgcgtacattggtcagaattcaattaaatattggtaactttgaactcacttgaaccactgcatgatgtgctcggtgtgtccgccgtggcgacaggtctgacaccaggaaaaccactttgagaagggcttggtctgccagccgggcacgtcgggcgtggtggtcggggtctccccattgctcatgttcaccattgtgcccatgtgcattaggcagagcgagcagcggggcaggggtttccggcagctggggcatgaggagagcctgttggtgctggtggtggtgctccgtggacgcggctcgtccagcaaggcgttggacacagacttgccgcaaaagttgcacgacagaaatacggtgcgggaactgcgggaggatgggcggatgctctcgatcttgatgtccagctcggcccgcttctcccacaagccccagctattgaggtgatccaagtagctggcgatccagtactggatgcgcttgtcctcgaaaagctcttgccggaagtagttaatggccaccagggctaccgtctaagaaacagctcaatgtatatcaaagtttctacatatgtttttatagcgcacgctcacctgcacatcgaagctggtgtccatataggactgcagtatatcgattccgtcctgcgactctccagtgagcaacaagccatttagatcgccaccatctatggccgcctggatttgctgcgcaacatagtcagccagcttggtctccgatagatatttgcaggcgaaggccatgcggtctgataacgaaacgccttcctctttgagcactgcatcaaaattgtccttctccatcgttagaaaggagaagacagcccttaagtgtggatcgtgtatctgcatgttggcgctggatcgctgattccgccacgtggaactgcagcgatctgcattgaaactggacaaggcgatgacggtgatcctgtacatgctgggatccctcatgttgtccgccgccgacgataggatgttgcaggcatggaaaattttcaagtggaacacgcagatcatggctgcccggctgtactccttgtttgcatacaactggtctataaagcgatccagctcctgctcaaaggcccaaccgcaaagttggagggccaggtcgcgctgctcactcctgcataaagattggggttatcacactcgtcaaaccacaaattcatataaacttacctgtagcatatcagtttgttggagttgttgatgccctctggccactggagcacctgagattcaatgcgggagctggccatcaaggcctccgaggtgtgtcccaagttaatgcccaaagtggcctttaagcccgtcagtcgatcctcgctgtagacattgttcaaagtggaccacacatttcgcagatacggtgtcaagtggagttcgccgaatcgcttgttatcgggtttgatgccgtaatcctctagagcgcgctgacgcgtctcgtccaccagatccagctcaaagagttccggtttcagcaggtccacattgaagggcgaaccaccaggagtgctaaagtccagggaactcccgctattcgtgctgcagctgctcgtgggctgctgctgagtgggcgtggccgcagtggaagtcggcgaggcgggtgtgtagagcggacgctgcatcagaagtggcaatttccggcgattgctgtgcgccgtgtgcaaggtggctggcagtcgaaagtccaggatgttcagcgcatctgccaaaagcagagctctctcgaaatccctcgaatgccacgacaggcaattaacaaacgaaaactttccactgtgctggtatctagccggaaaggggctaatctgtcgttttacgtggtagatctctccggaattgtccgtgtccacactccggatgtcgtagagagtgatgtaggaggaatcgcgttgcagcgaggaaagcaggcttgtcctggtcggacaccaagcgatctgcaaatggtttttcgaggactgaatctgcctgaggggactcttgatatttcgcggatcccacagagtgatcaccgagtccacatagctgcagagatagttgccattgggggatacggaaagtccctgcactgtctttgtttgaatgctttgacaggtggcgttactctctgcgaaagggatttaaagatttcatcagtgaaagggcaataaagtaatactacgtagttgaaatataaccagtcgcattatgtgtactcacgcctcagatcgaacagctttatcatcttctggctcattcccgcaatgaccgtgcgatgatttcgatcccagcaaatggagttggccgactcgccgacgccgaagaagttggccgtctccttgggaactccacgctcaatgtcccagatggtgatgcaggtgtcatttcgatggcgatcgtgtccaatggccaggatattggcatccagctcgttccaggcgaggcaggtgcacatgcgctgctgacgcggtgctacgagaaatgaagaactattagatgcagctaagaatcggcgttgtcgtccacccactgtactcccagctgctgtcgtaggtgtcccggaagttgcaaatcccgactttgccatccgccagacccactgcaattatgggctggtcactgtggtaggaggcggccacgcagcgggcatattgatagcgcgactcgttggcgaggtagttcacggatatataaggcaggcgacctgcaaggggggcggttaagtaaagtggcataatcccttggggaaaaccctacttttttggctgtgatcatctttgcggcgcacttcgtataaatggatttcctggccccaggatacgaatttgtcgggaaaatgtggaaaccagctgagtccgtgtgtattgccgctcatcgtggccgattttccatcgatgtaaaaaaaaacaattttcactacagactaaattgcgtcgcgttatcagtttgcaaaaacaaaaacgtgagataaacactgcactacatggcaagaagaagaggcgcacacacactagccggtcgaccagctgttggccgcatgttagccagcactggcccagttcgataattcgttttatcgataagctggtaggtgattttgttttccttttttttttgtaagaaagcaaacgtgtttaatatttacaactcccacttaaaatgctgcgcaaaacaccaaaacctgcaatttggaaattcatcaaaggaagtgccaaaacactgtttgtcctcgaggcagtctgcttcgcagccagctacggcgtttattatcgcatgaacacgaatcgaggtgggaggatatttatataattattttgatcgttaataacaatccgctcctagagtttcgtcagcatattcacgagaactatcccttcgttttggactattactacaaaattggtgaaatcgtcggagacagcacagtgcgacaggcggatgcgagttattggagtgctttgaagaaaagcgactagaggagaccgcttccaaaatgcttagtaatccctactttaagtccgttttgtggctgattggcttcggaggaatggggtacggcctaatggtgttaaccgagccgaacgtcgacaagttagagcgcatcaaagcctccgtttcaagtaccaaactgagtgcggatgagcagcgaaaggctctgtttatgaagaagctccaggaggcgtccaccaccagtgccccaatctacaggtcatcgtccgagaaataggatagttaggaagcttaatcgtcatcaatttatcaatttgttatactttttaaatacaaatgttaagcatttaatcttaattggttgggtagggtgattcattagaagaaaattcgattcgtacaagaatgcgaaataggaaaaaggaaataaaattactaaattgttaatattcacgttttaaatgtttacagagcccttactacttctgt

SEQ ID NO: 15590 - DNA, 2420 bp, DROSOPHILA
acgcgacgcaatttagtctgtagtgaaaattgtttttttttacatcgatggaaaatcggccacgatgagcggcaatacacacggactcagctggtttccacattttcccgacaaattcgtatcctggggccaggaaatccatttatacgaagtgcgccgcaaagatgatcacagccaaaaaagtcgcctgccttatatatccgtgaactacctcgccaacgagtcgcgctatcaatatgcccgctgcgtggccgcctcctaccacagtgaccagcccataattgcagtgggtctggcggatggcaaagtcgggatttgcaacttccgggacacctacgacagcagctgggagtacacaccgcgtcagcagcgcatgtgcacctgcctcgcctggaacgagctggatgccaatatcctggccattggacacgatcgccatcgaaatgacacctgcatcaccatctgggacattgagcgtggagttcccaaggagacggccaacttcttcggcgtcggcgagtcggccaactccatttgctgggatcgaaatcatcgcacggtcattgcgggaatgagccagaagatgataaagctgttcgatctgaggcagagtaacgccacctgtcaaagcattcaaacaaagacagtgcagggactttccgtatcccccaatggcaactatctctgcagctatgtggactcggtgatcactctgtgggatccgcgaaatatcaagagtcccctcaggcagattcagtcctcgaaaaaccatttgcagatcgcttggtgtccgaccaggacaagcctgctttcctcgctgcaacgcgattcctcctacatcactctctacgacatccggagtgtggacacggacaattccggagagatctaccacgtaaaacgacagattagcccctttccggctagataccagcacagtggaaagttttcgtttgttaattgcctgtcgtggcattcgagggatttcgagagagctctgcttttggcagatgcgctgaacatcctggactttcgactgccagccaccttgcacacggcgcacagcaatcgccggaaattgccacttctgatgcagcgtccgctctacacacccgcctcgccgacttccactgcggccacgcccactcagcagcagcccacgagcagctgcagcacgaatagcgggagttccctggactttagcactcctggtggttcgcccttcaatgtggacctgctgaaaccggaactctttgagctggatctggtggacgagacgcgtcagcgcgctctagaggattacggcatcaaacccgataacaagcgattcggcgaactccacttgacaccgtatctgcgaaatgtgtggtccactttgaacaatgtctacagcgaggatcgactgacgggcttaaaggccactttgggcattaacttgggacacacctcggaggccttgatggccagctcccgcattgaatctcaggtgctccagtggccagagggcatcaacaactccaacaaactgatatgctacaggagtgagcagcgcgacctggccctccaactttgcggttgggcctttgagcaggagctggatcgctttatagaccagttgtatgcaaacaaggagtacagccgggcagccatgatctgcgtgttccacttgaaaattttccatgcctgcaacatcctatcgtcggcggcggacaacatgagggatcccagcatgtacaggatcaccgtcatcgccttgtccagtttcaatgcagatcgctgcagttccacgtggcggaatcagcgatccagcgccaacatgcagatacacgatccacacttaagggctgtcttctcctttctaacgatggagaaggacaattttgatgcagtgctcaaagaggaaggcgtttcgttatcagaccgcatggccttcgcctgcaaatatctatcggagaccaagctggctgactatgttgcgcagcaaatccaggcggccatagatggtggcgatctaaatggcttgttgctcactggagagtcgcaggacggaatcgatatactgcagtcctatatggacaccagcttcgatgtgcagacggtagccctggtggccattaactacttccggcaagagcttttcgaggacaagcgcatccagtactggatcgccagctacttggatcacctcaatagctggggcttgtgggagaagcgggccgagctggacatcaagatcgagagcatccgcccatcctcccgcagttcccgcaccgtatttctgtcgtgcaacttttgcggcaagtctgtgtccaacgccttgctggacgagccgcgtccacggagcaccaccaccagcaccaacaggctctcctcatgccccagctgccggaaacccctgccccgctgctcgctctgcctaa

SEQ ID NO: 15591 - protein, 785 aa, DROSOPHILA
MSGNTHGLSWFPHFPDKFVSWGQEIHLYEVRRKDDHSQKSRLPYISVNYLANESRYQYARCVAASYHSDQPIIAVGLADGKVGICNFRDTYDSSWEYTPRQQRMCTCLAWNELDANILAIGHDRHRNDTCITIWDIERGVPKETANFFGVGESANSICWDRNHRTVIAGMSQKMIKLFDLRQSNATCQSIQTKTVQGLSVSPNGNYLCSYVDSVITLWDPRNIKSPLRQIQSSKNHLQIAWCPTRTSLLSSLQRDSSYITLYDIRSVDTDNSGEIYHVKRQISPFPARYQHSGKFSFVNCLSWHSRDFERALLLADALNILDFRLPATLHTAHSNRRKLPLLMQRPLYTPASPTSTAATPTQQQPTSSCSTNSGSSLDFSTPGGSPFNVDLLKPELFELDLVDETRQRALEDYGIKPDNKRFGELHLTPYLRNVWSTLNNVYSEDRLTGLKATLGINLGHTSEALMASSRIESQVLQWPEGINNSNKLICYRSEQRDLALQLCGWAFEQELDRFIDQLYANKEYSRAAMICVFHLKIFHACNILSSAADNMRDPSMYRITVIALSSFNADRCSSTWRNQRSSANMQIHDPHLRAVFSFLTMEKDNFDAVLKEEGVSLSDRMAFACKYLSETKLADYVAQQIQAAIDGGDLNGLLLTGESQDGIDILQSYMDTSFDVQTVALVAINYFRQELFEDKRIQYWIASYLDHLNSWGLWEKRAELDIKIESIRPSSRSSRTVFLSCNFCGKSVSNALLDEPRPRSTTTSTNRLSSCPSCRKPLPRCSLCL

SEQ ID NO: 15592 - DNA, 5440 bp, DROSOPHILA
aagcctggaaaagcactttcactttcagaacttttctcgtgcgttttccggcgacaaaagctgcaggccggcgagctttacttgcacggtttctgcgcgtgtcactcacgatgagcgaaagagagagcggaagataaaaggaaagtagatgctcacgcacttgcataatggcagtgcgagcgagacgaagctgttttctgtggaggagattaggttgtcaaggtcagcacagtggaattctaggtggaagtgggacagttggacagtgggctcttttccgcgttgctttttttctgtattgccagctgataagcgccgtctaacagctgatgatcggttttttgtttaccacgcacacacatactgacatcacgtgtccatataatcatatatacacatacttctgtacaatgcaaatttatatgcaaaaattaataatcgtaatggatcgttgaaccttctgttctatccgattgccggccagcctagcaacggagctttgcgccagttaacttcggagcttcctttttggataaacttttcgcatccccttacgcgaagggagttagggtatgttggcacaatagcatatcttgatcctgctaaacactttacttatacttaaatatcgaatgataatttgagcctctatcttttccatttgataatatctttattaatttttatatgcagtattgtaagattaaggttatatttcactcggaattatattgggaatagcggtaaggccacttggtcgactgagcagctggcagtccctggtcgagcatacccttgaatatacccttcttgctcgctcaccaatgttgtctctttaggggtggcctgttgcgtccgcctcttgcctcttgggcccaaactctctctcctctgcgtttatgctctctttgctgtcgggctaccgacattctgagcgctttttctgcggctaggaaaatttccgcttgccaaaaaatctgtgtggcagtcgaactttttgtctcgtcctcgccgcgtccgattttccatatatcccgattttcgtctcaaacttggaagatatattgccaaaatattgcattcggctagccgctgcgttgtgtgtgttgttgtgcgtggagttgcgtgtgcagttgcaagaagatatagtcgtctatatcgtcagaccgatctcgatcccaagtgcgattcccgttggttacatactacccgttcggtaggcaacaaaatggtgaacgtaaccatctacgatgaggcaccgcagctgaaggtaggccaatgtcacggtaatggaagcccccagagttggtccataaagatattcataatcgccataatcagttggctggcgagttggcccgatatcagagtcattggggaggaaaatgtgggaaaagacaattatgcaactgcagctgagaaaattctgtcggtcgcggtcggcagaactgaccttcggcggtgcagatgtgcagcgctgccggtgtcggcttcgctgcacacttttcttccgcctgctgctttctctctgccactctctcttccgctctgcctttctcaggtcctctctacgggggacacccctaaccacccacgcccatccactcaagcacttcaagtacacgcactttgtttacatcagcgaattctgcagcgacagctttgcgtttttcaaaacataacatgcacagtgcgaataaatattttgataatttaagcaatcgtaagagttaacaaatagtatttaacgcaacagcatcatttaatattggtaatcgattataacattttatatgtcaagttttatcaatggcttatttacacatgctactaagtaccatcagaatgataaaatactgttaatatataacgttatcattttaattaggattattagattatttaaaatcattacctttatatgtaaatagctctattttatctgtcagttcacaaatatttcaatcattccttttggtcatgaaaaatgattggtgcggcgagcatttgggcttaaatcgccgtatttggcccgtttggttctatttataagccggtggtaaacatttaatttggtcgataaaaactgtatcgatttatattcgttgatatgaagaagggttatcatgagttttgcacgcattcgccacgtttatgttggggtcctaaatgtgtttcgcattgcatgacttcaccagggcatgattttaatatcataaaactagttggtttttttattttttgctagaacttggtagtttttaaaacgcgtagggtttcttgttgctaggaagagacttctgattattagcgtaaattggaaataaatgcttaaaatcaataaacacgactttaacctgttttattgcaaaagttggcaatcagcgtgttgatttctaaaaataaagaatcaattcgcgctgtttataaatatgaagagaaatgaaaacaaacagaattaagtatagttttcattttgcagcccaacgaagtaccccaaaacatggccgcaggagctgatacccaactggagcacatgtgccgtctgcagttcgactcgccagtgccccatgtgcgtctgtccggaatcgtgtgcaccatcggacctgcctccagcagcgtggagatgctggagaagatgatggccaccggcatgaacatcgcgcgcatgaacttctctcacggatcgcacgagtaccatgccgccaccgtggccaatgtgcgccaggcggtgaagaactactcggccaagctgggctacgaacaccccgtggccattgccctggacaccaaggggcccgagatccgtaccggtctgatcggaggcagcggcaccgccgagattgagctgaagaagggcgagaagatcaagctgaccaccaacaaggaattcctggagaagggctctctggagattgtgtacgtggactacgagaacattgtcaatgtggtgaagcccggcaaccgggtgttcgtcgatgacggtctgatctcactgattgtccgcgaggtaggcaaggattccctcacctgcgaggtggagaacggcggctctctgggttcccgcaagggtgtgaacctgccaggcgtgcccgtcgatctgcctgccgtctccgagaaggataagagcgatctgctgttcggtgtggagcaggaagtggacatgatctttgcttcgttcatccgcaacgccgctgctttgaccgagatccgtaaggttcttggcgagaagggcaagaacatcaagatcatttccaagatcgagaaccagcagggcatgcacaacctggacgagatcatcgaggccggtgatggcattatggtggcccgtggagatctgggtattgagattcccgccgagaaggtgttcctcgcccagaaggccatgattgcccgctgcaacaaggctggcaagcctgtgatctgcgccactcagatgttggagtcaatggtgaagaagccacgtcccactcgcgctgagatctctgatgtggccaacgctgtgctcgatggtgctgattgcgtcatgttgtctggtgagaccgccaagggcgagtacccgctggagtgcgtcctgaccatggccaagacctgcaaggaggccgaggctgccctctggcaccagaacctctttaacgacttggttcgcggcgctggtaccatcgatgcctctcacgcggctgccatcgctgccgttgaggctgccaccaaggccaaggcctccgccatcgtggtgatcaccaccagcggcaagtcggccttccaggtgagcaagtaccgcccacgctgccccatcatcgcggtcacccgtttcgcgcagaccgcccgacaggcccatctctaccgtggactggtgccactcatctacaagggtaggtttttgtttctccaggtcgttctttaaattataactctggcttgtacttgcagagcccggtcttggtgactggctgaaggacgtggacgtgcgcgtgcagttcggtctgcaggtcggaaagaagaacggcttcatcaagaccggcgattccgtcgtggtggttaccggctggaagcagggctccggcttcaccaacaccatccgcattgtgtaagtttaaattctagcatgtagatatatatgtatctgtgcaaaaattatatcaacaaaactaacgcaattatctatcatttcagcaccgtcgaataaattctgccgctcaggaagtacctggatgcgtcgcagctgccgcgggcgtcgcgttgattactgttaataaccaagttaatttattaattacacaatattcggaatattggaaactgcaggaggctgctggaaccgctgtcagaagcgccgaaggccggcccgggcctcaaacagacacacaaatatactataccattgttgaataatagagatttcttcgaaaattataataaagtcatcactgtatttatgtacgtatggaaagtaatgtgccattttctccttatacttggaacctttgggtattaggtctgcatgtacgagatccacatccagttccctataggcaattgattttattcgtttttgacaggtaacactacattttatttttgtttcggtgtatcaaaatttattcaaaattcatccatacgcaagaatccttagtccagggtccacagtgcccatatgttccacttgcctgttaaacctaagatatcgctgctatgccagcaaatgcaagaaagagaaggtaggacgttgttacgttgggagtcaatcatccgcttatgaattctttccagaaaccaccgaagttccgactggaccgcggaccattcgcctcccagttggattaccagtcgcgactgcagtaccaagcacctgccctgagtatccccctcagcagcatcatatgcaccattggaccctcatccaacagcccagaaaagctattggagctcatccgggctgggatgcgggtcgtgcgtatgaacttctctcacggctctcacgagtatcactgccagacaatacaggcggctcgtaaggccatcgccatgtacgtggagcaaacgggtctgcccagaacattggcaattgctctggacaccaagggtccagagatccggacgggcaaactggccggtggcaatgatagggctgagatagagctcaagaccggagacaaagtgacattgagcaccaagaaggagatggcagacaagagtaacaaggataatatctatgtggattatcagaggctacctcaactggtcaaaccaggaaatcgggtatttgtagacgacggattgattgcattgatcgtgaaggaatcaaagggagatgaagtgatctgtcaggtggagaacggtggcaagctgggctcccacaagggaatcaatttgccaggagttccggtagatcttcccagcgtaacggagaaggataagcaggatcttaaatttggggccg

SEQ ID NO: 15593 - DNA, 2084 bp, DROSOPHILA
tctcgtcctcgccgcgtccgattttccatatatcccgattttcgtctcaaacttggaagatatattgccaaaatattgcattcggctagccgctgcgttgtgtgtgttgttgtgcgtggagttgcgtgtgcagttgcaagaagatatagtcgtctatatcgtcagaccgatctcgatcccaagtgcgattcccgttggttacatactacccgttcggtaggcaacaaaatggtgaacgtaaccatctacgatgaggcaccgcagctgaagcccaacgaagtaccccaaaacatggccgcaggagctgatacccaactggagcacatgtgccgtctgcagttcgactcgccagtgccccatgtgcgtctgtccggaatcgtgtgcaccatcggacctgcctccagcagcgtggagatgctggagaagatgatggccaccggcatgaacatcgcgcgcatgaacttctctcacggatcgcacgagtaccatgccgccaccgtggccaatgtgcgccaggcggtgaagaactactcggccaagctgggctacgaacaccccgtggccattgccctggacaccaaggggcccgagatccgtaccggtctgatcggaggcagcggcaccgccgagattgagctgaagaagggcgagaagatcaagctgaccaccaacaaggaattcctggagaagggctctctggagattgtgtacgtggactacgagaacattgtcaatgtggtgaagcccggcaaccgggtgttcgtcgatgacggtctgatctcactgattgtccgcgaggtaggcaaggattccctcacctgcgaggtggagaacggcggctctctgggttcccgcaagggtgtgaacctgccaggcgtgcccgtcgatctgcctgccgtctccgagaaggataagagcgatctgctgttcggtgtggagcaggaagtggacatgatctttgcttcgttcatccgcaacgccgctgctttgaccgagatccgtaaggttcttggcgagaagggcaagaacatcaagatcatttccaagatcgagaaccagcagggcatgcacaacctggacgagatcatcgaggccggtgatggcattatggtggcccgtggagatctgggtattgagattcccgccgagaaggtgttcctcgcccagaaggccatgattgcccgctgcaacaaggctggcaagcctgtgatctgcgccactcagatgttggagtcaatggtgaagaagccacgtcccactcgcgctgagatctctgatgtggccaacgctgtgctcgatggtgctgattgcgtcatgttgtctggtgagaccgccaagggcgagtacccgctggagtgcgtcctgaccatggccaagacctgcaaggaggccgaggctgccctctggcaccagaacctctttaacgacttggttcgcggcgctggtaccatcgatgcctctcacgcggctgccatcgctgccgttgaggctgccaccaaggccaaggcctccgccatcgtggtgatcaccaccagcggcaagtcggccttccaggtgagcaagtaccgcccacgctgccccatcatcgcggtcacccgtttcgcgcagaccgcccgacaggcccatctctaccgtggactggtgccactcatctacaaggagcccggtcttggtgactggctgaaggacgtggacgtgcgcgtgcagttcggtctgcaggtcggaaagaagaacggcttcatcaagaccggcgattccgtcgtggtggttaccggctggaagcagggctccggcttcaccaacaccatccgcattgtcaccgtcgaataaattctgccgctcaggaagtacctggatgcgtcgcagctgccgcgggcgtcgcgttgattactgttaataaccaagttaatttattaattacacaatattcggaatattggaaactgcaggaggctgctggaaccgctgtcagaagcgccgaaggccggcccgggcctcaaacagacacacaaatatactataccattgttgaataatagagatttcttcgaaaattataataaagtcatcactgtatttatgta

SEQ ID NO: 15594 - protein, 533 aa, DROSOPHILA
MVNVTIYDEAPQLKPNEVPQNMAAGADTQLEHMCRLQFDSPVPHVRLSGIVCTIGPASSSVEMLEKMMATGMNIARMNFSHGSHEYHAATVANVRQAVKNYSAKLGYEHPVAIALDTKGPEIRTGLIGGSGTAEIELKKGEKIKLTTNKEFLEKGSLEIVYVDYENIVNVVKPGNRVFVDDGLISLIVREVGKDSLTCEVENGGSLGSRKGVNLPGVPVDLPAVSEKDKSDLLFGVEQEVDMIFASFIRNAAALTEIRKVLGEKGKNIKIISKIENQQGMHNLDEIIEAGDGIMVARGDLGIEIPAEKVFLAQKAMIARCNKAGKPVICATQMLESMVKKPRPTRAEISDVANAVLDGADCVMLSGETAKGEYPLECVLTMAKTCKEAEAALWHQNLFNDLVRGAGTIDASHAAAIAAVEAATKAKASAIVVITTSGKSAFQVSKYRPRCPIIAVTRFAQTARQAHLYRGLVPLIYKEPGLGDWLKDVDVRVQFGLQVGKKNGFIKTGDSVVVVTGWKQGSGFTNTIRIVTVE

SEQ ID NO: 15595 - DNA, 6470 bp, DROSOPHILA
aataacaaataccgtgtaaagagcttttggcaacgaaatttcgcaatctgcgaagagtgtgcgtgccacaaattaaagctgccgcaataatggaataataaatcagcataaatatgcattggatggaagagatagcgaaatgacgtggaaagcgaaaacgataacagaaatcaaaatgcaattcgcatttccttccgttttttttcgagtttcgagctccgctcggcatttgcgcgcatggaaacgcatttggaaatttggagcaattaaatggcaaaacatttacacttgactgcaacgtgatccgaaccgatgtcttcctgaatggttggaatatccatccacctggcgagcggaccaaacccaatccgacccgttgtgggcgacacaaattaacctacagaggcaataaaaatgaaacttcaaaggcggcaagcgctttcgattgggatcaagacgccgccaatctggctgctccactttggcacccggaaaatattttccaaaaaaatgttgccacatacattggcaccactcgtcacctcttttagccgccacaattatgctcttcagtgtatggcattcttttgtggctcccattttgctattacggccaaattgtgatcacttttttatggccaaggtatcggcaaaagaggcggggaatgaaaagtgaaagaagcttacctaataactagctcagggaatgctcttgtcttaactaatattgctcatgtgcacagagaaaaaatagctaaccgattttatagaacaaaataaaagttaattgaaacttataaatattatgcgttccattaataacatgcactataaactaatcataataatattcaataaaacataatacacatattttttataaagttttatatttaacttatattcttctgtgcaatttggttaacaacccctctttagcatttctcgtaaaaaaaactattaagcatttagtttggcctggtgaaacattttcaaacatttactctggcctggcctcacttaggttgggtaaattggccaggaattcacggcgatttgcctcaatggttcgccgttgccaatttccatcgcttggactgctattgaccagtggcccgggtggcggtaatcttgcctccggctcctcgacttgttgagccttctcggcattgttggattgcgccctgtggtattttgaactttcagttttctggggctccgctgtggtggccttggtggtttcttgatccgccggcagttggaagggaactatgggaaaatgctgaggaattagattctgaacagggcgacccttagttggttccttgccctggataacatcgagcaccgctggtttaagcacatccttggtcacatcgatgtggtttaggtcgaggccatgttgctgcttcagctgctgggccacatgatccgccacatgagagacggtcacgttgagatggctctttggatcccaggtgatatttgaaggagcatcggatttgcttctctccactaatatatcaggtctttcggtgggccaaactgatttgactttctcatcgcctgctttaaaaatctgaatctgggccgagtaaccgccatcctctttcgccatatatttggtgacttcaatgcgtccatctggccttgcatacccgtagctaccttgaatgctgccattcacaaatcttttttcttctcgaaactgagagttttgcgtctgcggatcattaatctcatagccaaaggaatatgtgttgggccctataaataaaattttggaataaggaataaggaaactataatattgcataccgtatggctcatgcacgaaatagtttctcactttggctctttctttttcgggtgtaacttcaggctgattgtatacttcgatttttgatgacaatggattggacaatgcggcgtatacttttgtgattaatacgaaaacctacagatggaataaaatgctcagcatatattgaggcgtaaatattgtttgcaaaacgaaaatcgttaataaataaaatgattttgtttctttgtcgtttttggttgatcctccagtcgcatttcatttttccacttcgatttttaattgatcgggatttattgtcatccgaagattaaaaataaaaacagtttttctcttttatataagaaatacattttgattactctaaacaatgattttactaaattcttttattttattcttttttttattttgattccaagtaagatttaatatttgtaagaactttagggaacacattttagagaaatgatcacatttttattgactttcactgccagaacatttaacaaattgagtattgtttttttatgtgcaactaaaaattcctgagcactgaagtaacaatttcaaatcacttacaaagaaccaaaacaaatttgacgaatgtcccatgctgaatttcaatgctgctcgcctgtagatcgatctatcacatttatttcggtgctattattattaatttatttttttttttttgaccgccgagttgcgtgtactttcgatggcgaagacagactgaagaaccaagaacctaaagcgaaatggagaggcccacatagagtgggtgcgaatccccatttggaatacttcaccggaatgctaagttattttcctatttttgctctgctaattattataattattatttttccagcatgctaatcttcacgaccttcgctgtggcttcaaaaaccaacccaaaaaaaacgaaataatcattattttttaaatatgattttttatttatttttttttagtttttttctttctatttccataataacgttttcgcatttcgtttgctgtttgctgctgttgttgttgctgtttttgcatacaaatgtttatggggaatatatagtacataattgtaagactcaaatgaacttttgagacgtgagagacatgtgagagtttgttttttatctttcgtttatcctcctaattgagtacaatttttgttttttttgttgctttttttcgtatgtttttctttgtttgtttataattaagctgcataattcattataaatacacaataaatgtgaaaaatactaaatgcaaaaaatgaaactagatacaaaggtgtcagactgagagtgagtgagtgagagtgagatataaagagagagagaaagagatagtgagtcgttgagtgagtgagacgggtgagagtggaagaaagaggcggaatgaggtcacgaggataacagcggggatttctagagtactagctactaatgcacaatgaccggcccattaccggcaatcttttgccctccaaggacctgttctgctagagatcctatcaaactgtcagcaaatcctgcaatggcacacaatttagcacgcccaccgtggctctcaatggggcgtggcagttaaaggaagctggccacagtttgacagtcatcgcaaaggcttctaaagaagatgatatagaattggaaaatgcatagcacagaagagagatagtcataaatatattacaaaagattagcttgggaaactgaaagaactaagcgtataaataaagttctatgtacagagtgaggagaagtcctaaaagaagcctttgccatccttgaagtacaattttcttggggcattgtgtgcaaaagattttcagtgaaatcggttctggttaatcgtacgtacatacatatacaaacaaataacatatttcgtgtgaaaaacttgtcactccaataccggttgttatcctttgcgcgttcatcatccgcgttcaaatcattccgaatgccaagtcgttatgaatttcagtttgttttcgattcggtttatatccttcgtccttgtgccatgccaggatcagccgggtgccgggacacgccccctaaggcggtccgtgtctactaaactctacgctacgcttacttacaaaagattttcattttcgttgtttgtttgtttgtttttttttttgtgtttttttgtttgtttttctgtttgttgttgttcctatgaagattctggtgtgaatggatgagagcgagagggagagcaccttggtgactaagtcaggctcccgcttcttagtagtgatgcagaaggggggcgtgggccaaaacgggggcggcatgcagcacgggtgcatgggcgatgatcttactgggggcggtcttgtggacgacggcattgaagccattgtggtcgtcggcggtgtagtcaacggtgcgcaccgaaccatcgggctcaaccagggagtactggcctgaaaaaggattcagtgaaatgggtcagcacagtaaacacatttcgcaagtttaggtcatagctacaactggtaagctatctcaataaaacattatttgttttcgcatttaaatgtcttaattatgtttcaactaacaatgtctagtctcttgtgaaagtctttatataactaatatattaacttcttaaaatgtttatagagttttgaactaaaatgttaagaatcacgttcttttcatatgtagttttttattcaagttcgttgcttaagtctttcgtttgttaggataaaaatgaagttaaaaattcccttctgcaatccgctgactgcgttactttgccttcagtgcgattttctgcctaagtctttcgatttataaaggagttcaggatatttcgactttcaggaaagattataccgatcatttgtggttattaaccaattgaaaactcacccttcaccacatcgccgtcgcgctcctcggcctgcgacttgatgtcgccggtgtggggatccttaatgccgtagttgaaggagtacttgggataggccaccggctcggcgtggacggcatggacggcgtgcgacaggactggcgcatgatgcaccagcgcaggggcgtagtggcccagctcgatgggaacagcctgagcggcggcgaacagcagagcgatggcaacgaagtactagggggtaaggagaagtgagcatcaggatcggtggaatcactggggtgcttgtgggggtctatggttgattgggggtctatggttgattggagggggcagggggttggagcacacaccttcattttaattatcgagcacgaacggcaaacggacacacggcgcgaacacgtagctaaaaacaaggacgaaggacgactggacgctgaatcctgtagaggaggctgtaaggagtgagctcgagtaagtgaggaccgttaagagcacgaaatcgttagctgaactgatgtctgcaacgatgaccaaaagtatttatatacgcgtcgctcgccgacgactgcagcccgatcaacgacgactggaacgaacgaacgatggcgttgcagctgtgccaccggtgggtggtgttggtggtattggtggtgctggtggtgctggcggtgccgggggagctggatgccagttggcagcggagcagtgctgcactaccataccacgcatgtgccacaacaatgatcccctaattcccccttcaaaaatctgtagctaggtgcggcatttgtttttcgacctgagaaggcgttcgttcggtgacttagtttcttagtttcgctgactgtttgtctgcctctcgctgatgacggcgctgcaattgaaagcgacacttttgcattggctctaatgatctaagctttttatttattgatttgccgacataattacgatcgtttcgagtccgcacaagttggccgaaaaaatattattaccatatctgtggcaatcaaacggggcgtcgttataattaccacgacaacaccaacaaaaccaaaaccaacttgcgtagttttcgggccacgcaatttgttgcctgacatttttgcgaccgatttcagtttgttattttcacgatctggagaactgtgtgcggaatttcggtgttggcaaatagtttgacatgcctaagcaaatcaaacgcggctcaatcaataattttcggagtcatgagacaaatgtttgtatagattgtaggggaatgtatataaacattgtattaaaaatgaggctagatataatttatttatgatctaagctgtctttctttaaactggaatttgtgacccagattccagaaaatataattaagtgtatatgatgatgcttagcagtgactaatattttgtaattaaaaagatcctccaccaatcttggcaattaacataatatttaacactaaactaactaagtattatagctttaactcctcctcattttacgcttgctaaactcccaagcaactcttttttgacacttttttaggcaacacccacaacaagcagtcaaccgctctggcatgacatatcagaaaattatgattgtatcttataaaacacacacaagtggccattaaatagagacaaacagccaatggtttggggagggggggattcgcaaagaggagacggcctgaagtctgagaaaacgatgggaaaaaagaccccat

SEQ ID NO: 15596 - DNA, 1233 bp, DROSOPHILA
atgcgtggtatggtagtgcagcactgctccgctgccaactggcatccagctcccccggcaccgccagcaccaccagcaccaccaataccaccaacaccacccaccggtggcacagctgcaacgccatcgttctacttcgttgccatcgctctgctgttcgccgccgctcaggctgttcccatcgagctgggccactacgcccctgcgctggtgcatcatgcgccagtcctgtcgcacgccgtccatgccgtccacgccgagccggtggcctatcccaagtactccttcaactacggcattaaggatccccacaccggcgacatcaagtcgcaggccgaggagcgcgacggcgatgtggtgaagggccagtactccctggttgagcccgatggttcggtgcgcaccgttgactacaccgccgacgaccacaatggcttcaatgccgtcgtccacaagaccgcccccaggcccaacacatattcctttggctatgagattaatgatccgcagacgcaaaactctcagtttcgagaagaaaaaagatttgtgaatggcagcattcaaggtagctacgggtatgcaaggccagatggacgcattgaagtcaccaaatatatggcgaaagaggatggcggttactcggcccagattcagatttttaaagcaggcgatgagaaagtcaaatcagtttggcccaccgaaagacctgatatattagtggagagaagcaaatccgatgctccttcaaatatcacctgggatccaaagagccatctcaacgtgaccgtctctcatgtggcggatcatgtggcccagcagctgaagcagcaacatggcctcgacctaaaccacatcgatgtgaccaaggatgtgcttaaaccagcggtgctcgatgttatccagggcaaggaaccaactaagggtcgccctgttcagaatctaattcctcagcattttcccatagttcccttccaactgccggcggatcaagaaaccaccaaggccaccacagcggagccccagaaaactgaaagttcaaaataccacagggcgcaatccaacaatgccgagaaggctcaacaagtcgaggagccggaggcaagattaccgccacccgggccactggtcaatagcagtccaagcgatggaaattggcaacggcgaaccattgaggcaaatcgccgtgaattcctggccaatttacccaacctaagtgaggccaggccagagtaa

SEQ ID NO: 15597 - protein, 410 aa, DROSOPHILA
MRGMVVQHCSAANWHPAPPAPPAPPAPPIPPTPPTGGTAATPSFYFVAIALLFAAAQAVPIELGHYAPALVHHAPVLSHAVHAVHAEPVAYPKYSFNYGIKDPHTGDIKSQAEERDGDVVKGQYSLVEPDGSVRTVDYTADDHNGFNAVVHKTAPRPNTYSFGYEINDPQTQNSQFREEKRFVNGSIQGSYGYARPDGRIEVTKYMAKEDGGYSAQIQIFKAGDEKVKSVWPTERPDILVERSKSDAPSNITWDPKSHLNVTVSHVADHVAQQLKQQHGLDLNHIDVTKDVLKPAVLDVIQGKEPTKGRPVQNLIPQHFPIVPFQLPADQETTKATTAEPQKTESSKYHRAQSNNAEKAQQVEEPEARLPPPGPLVNSSPSDGNWQRRTIEANRREFLANLPNLSEARPE

SEQ ID NO: 15598 - DNA, 4816 bp, DROSOPHILA
gatacacttcccaccctggagtcgagtgagcgcatcaagaaggtcgagacccagaacaggaacaccaaagtggtcatctactttgattacctggacagaagggaggtgtgtcccaccctgcacgcttacaagacggtcaaggttacaaaacatcgaccggtggcagtggtcatgtacgactactatgacagcggtaggattgacaaattgaacaaatatcattaacctttgattaatttatcaatttacccttgatatacagctcgccgtgccagacagttctacagggcacccaaatccaatatctgtgacatttgcgagcacgccaactgcggtgacctatgcgaaaaggccgagaagcgcgagtccaagcgacctgatgactacacggcgatagcgggtcatagttcagggtcaagacacacagccattccactggcatctgtggttatggttctgtcgatgcttttgaaaacccttagctgttagacgatactgttaccgccacttaacgtggaaccaatatggaaatcgaagctttaacaacacccactcacatagtccctaagttagcctaatgaatgccgtgaactaaacctgttctaagtacatctaacgatgctaaagtgttgccaataaagtgttataacgtttactaaaaccagagcgcaatgtttgaattgggaaaaatcaagctatgaaaatccttactttgttttctatcgatatatttatgtgaaacattacgtaaagttacatttcttttgacaagtgtattatttacctcttcatatgcgtttgccagatgtaaaactcatacgctctgttgtactcgagtgctttaaacatgctcctctcttgacagaaacaaactcatgttcactcgctcgtttatttttgacagcatcaaataaaaagtgtaaaaatagatctattatttctcaaatccctgttggctttagttcagtatggtaaattcgaagttcaggcttgagtgacaatggcgaataatcagcccccgacaacgaatgctacgcgtaaagataagcgcatagagcgggacgagaaccgtggccaatggaagagcaagtcggagtttatcctctcgctccttggatatgccattggcattggcaatgtgtggcgatttccctatctctgctaccgcagtggcggcggtaagtcaccattaattcgcccacatagccacctgttcacccacttgagacaaccgaaccaaccgaaccaacaaccacccacccatctcgtccagcatatcgatgggtgagctcaagctctggccgctcccgaaatagcgcagcactgacgtcagtactgaacgagagttctgcactgagtggcgatgtttatttttaggctttagctttcgagtgaaagctggcaaagctccagcacacatgagggccatttggccgaccaaatagcgacgccttcgatagctcagttggtagagcggtggactgtagagtttccgaggcttggtgatgcgagcagaggcaggactctgggccaaacaataccatggccccagatagcgcttgctcttgtttcatcagttagtgaatcgcgatatgttgaaatccataggtcgctggttcaaatccggctcgaaggatattattttgggttttcttccgttttctttgtcggtttcttactctaaaaactcttgtttatctgaccaattgaagtgtatcgcgaaaacctgtaaatcgtttaatgagatgtagatgtagatttgtgaaaatgtgtatttaagcacatgacttttctccttttttttagccgcctttctgattccctacctgttgatggtaattttagccggcatacccctgttttatatggaaattctgatcggtcagttctcgagcaccggatgcactggcatgtttcgcatgacgcctctgctgaagggaacgggaatcgctcaggtggtggtcaatgcctactgcgtgtgctactactcggtgatcatatcgtatcccattcggatgatcttctactgtttcttcaagaaggtgccctgggaggactgttccaattcatggaataccgacgactgtgtaaccgcgtctgacgtaagcatacttattacaataagcatatgtataaatcagtattttcgattcttagatgggaaagcaaaatagtagtgatgtgttcaaaacttccgccgatgaattcttccagtaggtgctatgaatagctatgaatttcattccattgacatttaatataaaatttccttttgcagcttggaagtacttagaatctcaacagacatctccgacttgggtggcatggtatgggaacaattaactgccttgattatcacatggattattatttacttctgcctaatgcgaggaattaagtcggtatgttttttcgaacaacgtaaggactcataatgctctagcccatgaaattcaggttggcaaggttgtgtactttacagtccccttcccttacttgctgctcttcattctgctcatcagaggagccactttgcccggagcctggaaaggcataaagttctacctgtatccggagtggcaccgcttgctggacctcaaagtctgggccgatgctgccgtccagatgttctttggcataggtcccggctggggtggtatcgtcaacatggccagtttcagtagctttcgaaataacgccaagtgcgactcggttctcatagtatcgatcaatgtgttcaccagcttattggccggatttgtggtcttctccgtgttgggttttctctctggtaagaatttgttattcgtttgctcacagttgcgtttgttaagcggtcgtttatttaaagaaaaatcgggcatacccgtggaatcggtggccaccggaggagctggactggccttcgtcacgtatccggaggccattgccttgctgcctgtcccgcagctctgggcgctcatgtttttctttatgctctttttgctgggcatcgacagtgtggtaagtagtgttttgcaaatttcgatgaatttcatgagattcagctaactcctgttctcatccaaagtttgtacaactggaggccatcatgtcatcgatattggatgagtggtattgggtgagaagtcacaagtgcaaactaacgctcatttcgtgcttaatctttctcggactctcgtcaataatgtgcacaaatgtgagtagttctagatatgtatgtcctctactaattttctattcactaatttcagggcggcatgtttattcttcagctgtttgactggtactcctcggcgatagccgtaattgtcatttgcctggtggagattattatggtcgcctggatttatggcataaaaaatttcatgttagatgtcgagtttatgctcggaaaacggccaactctatattggagaatcgtgtggcaggtcgtcacacctgtcattataattgtaagaagctttcactctagttttgaccgacgatataagcctaatgagaaacattcagtttattcttataactagcattgtattcataaggacaatcacctataataacatcccgtatcctcagtgggccattataatcggctgggccagttgttttacatcagttatgtggataccgctctacatattctatatcatgatccgtaagcgggccacactatgtgacagcctaaagaaacgcctaaaacctttggactggacacctgcggatccacaagatcgtgcagaatacgaggccttccggaggcaacgccgaatgccgggatttatgtctgacacggacatggagagctcgaagtagattaatatgtatacgtacattttttatttgtaaccaatttacaaaatttttacgcataaagattaaatattttggaacaagggtacaaagagaaaatacaatagtctatttaagccaattatagtaaataaaatgacgatacttaaaagcaacaataattgaaaatttatattaatatatatcggatccataatataaataaagttccaaagagtttcagttttgttcaaatatttgcatatattaatatttcccctagttcacctcttcgataccattgaaaagatggtcggtcatctcaatatttccgacacgatccccgtaatgctgacgatgtttcatctcaaccggataccaatctgtgggtcggcaggagcgctttagacgctccaaaaaggtgccaggactctgtctcaggtagtaaaatccataaccaggtattgccaaaaagggcaacacgacaagtataatgcctagtacgaggaacacttccttaaagaagaagtgaactcgtatgcactcgattatgcccaatatctaaaaggaaaagctataaatacagttctataaaattaaaagtccataacaaaccatgcatattaaaaatactattggagctgtatagcgaagtataaaaaccttccaggaggcaaagggctggcccaacataaactcaatatcccgctggaagcgtttttggccatagatccacaacacaaccaaaagtaacagtaagtgcagcaaactgtgtgctaatataacatcaatacccaaaatggcgaagtaaaagctaccatgctaagatataacgaaatttaaagtttttttgcctttatgaaattttttatattgaatacttacttcggtgcaaaagaaaaaggagcagattgcaagaccacaaattatgccaaaagttacttcctgttttctttctttaagcttttcaaactcgtcaaataaactttgcaagactgtaaagagttgagttgcctgcaaaatt

SEQ ID NO: 15599 - DNA, 1575 bp, DROSOPHILA
atggcgaataatcagcccccgacaacgaatgctacgcgtaaagataagcgcatagagcgggacgagaaccgtggccaatggaagagcaagtcggagtttatcctctcgctccttggatatgccattggcattggcaatgtgtggcgatttccctatctctgctaccgcagtggcggcgccgcctttctgattccctacctgttgatggtaattttagccggcatacccctgttttatatggaaattctgatcggtcagttctcgagcaccggatgcactggcatgtttcgcatgacgcctctgctgaagggaacgggaatcgctcaggtggtggtcaatgcctactgcgtgtgctactactcggtgatcatatcgtatcccattcggatgatcttctactgtttcttcaagaaggtgccctgggaggactgttccaattcatggaataccgacgactgtgtaaccgcgtctgacgaattaagtcggtatgttttttcgaacaacgtaaggactcataatgctctagcccatgaaattcaggttggcaaggttgtgtactttacagtccccttcccttacttgctgctcttcattctgctcatcagaggagccactttgcccggagcctggaaaggcataaagttctacctgtatccggagtggcaccgcttgctggacctcaaagtctgggccgatgctgccgtccagatgttctttggcataggtcccggctggggtggtatcgtcaacatggccagtttcagtagctttcgaaataacgccaagtgcgactcggttctcatagtatcgatcaatgtgttcaccagcttattggccggatttgtggtcttctccgtgttgggttttctctctggtaagaatttgttattcgtttgctcacagttgcgtttgttaagcggtcgtttatttaaagaaaaatcgggcatacccgtggaatcggtggccaccggaggagctggactggccttcgtcacgtatccggaggccattgccttgctgcctgtcccgcagctctgggcgctcatgtttttctttatgctctttttgctgggcatcgacagtgtgtttgtacaactggaggccatcatgtcatcgatattggatgagtggtattggggcggcatgtttattcttcagctgtttgactggtactcctcggcgatagccgtaattgtcatttgcctggtggagattattatggtcgcctggatttatggcataaaaaatttcatgttagatgtcgagtttatgctcggaaaacggccaactctatattggagaatcgtgtggcaggtcgtcacacctgtcattataatttgggccattataatcggctgggccagttgttttacatcagttatgtggataccgctctacatattctatatcatgatccgtaagcgggccacactatgtgacagcctaaagaaacgcctaaaacctttggactggacacctgcggatccacaagatcgtgcagaatacgaggccttccggaggcaacgccgaatgccgggatttatgtctgacacggacatggagagctcgaagtag

SEQ ID NO: 15600 - protein, 524 aa, DROSOPHILA
MANNQPPTTNATRKDKRIERDENRGQWKSKSEFILSLLGYAIGIGNVWRFPYLCYRSGGAAFLIPYLLMVILAGIPLFYMEILIGQFSSTGCTGMFRMTPLLKGTGIAQVVVNAYCVCYYSVIISYPIRMIFYCFFKKVPWEDCSNSWNTDDCVTASDELSRYVFSNNVRTHNALAHEIQVGKVVYFTVPFPYLLLFILLIRGATLPGAWKGIKFYLYPEWHRLLDLKVWADAAVQMFFGIGPGWGGIVNMASFSSFRNNAKCDSVLIVSINVFTSLLAGFVVFSVLGFLSGKNLLFVCSQLRLLSGRLFKEKSGIPVESVATGGAGLAFVTYPEAIALLPVPQLWALMFFFMLFLLGIDSVFVQLEAIMSSILDEWYWGGMFILQLFDWYSSAIAVIVICLVEIIMVAWIYGIKNFMLDVEFMLGKRPTLYWRIVWQVVTPVIIIWAIIIGWASCFTSVMWIPLYIFYIMIRKRATLCDSLKKRLKPLDWTPADPQDRAEYEAFRRQRRMPGFMSDTDMESSK

SEQ ID NO: 15601 - DNA, 9102 bp, DROSOPHILA
cttttccatcgtctgtctttacgagacgtgctaattgcaattggtaactaaatgtgtatttcccgcgactccaccctccagttcgatgcctatctgcgatctctgtcgctccacgatacggagatcaagctggtcacagacggccagctgcccctgaggcagtgcctccatcgggaggccagtgccaaggatgtggagctaccggcgtactacaaccgcttcagcgatctgcgcaaggagttcctgcgctacaagtccggcgaccttgcccgcgccctcgttcccgtcaaggatgtgaagaagatgctccaggcgccaacgctgcccatgccccagtccattgccgagatgctgggaggtatgttgcaatcgtttcaaatccttgatttaaaatgcaaaatgcttgttttgcataatctttaataattgttaccgaatgcatattaagttaatatgagttttaattaagctttgctcataaaacgattactatttgcctggtttgattaactgaacacggtttaaattagtttttattactttccccgcaacagaacttaatatttcatccgttgaggacaacgacttttacattcgcgaatcccgcgacatggtcactgtgatccagacgctgctccaggcaggtaagttatataaagttggcactttatctctgaattgttggggagttatttttacaggtcacaaatttgctgcaaacgaattggtcaacctggtactagaacctggaatttggtgagtttgtagtagtttgtgtttgggattcgtctgaactggttccccaaaacccaagtcgactcaagcccctctcagctgatccaagcactatttcgagtgggaataactcactcaaagaactcaaaacgatcgccaagcccaccaagaaatcactcgaaaactgtgacagtggaagaaggccccaacaaatccgagctgggagcgtcgctttcgtcagtcttcgtttggattgggaggcgataagagctcgatcgtagagccacatagctatagtgtttccacgggatcggttctcagccgatggcatcgtgtggtatcgggtggcattgtaacggatcagaggcaacgtgaatgcacggctcttgttatcgccagatcgcctggaaatattgaactacctacggctcctagagattggggtctgttttctttttttttttttttggttccaatcactataaaagtttcaattagcaagcgacagaggtaacccccttcccggaatggcaattttctgaaactccttgctgtgtccaagtctgccaagtctgattattcatgttttttatttgttcgcgctgctcgttgggttttattttcttgttgtatttttttttttgtatttttgcttggcccatttatgcatgacattctgttttatttgtgcgagtgtgtgtttgcgggagagtcagcagaaatgtttatgcgacttggtaatcgtcaagaactttggttgcacatcggaacgtgactgcgacgcctttttctccttgcccaagagctgggcccattacgtgttgcataaccccctgattcgggataggtggtttttcaaaaacaccatgcttacggattttccccattttcctccacagctccatagacgacgaagtcgacggtaactgcatcgtaagggccagaggattgccctggcagagcagcgaccaggacattgccaagttcttccgcggcctcaacgtagccaagtgagtaatatgtggagtattgcccaggccatcccattgataagacagttcaggggtcggccgtgtcgagattacgagcgacccactttatcaatctacccacccgctaaccgctccccttcttcgaattccagaggcggcgtggccctctgtctttctccgctcggtcgtcgtaacggcgaggctttgatacgctttgtatgccaggagcatcgcgacatggcgcttaagcggcacaagcaccacatcggcacccgctacatcgaggtgtaccgggcatcgggggaggattttctggccattgccggcggagcctccaatgaggcgcaagccttcctttcgaagggcgcccaggtgatcattcgcatgcggggattaccatacgacgccaccgccaagcaagtggtaagtacaggcagctgcccaggagttcattttcattctacctctggatgcgacaaatccatatgcagtttaaagaagaattattaaaactcatgctaattttataattacccctttcagctggacttcttcaccactggggatactccgccctgccatgttcttgacgggaatgagggcgtgctgttcgttaagaagccggatggacgggccacgggtgatgccttcgtgctattcgcaaacgagacggatgcgcccaaggcgctgggccggcaccgtgaatccattgggcagcggtacattgagctattccgttccacgaccgccgaggtgcagcaggtgctcaaccggtcgatggaccccaagaactatgagtcgggcggtgggcacagccagccgccgttgattgcccaactgcccacgatgcagctgccgctgctgccgcaggtgggtgcccacagcctcagccacagcctcggagccagccccgctaacctgtgcccccccgtgccacctcccgctctccctctccccacacagcacctcatcacctcgggcaccaccaagaactgcatccgactgcgcggactgccctacgaggcgatggtcgagcacattctgcatttcctcgatgactttgcaaagcacatcatttatcaaggtgtccatatggttatcaatgcacaggttagtttgctttaatagtatattaagtagtatatttaaccctttgttcttgatcttgtagggccagccaagcggtgaggcctttatccagatggacttggaggagtcagcgcgtctgtgtgctcagcgcaggcacaaccattatatgatgttcggcaagaagtatcggtacatcgaggtgttccagtgttccggggacgacatgaacatggtcctcaacggaggtctggcctcaccggtggcacaaccaccgccgcctcaccttggccacgctcacaagcagcaatcactgctggccgccactacgggtatgttcagttcggcgggtcagtcgccgacgaccgtagccgccggtaccgctcagtcgccgctgggcggcactcatacacacactcacccgcactctcatgcgcatgcgcacgccacgggccacgcccatgcggcagccgccgccgcccaccacggattgtccgcctcatcggctatgttgccgggactttcggctgccgcttccgcatccggtttggcctccttcatgtcagctggtcagcagtcggcagctgcagctgctcattccgctgcttcgttgcaaaatgccgcggtggccttggcacctcagggttacgccctcaatcctttctcgctgccgccgccaggatctgcggctgctgcagcagcttccacacccgccctgctggcccaacaacaggctcagttcatagcccagcaaagtttgttggtgcgacagcaggctgcagctgctgccttggccgctgaacagcagcagcaacaacagcagcagcaacagctctatgccagtgcaatgctgcaacagcatccgctgtacctgcaacagcagcagcaacaacagcaactctatgccagtgccatgttgcaacaaggtcagccgcaattcgtgctcatgcagaggccttcggccgcctacctgccgccctttccgctcagctatatgtcagcagcgggggcggcatcgggcgttggagtggcgccaggagcagcagttgctggagcggcagcagccgcatcgccttccgccagcaactcctcgctgagtcaatcgatgaagcgctcgtacgagaacgcctttcagcaggaggcagccggagcggcagcggcggccagtgctgctaagcgggccttaacccggcagcccagcagtgtttactcgtactataattcgggaatctagaacctagatccgacaaaacctgaaataagagctccacctccagcacttcgggcacattccgcgagtgggtggggcgttcatataataccctacattaaggcgcacacataaccatatcatgtatcatcatggccacactcacacacaacgcataccaggcattctctagagcttaataattaccgatttggattgtagacttaagtacttttcttgtatggagtactcgtagtagcctaagcatacttgtctatggtctaagcgaatcatacttactataattaatatacaacgatacacacacacgcgggcactcacacacacacgcacacacaccagaaagcactgctcacccatacacgcataagtagttcagctaacagagggcattttggaaatgatcaaggtatcctgatcaattaagcattccataacaatggacttatatttgtttatttcgatgtatgcttggtgtgtgtgtgcgtgcgcgcgtgttttttaggggcaggagaacgtatatatcttgagattatatatatatatctcctcgactgtccccctattcgaaggcaatcaacagaggctaacgtggttcaatggggcagggagttcttattggtggctcggtggccaccaagctcatttagtgcaatctaattttagtgtttaccctttgtaatcctgtttataatatagccacttggcgcccgccataagatcccctccctccgtgaaccacgtcaggtgttggctcaagcgcaaattaaaactgaattttgagacgaaaatcgaaacccgcaactgtttacgggataacacgagtaaagcgaatatcacgaaaccctgttttgttagacaaacgatttggattaaccatcgatgggtggagttgcgtgcctatcgacttatgcatatttatatacctacatttatacacgctagccttaagtttgtgcgatttgtgaaatgggattgcattttaattctagcggcgatcttttcccgtgtctctccatggcagctaacaatcaattattaataatctcatcgtctgacttgcaatatcgtacaccctataaatacatagtgcctagatctatggtgtagctcttaagtgtgcgtaactggtgttagtcgcaaatgggatagttctctctactatatcactctctacctcttgatatcaatacctctcactgtttgtgtgttctctgtcatcactaatttattcgggatcagctagatctatagtctaaagcttgttgtaagttgcggcgctttagtgtctatatacatatatagtgtgactagtctacataatcggataactgataactggttactggtgactcgggcttacaatcctgcaaattgctcgttagctttaagactgtcttaactcttgagaagtaactattttgaaacgatatgataatgagaagtcaaccaaattataatatacaattcggcgtagctcactaggtatttagaaatctgcaatatatgataaggaacatctcgtgagttaagataggaattcagttaatgagcattttgttcaattcttacacaaacaggagcttttgtcagcgtctttcggattccgaattccccaacctaccgaatcccccaaaaccaaaatccatatatccacctctgtcttctcctgctgcgtctaacactaagtttcgctcggcttgggaagatcgagcttagcgagggaaaggcatgggaaagatagtctgcgcctggcctaatccttagcctaatttaacctttagtcttacgtagaatggcaatcaagtggcttccgagcgggttaaacggccactttaaagaaacaacacataatcaattgtatctacttaactagtttgtacgcacagcagttttaatgttttttggaaattttacgatttttgatattccattcttttttaccactagatgttagtaaaaaaatctttgattaattttttacatcaataaaatacgacatatcgcctaaactaagcccgctctctctctctatctctctctctcacacactgtcaccatccctttcgctcctttgtgtgttgcccgatgagtagaggattattcctagacctactaataagcaatatgatatcataatgggttaaactccttactaacactgatgcccccaaaaccgagaagagaaccagtccatccaagatccctatccttattccttgcccgcacactcttccaccattcacccacctatatgtacatgtaactgggatatagggcttgggctaagctttacactcgatcgcgatttcagcgcctcgtccaagggccaaaacgctgggagtggatatccggaatcggcatttggagtttgtttggtttttgtttccgtcactgttctagccacataaatactatcgtaactctaagtggaatgtccatcgtacatcgtactagtcatagtcgcatcctgtatgtaactcgacgcagtttgttccttcgggcgcattctatataatcaattacggcctgcgagggcctggtgcttggattaaacaaaacaatcgaacgaaacatcaaaccaaaacgaaaacaaaaaaaaaaaaaaaacaaaagaaactgaaaacaaatttaaatttccaaaacaatcggccaaacatgttcaaaatttgtactcgtacttgtgcgcaactgtttcatggtctctgggtgaggtggtaagatactcgttccaaaaataccaactatatatgtctctcctaccatttgcaatgtctaaacggtgagtgatttgaatacaattttgcccctactaatcgactaaactaactggccaattaattacggagataagatcactaattaacctagtaacaactaaaacgtgaggttgagccacaaaccatgaaagtgagtggctaaattatccgcataagtaaacctacagaagctgagaagtttggctaatgtacaccagtaaacccacgcatatatacctttatatcttgtatatgtctgctgacccctcgtccttccccttcaacaagcaaatgccatactcacaacacttattaccctagagttcccagagtgaaacccgaccctgttctgtttaggaaccccttcagtcgatgaacatttcagcggaataatactctttatttattttcaattaggtgccaccgtgctaggcgcccactatggcggtccctttccggcctacggagcggccccgccaccaccgccgccgcacacgcccctgctggccacgccccgatcgcaccatcatccgcaccaccatccggcgtccgcattttacccggcgccgctcgtctactggccctacccgagtccgcctgtctcgcccaccacgtactacagccagccgggggcgcactcgccctcacaagccatggtaagagccacacgccccacgagttacactacctgataagctgaaaaatttgcgcctctagatatagaaaattatattataaattaaagaagcaaatggaaccatggattccccttcacagaattttatagaaatgcaatgtatttaaagcccagtaattatctttaaaacaaacattaaaatgttaacatatttctgtatgttgtagtatccgctggacttctttccaccttcgccgctttcgccgcccaatgtgtccattccgaacacaagtactggcctgatactcacgcccaccaaagcggccgtctcctttgtgccgcccaagcagttttcgccttcttcgaccggaagcggaagtcccagctccagttccgttaagttggccggtcaggcgggaccagcgcatatgccatcgatcgctgtgaatggaaagacggagggcgtcacatccacaggagcaaaggacacatcgacgcctcaagagacctctgcatcacaaacgctgctcagcatagacacgaaccatgccacacccacaacagccgctgcgcccccgctgaagacgggtagtcaggggtcggcgggggcagctgccacgccccttgtgaccaactcctgcgtggaactatacatctcgtagagaagcgaacgaaaagccgagctttttttcttgccaatcgaagaaacctatctgttagtctagtttagaaccacacgcccccccgcaatctagccgagtctcacacctgcgtggtgagtttcgatggcggcgaaacaaaactcgaagttttaaatttgaaaacggcacgagcagcaaagcaatgctatctcgccgccgcctcatgaatttctatatcagataatccgctagtgctaagtagttaggctgcccagtgcaactcattcgatgttatatttattccgctgctgcattgcattctatccaaatatacacattagccaattagcaaagaatcgaagcaaatacgacaaatttatccctagtcaatagaaaaattatttatacaattatctatttgtaaacgcatgttaatgttatcgaagtcagcgattttccatgtttttatccgtaggctacaccatcaaatattgttattatccttgtgcactcccagaaaacaacaaaaaaaaaaccaaaaaagataaaaaacatcagaaaacaaacgtcgtccccatttgtaatctgttttgtttgttagcccattcgcaatgaaaagatattatcgtttgtttaaattaaatatatacaaataaattttatttgaaatgcatagtcgtggtatatagattaacagcgttggggttagcggcttaacattaattccggaacaggatgcaattacgaatcaattaatgccactatcgatggacggcaggtgcaagacagcatcataaataattctcgaaacggacactgataaatcgttgacaaatggcgttacaaacggacgaaagtcccaccgacccgtttaaatgacacggtcgttgtgaaccatcatccggtcgcaccgtaccattaccatggtctcgtatcacatttaaaatagattaaaaattgtcgcaggtgaacgggttagttctatgcagcatcatttgctgcagctgccagccgcatcctg

SEQ ID NO: 15602 - DNA, 2115 bp, DROSOPHILA
aagagctcgatcgtagagccacatagctatagtgtttccacgggatcggttctcagccgatggcatcgtgtggtatcgggtggcattgtaacggatcagaggcaacgtgaatgcacggctcttgttatcgccagatcgcctggaaatattgaactacctacggctcctagagattggggtctgttttctttttttttttttttggttccaatcactataaaagtttcaattagcaagcgacagagctccatagacgacgaagtcgacggtaactgcatcgtaagggccagaggattgccctggcagagcagcgaccaggacattgccaagttcttccgcggcctcaacgtagccaaaggcggcgtggccctctgtctttctccgctcggtcgtcgtaacggcgaggctttgatacgctttgtatgccaggagcatcgcgacatggcgcttaagcggcacaagcaccacatcggcacccgctacatcgaggtgtaccgggcatcgggggaggattttctggccattgccggcggagcctccaatgaggcgcaagccttcctttcgaagggcgcccaggtgatcattcgcatgcggggattaccatacgacgccaccgccaagcaagtgctggacttcttcaccactggggatactccgccctgccatgttcttgacgggaatgagggcgtgctgttcgttaagaagccggatggacgggccacgggtgatgccttcgtgctattcgcaaacgagacggatgcgcccaaggcgctgggccggcaccgtgaatccattgggcagcggtacattgagctattccgttccacgaccgccgaggtgcagcaggtgctcaaccggtcgatggaccccaagaactatgagtcgggcggtgggcacagccagccgccgttgattgcccaactgcccacgatgcagctgccgctgctgccgcaggtgggtgcccacagcctcagccacagcctcggagccagccccgctaacctgtgcccccccgtgccacctcccgctctccctctccccacacagcacctcatcacctcgggcaccaccaagaactgcatccgactgcgcggactgccctacgaggcgatggtcgagcacattctgcatttcctcgatgactttgcaaagcacatcatttatcaaggtgtccatatggttatcaatgcacagggccagccaagcggtgaggcctttatccagatggacttggaggagtcagcgcgtctgtgtgctcagcgcaggcacaaccattatatgatgttcggcaagaagtatcggtacatcgaggtgttccagtgttccggggacgacatgaacatggtcctcaacggaggtctggcctcaccggtggcacaaccaccgccgcctcaccttggccacgctcacaagcagcaatcactgctggccgccactacgggtgccaccgtgctaggcgcccactatggcggtccctttccggcctacggagcggccccgccaccaccgccgccgcacacgcccctgctggccacgccccgatcgcaccatcatccgcaccaccatccggcgtccgcattttacccggcgccgctcgtctactggccctacccgagtccgcctgtctcgcccaccacgtactacagccagccgggggcgcactcgccctcacaagccatgtatccgctggacttctttccaccttcgccgctttcgccgcccaatgtgtccattccgaacacaagtactggcctgatactcacgcccaccaaagcggccgtctcctttgtgccgcccaagcagttttcgccttcttcgaccggaagcggaagtcccagctccagttccgttaagttggccggtcaggcgggaccagcgcatatgccatcgatcgctgtgaatggaaagacggagggcgtcacatccacaggagcaaaggacacatcgacgcctcaagagacctctgcatcacaaacgctgctcagcatagacacgaaccatgccacacccacaacagccgctgcgcccccgctgaagacgggtagtcaggggtcggcgggggcagctgccacgccccttgtgaccaactcctgcgtggaactatacatctcgtag

SEQ ID NO: 15603 - protein, 557 aa, DROSOPHILA
MALKRHKHHIGTRYIEVYRASGEDFLAIAGGASNEAQAFLSKGAQVIIRMRGLPYDATAKQVLDFFTTGDTPPCHVLDGNEGVLFVKKPDGRATGDAFVLFANETDAPKALGRHRESIGQRYIELFRSTTAEVQQVLNRSMDPKNYESGGGHSQPPLIAQLPTMQLPLLPQVGAHSLSHSLGASPANLCPPVPPPALPLPTQHLITSGTTKNCIRLRGLPYEAMVEHILHFLDDFAKHIIYQGVHMVINAQGQPSGEAFIQMDLEESARLCAQRRHNHYMMFGKKYRYIEVFQCSGDDMNMVLNGGLASPVAQPPPPHLGHAHKQQSLLAATTGATVLGAHYGGPFPAYGAAPPPPPPHTPLLATPRSHHHPHHHPASAFYPAPLVYWPYPSPPVSPTTYYSQPGAHSPSQAMYPLDFFPPSPLSPPNVSIPNTSTGLILTPTKAAVSFVPPKQFSPSSTGSGSPSSSSVKLAGQAGPAHMPSIAVNGKTEGVTSTGAKDTSTPQETSASQTLLSIDTNHATPTTAAAPPLKTGSQGSAGAAATPLVTNSCVELYIS

SEQ ID NO: 15604 - DNA, 2751 bp, DROSOPHILA
gtactccacgtagtacttcatcttcatcttgacgctatagccctcgttgtcctcgccgcacttgaacttctggttgcgatacttcttggccaggcgggctagtgtccacttttccagcgccaaccagccatcggtgcagccgcgaatgaccaccggcttgtagggtcgctcgaagcgttcgatgaactccgactccggcacctgcgactcctcgatccgctccaggttatcggtgaaatcccaaaatggctcgaacttctcacagtaccgcatggccgaccaggcattctcgccgtccagctccggacgagccttgcgcttcacctcacgtgtgcgcttgcgggaacgcttgggcagcttgaattcctcgctcatcctgctgaaattggccaattttccacagctcctggaaattaaagcagcgtgagtgcagtgtggccagacgccgcaggttcgaacatgctgaaaacgcgacgcgggaccgcacctggtcactcagctggtcgccagacaagcactcctttactggttttatcagatgtttaccgagtaaacggacattttcaaaacatttcattattaaagaattgtacacaggtccagtatgaaccagcccatacataaaagaacctaaatggtagtagtgcgctactaccccatgttccccatgttccaaactcaaccgttcccccaccaacgctcacttaaatttaaccctcgcgagtgtaagttgtattttcattgagagccagggctgcaagactttaaggtgaccagcgtttgttagccaaattcaaagtacaaaataaataaaattaaaaataaaactattgtgagcaggatctttcatactatctgtgctaaagcacaggcctcaaaagcaatgcaaaaattaatggataaataacttaagataacatcttaagtatatcatacgatatacgatagtggaagccctggttcgctacgatttctcatgtgacagctgtgggcgaatgaaaataatgataagccaagtcggacgaggtggagtttttgaaaagcagtgtaaaatcgttaataaccaggtgctaccaactcttccagagctctacaaggtgccgcttcgcattctagaccatcgcgtgttcgtaaacggcgagatcgaggcctttcttgagaacttcgaggtgcggcgcaacgacagcgaagtggagaaacttttccaggtcaccgaaacagtgggatctctgaagtacgatctgtcccggtgcagtgcaaccggaaggggtagcggagccgagaacctcgcccaactggacacggaagtcagccatctgctggacggggtcaacgcactcttggcgaaagcgaaggtggaacgaactgttagtgggccagcgtaatctccgcctgtttatcattgattaattggtcttccgttcgaattgcaggctagcacccagttgcaggaggcgcgactggcacgtgagcaacgccgggcggagttcctaaccaatttggagcacggctatcgccgaatcgagaactcattcgaggagaaggaggaggaaatcgcagagctttactcagatttgcaactaaagcttaacattgccaagtagaaactatgctgaagtcaacgattgttgatccgcgggtgcgccttgtgccgtcaaagaagctgcttgactttctggacgcccaaaagaagcacttaaaggagttgcccgaaaatgtggccaagattatgaagcaaagaggccacacactgcccacctctattaggattatcaaggatgcgggcttggagtacaaacgaccaaaactcaattacgagctgttgacaaaactaactgaaaacctagccgacaaaccagaagaacctgctaaggataaatcggaaccagattcaggggtcaaggatagtgatgacgcaaagtcaacaagggaggttaaacatttcctatacttaaccgacctgcactggctctcaaaaacactggctgaactgcgtcgtcaggatcactgccaagtctttctgcatcagctaattgagtcctgtgatctgctcctgcccgaaaacgaaatgaagccgcgcaatcctgagctagaagcgcgctgccaacgtcttcgcgcagagcaacaaaatcgggattacctcaaaatgaccaagaatgtggatgccggcttaaaacactatccagaggacactatcagctatcagagtaagtgaatacgcccagcttgttagatccgcccttttaaaacctttttcttcttcccttccctttcagttaagagccttaacaagcaaatcattgccgtggtgcagttcatcttctccgtggccgctggctttacgttcggctttttcggcgtcaatttgatggtgggcccgctgcctttcggctttcgcatcttgctgggcgtgattgtagcgctcatcatagccctggctgagatgtacttcctggccaagaagctgcacgagtacgatgaggtcttggacgcgcccaaacgtaagccgcagccatcgacgccggctaagcgcaccccgcccgccgagggaagtcaagtccagacattgaaaccccatgttgactagatagatgatctgcgagtaaaaatcgttctttgtcgttgtattatttcgctttgcaatgttaggttatataaatagctgtaaaagttttattctttcggaatcggggacttggatatcgattatatgctacgtatgcttatttcgaccgtgaatgcacaccctat

SEQ ID NO: 15605 - DNA, 625 bp, DROSOPHILA
aataatgataagccaagtcggacgagagctctacaaggtgccgcttcgcattctagaccatcgcgtgttcgtaaacggcgagatcgaggcctttcttgagaacttcgaggtgcggcgcaacgacagcgaagtggagaaacttttccaggtcaccgaaacagtgggatctctgaagtacgatctgtcccggtgcagtgcaaccggaaggggtagcggagccgagaacctcgcccaactggacacggaagtcagccatctgctggacggggtcaacgcactcttggcgaaagcgaaggtggaacgaactgctagcacccagttgcaggaggcgcgactggcacgtgagcaacgccgggcggagttcctaaccaatttggagcacggctatcgccgaatcgagaactcattcgaggagaaggaggaggaaatcgcagagctttactcagatttgcaactaaagcttaacattgccaagtagaaactatgctgaagtcaacgattgttgatccgcgggtgcgccttgtgccgtcaaagaagctgcttgactttctggacgcccaaaagaagcacttaaaggagttgcccgaaaatgtggccaagattatgaagcaaagaggccacacac

SEQ ID NO: 15606 - protein, 157 aa, DROSOPHILA
MISQVGRELYKVPLRILDHRVFVNGEIEAFLENFEVRRNDSEVEKLFQVTETVGSLKYDLSRCSATGRGSGAENLAQLDTEVSHLLDGVNALLAKAKVERTASTQLQEARLAREQRRAEFLTNLEHGYRRIENSFEEKEEEIAELYSDLQLKLNIAK

SEQ ID NO: 15607 - DNA, 5516 bp, DROSOPHILA
acaacatttgacaacagcgtgcttggccatcggattccggaagtgccggtgcccttattcagcgtttatccggccacgaagcatgcaattacggccctctgccaaacggtgcgccaggaaatacattttctcaaattaaatattaaattaacggtaagttaaatgcagtgcatacatggcgcgcctcatcctccatcttaatcctcgggaaatgcggcaaacatgacgcgtctgctcattggttaccctctccatttttatccctccattgcagagcatttgcccgggcatggtagacacggatttccttagtgtttactcgcaggcggtagccgagctgcccaaactgcaggcaagggatgtggccaaggccgtgttgtatgcgctgaacactcccgatggcgtccaggtggaggacatcatcctgcagcagatgcggaaggtcgattgaattttagtttgaatttcaagagaattacattttacccaaaacgatattatttgtacattttgtatatgttcttctatgtaataagagaacaaatgtacatatttttaaatataaaaaattacattattgcatttcaagcaactgtttcgacactttatattctttaagatgttatctgtagataacatctgtattaacatcttattacaaataacataaaaatgcaataaaacgataattaaacatttataatattttgcatattctctaatcgatataacattaaatgcgtgtaaatagtttggcaacattatgaatgcatttatacattcattcatttgaattggaattgcccgcgcatgtagtggagttgccaccttgcggtagggctgccagattgagtcaaaagaccagggctgtacagctatcgctagcgagtacaacaaccactcttgatttggctcgcttcgctctagcagagttatccaccaaaacatcgattactcgtgctacccccaaaatcgatggtacgaaacaaacatcgatatttcacagctttcgcttattggtcacactggggcttatgattaaaaaaaactgaactgactccaataaaaacgtgaggtagaaaaagcgaattaggttgacaattaatacacacagcagacgcacggtaaccagccgccaataccgatacgaacgcgcggcggcaacagcaagtgcgcaagtaaaagtccatatcaaacgcaagctacccgcagccgcgggcagttaaattccgaaatgcgtccacgtagtgcaaaatccgaatctcaattcgaattcgaatcggaagtccggatgtctgcgccctttttatgcttttttcgagggtgcggcttagatcggcgtgcacctgccgtccaaagtgtgattacgaaatgtgctccaacgtgaaatgatattataaagtataatataatgcatgttaccacgtagttgcacacagacaggcagcacacgcacacacacgcgcacacccagtgccactcacacacacacacagacagtgagcgagcgagagggcaggaggcagagaaagaatgaaataaagaaagtgctgcccagttgacaaagaacaggttttaacctaattaactaaataatgggcccaagtgaatgtttcgccgccaggaggaatttgcttccttatatccgcaaggtccccgccgctcgagtgtgcgtgttgttgtatgtgtgtcaaggttccggaagttgagccgccgtaaaattgatttcctatacaccaagccgctgttgctgccgctgctgttgttcttattgtgtttctgtggctggacattgaacttgagtcgaaatgcgcactaacccattatccatgccatatctcttttcgatccggcagccgtctagcccagcagctctcttccccccacaataaacacacacaagctgctcttggagccaatcacccgcaaccgatagccacacgaaaccatcaggatgttcatctgggactggttcaccggagtgctgggatacctgggtaagcaacgtcgccattgccgaccttgtgccttggggcggcgtttcttgaacgagtgccaacaaggcagccgcacaaaagaaacccaaattcgacggctgtacagcggaggtcgtggtgatagctctaaacgtgcgattatctcgaaatctagaggttaaactgtgtctataaggtgtcgaaagcttataactttccattaggtctctctatcacaacaaatgcgcgttgaatatgcattactctagggtgcatatacaatatacacttctgtaaaaggtattttgattgcatagccatgtactcttcagccacaattatttaagcagacatttttgatagggttttcctcgcttccagatggctgctacacttttatttgctttgtaatgctaaaagttaaaattattccatacgaaaagtactgttctacagtgcaggccaaactgatagcagttgttataagcgcatttttgttatagcttgatctttaatcaggttaatgatagccgaacattttgggtagcaaaggtaataattagcccgaagtccaagagctattgtctcgacctcaaatgtatattcggctgtctgtggctgggcaaacacaagtgagccgccactagtgttagtttagctgcgtatattaattgatgacgcgtaagtcaaaaggctattcaacacactttctcgttttcaggtctgtggaaaaagtctggcaaattattgttcctgggcctggataatgctggcaaaaccacactcttgcatatgctcaaagatgataagctggcgcagcatgtgcccacactgcatccaagtgagtttccttcatggactaaatagtggttatgtgtgtgactttaattaactaatatgattgacttgcagcatccgaggagctgtccatcggcaacatgcgcttcactacattcgacttgggtggccacactcagggtaagtgcctaatcttgaccagagctcaggggaatgtgaatgtgcatccaaatcgttgctattttccgtacgtgcccacgactaaatatagaccagtatgcaaatatcgcagggctaagcaagcgcagccgccagatccacgacaatcagcatgaaatatagcgcatcaggtcacccatacagccagtgcgtcttacactcgtagcatttgttgcgatcaatcagcgccacacactcgaagcaatgccaccacagtggtcacaagcagctcatccagagatctcaattatcatcttatctcaactgtgattatgaagacctcagaatactagaatatttaacccattgcatacaatcaatatgttcatttatgtttagaaagcaattagtgtcttgttgattttcgcaaatactatcttccttaccactgtgcacatataggcgacgtatttattattaatattatgaaggcaaacattctctatgtagataacaaacagaaacgaaaaactcgcatacatgcagttgatatatgtatataaatatgaacattatgaaaagtgatcaaacatcgtgaaatccagttgttttgataacgaagctctagcactcattttaaggcagctcgtcatcgtgacgatcgttttcgcttcggaactactaggtacactaaagtagaaaggttcttagcggcggaaagatatcagatttgtgcctgatatcagtgacttgcgctttgttattctagcgatgttatataaattacagattgttggtcaacagcagcgactactaaggtgcccttgcaaatcttgattcaaaaatcggaagactaacccatctaaagactaactgctgcttttgtatttatgagacatatctacttatttctgcagcacgacgcgtctggaaggactacttccctgctgtggacgccatcgttttcttaatagacgcctgggaccgtggccgcttccaggagagcaaaaacgagctggattcgctgctcacggatgaggcgctgtccaactgccccgtgctcatattgggcaacaaaatcgataagcccggcgcggctagcgaggatgagctgagaaacgtgttcggactgtatcagctaacaaccggcaaggtgagcaccaaaaccacctccctccctccctccctccttactcctgctacataattgatatccatttgacttgcagggcaaagttgcacgcgccgatttgcccggccgtcctctggaattgttcatgtgctccgtgctgaagcgacagggctacggcgagggtttccgttggctggcgcagtatatcgattaagtcagcattagcaaccaccaccagcaccatattttcaagaacaccactcaacactcaaaaccgaaaacttggctacaaaatttccaaaaatgattagagaccgcagaaagaacagaacccaagggatgtgaacccagcccaattcaaaccgtcagaccttaagcaaaacgaagctgcgtgcgcaatttctaatttatacaaaacaattacaaatatttcataataataaaaaaaaaaaaacagaaaaccatacaatgtacatctgtaacacacaagaaatcgcgggaaaaacagaacacaacatcaaagtgaagacaacttttctatctggaacatcgggatacattgtaaggagctgaaggatgcgcggagtgcgcaagggaaacttttaataataattatgagtaacaaattatagcaaattaaaggtgatttatttaagagcatgtgctttcaacgaacgctgtttcgccaataaaatgtagccacctacctttatttcaagtttatgaattgtaaatgtcgctattgatttcctaaatagtttactttggccgcaaaacattatgtacatccctataaggattcgacctccgataaatggtacaccttagtttagctaaaaattttaagttgcatgtcatcgatgtactttgtttcttttatacaatacgaaagggaaagcaatttatataaaaaagcatttttgtttgcagacagaattctaaataaaacggagaaaagtaattttgtaaaatacataaattggtgactattgttgttttgcattggatttatgtgccgagcttgaatgaaacccagcgatgtacaaacatattggattcatttatttatttgcatttagggtttacgctaatgagtcacgtccggagcatctattgaaatcagggagcaggcattcgatgagggcgagcacgggatccaggagctgcaaacatgctggtccaagtagaaaaatacacaaaactctgcagagtatgatcgcgacctcagtgctaactgagccggcagcggcggggcagtcctctcagcagcatcagttggcgttgaaagaggcgcatgagcaagcccttgcgcttggcccgctccctggatcaggaacgcgatgatccgcccatggagccggacccggagccgccgccagccatgcgccgcttctttttcttcttggccgtcagactctcctggccgctgtccgtgttggaatcgccgccat

SEQ ID NO: 15608 - DNA, 992 bp, DROSOPHILA
tcacagctttcgcttattggtcacactggggcttatgattaaaaaaaactgaactgactccaataaaaacgtgagccgtctagcccagcagctctcttccccccacaataaacacacacaagctgctcttggagccaatcacccgcaaccgatagccacacgaaaccatcaggatgttcatctgggactggttcaccggagtgctgggatacctgggtctgtggaaaaagtctggcaaattattgttcctgggcctggataatgctggcaaaaccacactcttgcatatgctcaaagatgataagctggcgcagcatgtgcccacactgcatccaacatccgaggagctgtccatcggcaacatgcgcttcactacattcgacttgggtggccacactcaggcacgacgcgtctggaaggactacttccctgctgtggacgccatcgttttcttaatagacgcctgggaccgtggccgcttccaggagagcaaaaacgagctggattcgctgctcacggatgaggcgctgtccaactgccccgtgctcatattgggcaacaaaatcgataagcccggcgcggctagcgaggatgagctgagaaacgtgttcggactgtatcagctaacaaccggcaagggcaaagttgcacgcgccgatttgcccggccgtcctctggaattgttcatgtgctccgtgctgaagcgacagggctacggcgagggtttccgttggctggcgcagtatatcgattaagtcagcattagcaaccaccaccagcaccatattttcaagaacaccactcaacactcaaaaccgaaaacttggctacaaaatttccaaaaatgattagagaccgcagaaagaacagaacccaagggatgtgaacccagcccaattcaaaccgtcagaccttaagcaaaacgaagctgcgtgcgcaatttctaatttatacaaaacaattacaaatatttcataataataaaaaaaaaa

SEQ ID NO: 15609 - protein, 193 aa, DROSOPHILA
MFIWDWFTGVLGYLGLWKKSGKLLFLGLDNAGKTTLLHMLKDDKLAQHVPTLHPTSEELSIGNMRFTTFDLGGHTQARRVWKDYFPAVDAIVFLIDAWDRGRFQESKNELDSLLTDEALSNCPVLILGNKIDKPGAASEDELRNVFGLYQLTTGKGKVARADLPGRPLELFMCSVLKRQGYGEGFRWLAQYID

SEQ ID NO: 15610 - DNA, 5999 bp, DROSOPHILA
tcaaagcttacaaaatttcccttttcatttctaacgcaatgttccctaagaaataaataactacacaggctaaaatcataacaaattcctaaataaatattcaaacctcattgataaaatcgcaagaataaaacactttcataaataaaacaactacgtgttaagagtatacaaagatccgagtgttggaaaaaaagaagcttttccactgttgccaagccattttccacccactccaagtgctcggttttgtgaatagaaatatgaaaataatcctcaagtgtcagcccgagagattagtgacaacaaaccaaagccgcacagcgaaatgagatttttcatttggtatcaaatatccgctaaaaccgaccagcaaaaacccaagcagacaaaagaaaatgcataaaaaaagatagcttaaactagaagtgaaatgcaaacgagtgcaatgctccatgaatgagaaaagggaaagggaaaagcggaggctgaggcacaaagtgcaactaggcaaatgcaaactacaaactacagtcgcacaatgcaagtacgaacagtacgacagccagtaaattgcaatcaattaaatccgacttcagccagagcgacgcgtgccccatgatccaagcccaatggtaaaagacgccgacgataaaaataaagaacactctttaaaagcctatatactaaattaatgtttccttaattcttaaagccttgtgagagatgtttggcttaaacaataagatatgtttatctacatcacaaaatttctagtgtcttgaaataaaaaaaatatactttgaaggaccctaatactttctcaatttcctctataaacccagctttgatataatcctatactttaactattaaataatatgtagagtgcacggcatttactatgtttccatattaacaagacccactgtgccactgtgttgcagctgtgatagacgtttcagtgatcgccttcagcttccaacatcagttgtcactggcaatcgaagccataaggttatctttgcttaaacaacatcttgtctcttcagatttaacacatctctgatcatggaaaataatttctactggcgcaacaaggtggcggttgtcactggagcctccgtgggcattggagctaccacagctatagaactggccaatgccggaatggtagttgtgggcctagctcgtcgagtggaactcattgaggtgcagaccaatactaattaatatacatccatagaatacattttatgagacttcaaacaggcactcagggatcaagtgaccggcgttggaaagatttttgcccggcaatgtgacctcaatgatgaagagcagttggccagtgcttttaactggattcgtgaaaaattccaggccattcatgtgctcatctgcaacgctggcatcctgaaggccaacttcctgagcggtaagtgcagcgtaaagaatctgaactgccgagactacattcctcagttcagaatcccccaccaaggacatcaaggaactgttcgacacgaatgtggtggccaccgccagctgcctgcgggaggcactgaaacacatggctgcggtcaaggttcgcggtcacattgtggtcatgaacaggtgagtgtccaccatggccaaaagtatataccgcagggctggaatgtcctcttgaatttcaaaaggttaaatgaaagaaatattttatatatttcctattaagtatttctcaataagcatgcaatatttctgctgtcacttaagccttataccaaacttgggtaaagttcaatgaccattttgctttcctttctgcttgcaacactttgacagctcgacttaatgttccttaattaaagccaattccgtagaaagtgttcgttgccaactaaaaggagggaggcatcaattgaaagctatacttgaaaggattgtctattgactcgagacaattagatagagctacaaaattagcacaactgcaaaacacacacacacacacagaggcacaattggctgttcgggggtaattgttatcatttcgggagcgctgtttacccagctgaaataggaaaattgggcttaaatcgaaattagtgcagagccggacaaaggcagtgtgcatacatacagcgatggagttggaggtaaatcattttcgtacatatttgctttatagttttgcttgtgctgggcaaacaactgaccaaaagctgctgccttgagtggcaaaatatttgccaaattatgtcctgtaggctccatggtgttgggtggcggagtggcggatagtgggttgtgttggatggtggtgggtggctcaagggcgggcttagacgaagggttcagccgatcggggcttaatgaaagtgcaaacaatgcaggcggtcagtcaatagccgtgtcgctcagagttggtcagctcaatgcattttgcatacgaaaggcatgcgctcaaaagcgaagggctcgaagtggtcgccgcgttatttaaattaaattaaaagccatgcggcaaacaaacaagcacaacagcacaaacacttattgatatttaaatgctgagcgcggtgggggcacgcatcgtgtttttgcggtgcgggtggtgcattaaaagctttgcatggccaatgtgtttgcccagaacaacagcaacaacaactcaattattcaacataattaagtattttgcattaagccgaatgcgtattgcattcgcatttgcattttgcattcctccattggcagtcgtcgatgtgatttttattatttcatggaatccaatgcgtaccgcatttaaaatccgcatgtttgatttgcgctatggctttaatttcaaattgcattgatttaattttaatgaaatttacttgagtgcatacgcacacccacccaaccagatagcaattattgcccatgagcaaaaggcaaaattgaataattgcgtatacgcactgtgggtgggctgaccggcttgttgtgcatgcgtgagtgtctctgtgtgtgtgtatgtttggttttttcatggctgtaaaatcagtaagcatgcggaaatgttaaggcaaattcaacaaagccaacgtcaatcttatttattgattggcttttagtttacgcaaagatggcaattcgattcgaacagaaatctgtgtgcgcaaaatagattgcaagctcaaaattggattaatataatgccttgaaacgatttcagtgacgctttatcttggtcaaaaatgttgaaatgttcatttaactattttgaagtagagattcttgttagctttgtagttcttcttttatttagctgtgtaagaacatgatatgtagacttaccatagggaaaccttaacgaaccattttaatatgctctcgagtaacctccacattcctaccactttttaccacgcaatcggaaagtgcatcatcgaagtgcattaaagacacaccgtaaatacgcatttcccggaattttcatacgcatttttccggcataatgagcagcggacacaagcgtattgtccgcaatcgaatacaattgagcaatgcggacaggcaaggaaagcgggaaagggcagtggaaactgagacttcgaactttgcaaacgttaattaatgagaaaatgtatttatttggcggcgttgcgagtcaaagagaattccgttctggaaacgtagccgaggcgttgctaatgagcatgtgacgtttcggggggcctgtgtctgtgtgtgtgtcaaggggcttgacaggtgggcagtggaagttgggcggtcgtccatatgcatttcgcttaatgtcagtgcaataatattaagacttaattaattaaaaactgcaagggtatgccggccgcccagcatctgcagcaacgttggcaattgtttgcatttaatgcccccggctcagagccgtaagtaccaccccgtgctcttccaaatgcactcgaaaaaaaggatactcgaatgaatgccttcataaaaatatcagtttaattaaattaaatatcttgtagcaaatataaaaactagttgtaacttataattcccttatttttccaaaaatttcgcattcaatcaaaatattatagcacaagtttttaagtcttttcttgctttttcgtcaggtgtgggggtaaaattaaaagaagtttacgcaatgtttgcataaaatgcacgcaaaaatgtcccgtcagctgctgaccatcattttccgtaggtgttcgacggcgacttgttttttgttgccgttttaagtgcttgaaatccgttgtgttgactttatttacccacgcacacccgccgtttgtgaccccgctttgtctttattttccatccccgacgcaccgccataccttggcatgtggacgatgctcatgctactcctccgcctcctccttcgctctgctctggacatgtgtatggacaacatttgacaacagcgtgcttggccatcggattccggaagtgccggtgcccttattcagcgtttatccggccacgaagcatgcaattacggccctctgccaaacggtgcgccaggaaatacattttctcaaattaaatattaaattaacggtaagttaaatgcagtgcatacatggcgcgcctcatcctccatcttaatcctcgggaaatgcggcaaacatgacgcgtctgctcattggttaccctctccatttttatccctccattgcagagcatttgcccgggcatggtagacacggatttccttagtgtttactcgcaggcggtagccgagctgcccaaactgcaggcaagggatgtggccaaggccgtgttgtatgcgctgaacactcccgatggcgtccaggtggaggacatcatcctgcagcagatgcggaaggtcgattgaattttagtttgaatttcaagagaattacattttacccaaaacgatattatttgtacattttgtatatgttcttctatgtaataagagaacaaatgtacatatttttaaatataaaaaattacattattgcatttcaagcaactgtttcgacactttatattctttaagatgttatctgtagataacatctgtattaacatcttattacaaataacataaaaatgcaataaaacgataattaaacatttataatattttgcatattctctaatcgatataacattaaatgcgtgtaaatagtttggcaacattatgaatgcatttatacattcattcatttgaattggaattgcccgcgcatgtagtggagttgccaccttgcggtagggctgccagattgagtcaaaagaccagggctgtacagctatcgctagcgagtacaacaaccactcttgatttggctcgcttcgctctagcagagttatccaccaaaacatcgattactcgtgctacccccaaaatcgatggtacgaaacaaacatcgatatttcacagctttcgcttattggtcacactggggcttatgattaaaaaaaactgaactgactccaataaaaacgtgaggtagaaaaagcgaattaggttgacaattaatacacacagcagacgcacggtaaccagccgccaataccgatacgaacgcgcggcggcaacagcaagtgcgcaagtaaaagtccatatcaaacgcaagctacccgcagccgcgggcagttaaattccgaaatgcgtccacgtagtgcaaaatccgaatctcaattcgaattcgaatcggaagtccggatgtctgcgccctttttatgcttttttcgagggtgcggcttagatcggcgtgcacctgccgtccaaagtgtgattacgaaatgtgctccaacgtgaaatgatattataaagtataatataatgcatgttaccacgtagttgcacacagacaggcagcacacgcacacacacgcgcacacccagtgccactcacacacacacacagacagtgagcgagcgagagggcaggaggcagagaaagaatgaaataaagaaagtgctgcccagttgacaaagaacaggttttaaccta

SEQ ID NO: 15611 - DNA, 950 bp, DROSOPHILA
gcaatcgaagccataaggttatctttgcttaaacaacatcttgtctcttcagatttaacacatctctgatcatggaaaataatttctactggcgcaacaaggtggcggttgtcactggagcctccgtgggcattggagctaccacagctatagaactggccaatgccggaatggtagttgtgggcctagctcgtcgagtggaactcattgaggcactcagggatcaagtgaccggcgttggaaagatttttgcccggcaatgtgacctcaatgatgaagagcagttggccagtgcttttaactggattcgtgaaaaattccaggccattcatgtgctcatctgcaacgctggcatcctgaaggccaacttcctgagcgaatcccccaccaaggacatcaaggaactgttcgacacgaatgtggtggccaccgccagctgcctgcgggaggcactgaaacacatggctgcggtcaaggttcgcggtcacattgtggtcatgaacagcgtgcttggccatcggattccggaagtgccggtgcccttattcagcgtttatccggccacgaagcatgcaattacggccctctgccaaacggtgcgccaggaaatacattttctcaaattaaatattaaattaacgagcatttgcccgggcatggtagacacggatttccttagtgtttactcgcaggcggtagccgagctgcccaaactgcaggcaagggatgtggccaaggccgtgttgtatgcgctgaacactcccgatggcgtccaggtggaggacatcatcctgcagcagatgcggaaggtcgattgaattttagtttgaatttcaagagaattacattttacccaaaacgatattatttgtacattttgtatatgttcttctatgtaataagagaacaaatgtacatatttttaaatataaaaaattacattattgcat

SEQ ID NO: 15612 - protein, 248 aa, DROSOPHILA
MENNFYWRNKVAVVTGASVGIGATTAIELANAGMVVVGLARRVELIEALRDQVTGVGKIFARQCDLNDEEQLASAFNWIREKFQAIHVLICNAGILKANFLSESPTKDIKELFDTNVVATASCLREALKHMAAVKVRGHIVVMNSVLGHRIPEVPVPLFSVYPATKHAITALCQTVRQEIHFLKLNIKLTSICPGMVDTDFLSVYSQAVAELPKLQARDVAKAVLYALNTPDGVQVEDIILQQMRKVD

SEQ ID NO: 15613 - DNA, 3412 bp, DROSOPHILA
gtttatattcttgcctttggttagctgaccattgatatatttcttatttatatgtactctgccctttcttatcaattagagatggcaattgtaaagaaagtttactagtcattatcgacatttttaaacagtgctggtaaactatatcgacaaaccccgccaaatttaaactagccatactagcaatgcggtttgattttttatttattgctaattgaaatcagcttatatatcaattacatcgacatttcgaagaaactccaagtcttttaaccatttaggaagcattttccgtcaacatttcaattaaggcttatgcaatttcaatgaaaacaaatacaagaaaccacaatgaactgaagaactcgtttgggatccggaaaatgtgtctaacgatgtctggtaatttgtggaaatcttgcccattgccgtttacgtctggaaacgcataaaccagttggtcagctgagacatttggtcatttgtttgaggagtgcaagttcaatgattggccccggctgaaaaaattatggccagtggtcgggtgagttttgattttataaaaagtacataattcacactttattacacaatttacaatttcttcgttcgatctctgttttacgagaagacataagtatacattacagtttacagattatagattatagattaaagattaaggcaaacagtcgagtagtgatcggtaaattcgtctgagcaggtagtgactaaggatcagttgaaagcggaagatacacatagaagttattcgctatcacagaataaaatacaatatacaaaatgttaatgaaatggccatggacaggatgtgatccttggcctgggtgtgtgctgatgtcctaattacgagatatgaagctgattccatggtcgaccgatgtggatatgcttgtccctcctcctagtcctcataatcctcctcccacttccggctgatgagcaatttggctaactctagtgcgcagtgtgtactagcttagtagtggtgttcgtgcagctcctcatgatgatgcactggagcggtcttgtggaccacggcgttgaatccattgtgcttgtcggcggtgtagtccacggtgcggatggaaccatcgggctccaccagggagtactgtcccttgacggtgtcaccatcgcgggtctcgtgctgcgacttcacatctccggtgtggaagtcattcacgccgtacttgaaagcatatttgggaggagcctgttaagaaacaacatttcatcatcatcatctctttgattatagtttatagtgtaattttgaatttcagaaacaatactcacatagtaatccacatgttcatcatgtccgtgagactcgtgggtctcgtagtggggctcagcgtgttcgaggtgaccgtgctcctcgcccagtgagatgcgttcgatttgatggtggccatactcatggatgggctccggttcgtgatgggccaggtgctcatatccatggctctcctcgtagtactggtgctccaacggataggcgaggctcaggcacagagccgaggcgaagatcagatactgcaagatcagataggtgggtgcataattagcaactaattgtttccgttgacggagtgtgtgtagttgcaagtgctgcaattagcgttggaggacttgctggccacagacagtagctatccatgttatggctgctttgcaatttcggactttttcctcttgctggtcttaatgaattcataatcaagtgtttgctgtggtcgactgacgcttttgtttggatatacttttagtggttactttgtggtttactggctgactgcaaatttgttggttaactaagcgggaggtttatttaactaaagcaaaagtgtgagttttttcctaaatcctaaaacgatttactttaataggtgcttttgtttgaactgtggtttttgaggttgtctttaaattggttttttaattagcacaaaatagctaaattgatttagtgaaattttgtcaggatgatttttaaactgaaatttagtggtcctgacgaatattttactaaaagcgcctttctttgagctcctagtctgtcattctctacatttataatttttctttagtatagtaaatagtacagtatcctattgttccgatgtttaataaaatttgtttccattaaaaatcattgcatattgaaattaaaaatcacatttttaatatgaatatccttttaatgattgctggagatttggaacaccttttccacttcgttcaccaccaaatcacttggtttcttaaatatcactcgatcctcagatcgttttgctgtatcctttaggatatttttttgctgtatagtttgttgttcacaatcgttatcctttatccttggctgctgctgctcaccttgaatgccattttagtttgagttttagctcgcgatttatttggagatcactggttgactgcacgcaacgacttttcaccactgaataatgtggttgcaaccaaaatgcgccgcttttatatggttaggaagaaagtgaatcggctggcagcggtggttcggtggctcggtggattcaagcagcggtggtttgcagcagcgactttgctgtcttcggtgagcggagcgtctcttgaaccgaatgtaaaacagttcacttgtggttgttgtttgccattgtttggggtttgatgtttgcagccccaatgcacttagaataaaaagtcggcacaactcaggaaaaatatcgaaaatcaacaatgattacatgagaatagaaacaagaaaatgtggttctaaaattttataattgcccacaatggaagacaatatgccatacaaaggtaataaagttctctacatttatgacaaatattacatttttaaatattttcctcttatttttatagattattttatatctagcaacattatattgcaacattttcgataagtgcttgtcgtccaggactctttgtgtgccattagtgacgcatgcgatggcgttgataagtcgtcatcaatgtggctgatcggcagttgcaacattgcaacaaaaccccatccccccaatccatctctcccaccccagcgagcccaagtttgttaatattttggtattttcgctttggccaactcggcttggcagcctatttgcattgcaggtctgcattgttgccgtgcaagtgggctcattaaacgcagtttgacccaaatttcggcttgatgattttcgtggctgctgctgggcaacatttttggggcaaccttctattgcggctagcctccggttaatcgttcacttttaatgcgctgattttcgtaaattcgtaactggtaaatagcattagatttgaattgggtctccaggctgtaccaataaaagccaattttgtaatatttaattgtttc

SEQ ID NO: 15614 - DNA, 489 bp, DROSOPHILA
atggcattcaagtatctgatcttcgcctcggctctgtgcctgagcctcgcctatccgttggagcaccagtactacgaggagagccatggatatgagcacctggcccatcacgaaccggagcccatccatgagtatggccaccatcaaatcgaacgcatctcactgggcgaggagcacggtcacctcgaacacgctgagccccactacgagacccacgagtctcacggacatgatgaacatgtggattactatgctcctcccaaatatgctttcaagtacggcgtgaatgacttccacaccggagatgtgaagtcgcagcacgagacccgcgatggtgacaccgtcaagggacagtactccctggtggagcccgatggttccatccgcaccgtggactacaccgccgacaagcacaatggattcaacgccgtggtccacaagaccgctccagtgcatcatcatgaggagctgcacgaacaccactactaa

SEQ ID NO: 15615 - protein, 162 aa, DROSOPHILA
MAFKYLIFASALCLSLAYPLEHQYYEESHGYEHLAHHEPEPIHEYGHHQIERISLGEEHGHLEHAEPHYETHESHGHDEHVDYYAPPKYAFKYGVNDFHTGDVKSQHETRDGDTVKGQYSLVEPDGSIRTVDYTADKHNGFNAVVHKTAPVHHHEELHEHHY

SEQ ID NO: 15616 - DNA, 3096 bp, DROSOPHILA
ggcacgatctccagatctagcattttcacctgggggtttttaagggatcttggtttgttattgttgttgctgcgagtcgtcaacttactgaccttgatatgtgaaatcagttcgcgttgcgaatatatttaaacaattatatatatacgcaattgatggccaagtgtatttgttattatttcagcactttctgttttcaattgtttgctctcgttttcttattttcgctggttatgcctttatttatttttatgcaattacgcaactccaaaaaaattgtttaattcgtgggtttccaactacttgtcgtgttcttggtgaagcgattaattgtattgttttcttcaaaaaaattcggacaaagacgaaatgcgcagcagaaaaatgagataataacaaagtaatggcgttgccacatcgccgcaggcagctgattcgcgaaattgcaaaacaaattgggtgtggctttgccacccaaaaaatatgaatattaatcatgttcttagtctatctatctaatctagtggcttaaatacggttagagctacttaacagttgagttcatataattgcttaatttatttgccacatttggcaacgctggttgagaatgcaacagctgttcccatattttcgcgcgctttttatttaccaaagatagggatttagaacttactttttgatcttaactgttgttcttggaaaatcagcagttaactttggatccgcaaggctttatacttcgccctaaacagtttttgctttttattttcgtttaattatacactttttatgtagtttatatcgcacgactcctggcactgggcaagtaaataatagctgtttttgtacgactaccaacactactctgcttgctaacactaaaagtacacacatttggcggaatatgaaaatgatttgtttattacttacagcccacttttcgcttaaaactaataaaagacatataaaaccatcacatgcactatattcctatttatcagacactttggattcccgactcaggacacgcagaaccgcagttggggcagcagaaactggcatccgttaaaacatttgcattaaggcagtaatagcaataaatatgaccacagcccatgtggtggggcaatgtgggtcgctctccacagaatgtgcaggtggtgcttagtgtcatctgcggcgccaggaaagccggaccatctctatcctctaaccgtcgtccggaaaatgtccatgattttagcactctttgtagcttacggaaattgatgatgggcaacaccagtccgaggatttcctataatatacactgtaatatatatgtataataagcaaactaactaacacgcaccataaatcctccccacagcagctccctcgttaggtacttgtagccaatgtctctcctttgattgttccgcagactaatgtagtccaatcccaataagtagtccaccaaagtgggttttcgtcctgtcttcaggaaccgaaagtaattgaggatgttcagtatcagggcactgttctccacccacataatcgcctcgctaaaccattctacgcgccttgttaagcgtcgctcctcccagctcttcacgtagcccggcaagacggtcaggatgaaatggagcaccagcctggaaacggtcagcttttcggcatcgtaagccagaaccagtagctgttggccaaaagtggagcaccgcttgccgacggaaccaaaccaaattgcggattgaatgatcaagtcgagctccggttggattttgatgaacaaaacgggctgtgagagatatacagtatatattggccaattatggtagtgttcatatactcactgagatggcttgcaagttctccagcagattatcgcgtatcaggcgggcaatgtccttgttcaaatagatggcatctatctaaaaggtaaacatgtataattttagtggttttaattcatgaatagctcaccataattagctcacctgatttacacgtggtacatatttgtttttctccattattttgtttatattcttgcctttggttagctgaccattgatatatttcttatttatatgtactctgccctttcttatcaattagagatggcaattgtaaagaaagtttactagtcattatcgacatttttaaacagtgctggtaaactatatcgacaaaccccgccaaatttaaactagccatactagcaatgcggtttgattttttatttattgctaattgaaatcagcttatatatcaattacatcgacatttcgaagaaactccaagtcttttaaccatttaggaagcattttccgtcaacatttcaattaaggcttatgcaatttcaatgaaaacaaatacaagaaaccacaatgaactgaagaactcgtttgggatccggaaaatgtgtctaacgatgtctggtaatttgtggaaatcttgcccattgccgtttacgtctggaaacgcataaaccagttggtcagctgagacatttggtcatttgtttgaggagtgcaagttcaatgattggccccggctgaaaaaattatggccagtggtcgggtgagttttgattttataaaaagtacataattcacactttattacacaatttacaatttcttcgttcgatctctgttttacgagaagacataagtatacattacagtttacagattatagattatagattaaagattaaggcaaacagtcgagtagtgatcggtaaattcgtctgagcaggtagtgactaaggatcagttgaaagcggaagatacacatagaagttattcgctatcacagaataaaatacaatatacaaaatgttaatgaaatggccatggacaggatgtgatccttggcctgggtgtgtgctgatgtcctaattacgagatatgaagctgattccatggtcgaccgatgtggatatgcttgtccctcctcctagtcctcataatcctcctcccacttccggctgatgagcaatttggctaactctagtgcgcagtgtgtactagcttagtagtggtgttcgtgcagctcctcatgatgatgcactggagcggtcttgtggaccacggcgttgaa

SEQ ID NO: 15617 - DNA, 921 bp, DROSOPHILA
agaaagggcagagtacatataaataagaaatatatcaatggtcagctaaccaaaggcaagaatataaacaaaataatggagaaaaacaaatatgtaccacgtgtaaatcagatagatgccatctatttgaacaaggacattgcccgcctgatacgcgataatctgctggagaacttgcaagccatctcacccgttttgttcatcaaaatccaaccggagctcgacttgatcattcaatccgcaatttggtttggttccgtcggcaagcggtgctccacttttggccaacagctactggttctggcttacgatgccgaaaagctgaccgtttccaggctggtgctccatttcatcctgaccgtcttgccgggctacgtgaagagctgggaggagcgacgcttaacaaggcgcgtagaatggtttagcgaggcgattatgtgggtggagaacagtgccctgatactgaacatcctcaattactttcggttcctgaagacaggacgaaaacccactttggtggactacttattgggattggactacattagtctgcggaacaatcaaaggagagacattggctacaagtacctaacgagggagctgctgtggggaggatttatggaaatcctcggactggtgttgcccatcatcaatttccgtaagctacaaagagtgctaaaatcatggacattttccggacgacggttagaggatagagatggtccggctttcctggcgccgcagatgacactaagcaccacctgcacattctgtggagagcgacccacattgccccaccacatgggctgtggtcatatttattgctattactgccttaatgcaaatgttttaacggatgccagtttctgctgccccaactgcggttctgcgtgtcctgagtcgggaatccaaagtgtctga

SEQ ID NO: 15618 - protein, 281 aa, DROSOPHILA
MEKNKYVPRVNQIDAIYLNKDIARLIRDNLLENLQAISPVLFIKIQPELDLIIQSAIWFGSVGKRCSTFGQQLLVLAYDAEKLTVSRLVLHFILTVLPGYVKSWEERRLTRRVEWFSEAIMWVENSALILNILNYFRFLKTGRKPTLVDYLLGLDYISLRNNQRRDIGYKYLTRELLWGGFMEILGLVLPIINFRKLQRVLKSWTFSGRRLEDRDGPAFLAPQMTLSTTCTFCGERPTLPHHMGCGHIYCYYCLNANVLTDASFCCPNCGSACPESGIQSV

SEQ ID NO: 15619 - DNA, 6740 bp, DROSOPHILA
ttaagtgttggataacgttttgcttctagaggtgctgttaaaacgaaattaatttaacttttactcttaattttttgtaattcagcttaatttatttaatcgtaaagtttttgtttgaatgatattacagttccttgtccatactaagggtttggtaatgttatgaatccgaaccgatagtttgtccgatagttgtaatcgctgtatgactcatctctaacggaaacacaaaataaaacctactacaatttgttgcattttgcctaaattcgtcacaaacactgccgttaaaacgtttataatgtcctacttgaccaatttcaacagtgatactgccaagcaaattcttatggacataatacgctgtgtaaatcagccggaaaactcgaagaaactctcagaggcaaaggcttccgctggaaaagagatgattctcatgatgcagcacgtaaataccaagcaaatcaaaacaaataaccaaatagtttaacataatacattgcaggtttttccattggtgatgcaactccaactggaggtcattaagggtcatgggtttcctggaaaccgcgagggattagtccagttctcccagctcatcagagaaatggaaagggacgacatggaaatcgtacgcctgcgcagtcagatccgcgccatatacctgccccccatagctataaacaccaccaacgacatcctaatctaagcgtggggtaaatcccccaaacaagactgcaattctgccccccggtgggttttttaatatactttaagcgacttttaatatttgtagcccttttcatttgaagaaactatattcattttcaattatgccttaacgtcatctagaaaatcttattttcaaagaatattgaaatacttctctaatacagatttctgaaacaggccaccaaaatagacttaagcttgatattcttataaaatgcatttcttttgataagtttgtgatcttttttgtgtattttttgttgatgtacaaatgtttttcttgttcttgctaacaataagtaacatggcaaaggttgctataaacaattaaggatctgtgccgttccatcgtcagcttttaggatctaggatatgtcgatcagtcacggcgataaattaaacagttttctttcgtacctatacaataagttccttaagagctatacttttatgtacacgtcaagtagtgagctgctcgtccagccttcatcttataaacaattaggcgaggataattagtaacaatgtgaaatcctaatgcgcgctagcaccatttgtggtgctggcattattgttattcccgttttcgaggtctgtagccgtcagtttagccggattaatgttttttatgtcgtttccgttcagtttatgctgcaaatgctgcagctgctgggcgaggtgctcgttctccgcctgcgtaatgctgtcaacatcaatggacatcgacataggtgagtggggcgtaagcggagtcactggattgctgacgcacaactcctcaatggtggagtcgctgttacttgagggcgtcgaggagcgtgaccgcactggatacgaatcgtccaggggcagagcaaagccctgggtgatcatcagatcggcaatatttagttcagagttgtcggctggatcgaatagttccactccgggcagcggggttccctccttggcagcagcacttacagcggtggttgcccgtggacgctccttgtaggtcaccactcgagcaatcagctttctccaatgtgccactacaaatgttcggtgtttagtcaaaaatatatctagcaactgttgctgaaatcataccctctgtcagctcttcgaactttgcgattgaagactttggccacgtaataggctccgtctggatggtagattttacattggccaagaagcattcaacggcttggaacctaaaatagtgaaatataaatttatgtctatccaatcagtcgaactgcttacctgagcgtgaggaaatcagtgcgcagctcgcagatatcagctggcgaaatatattcgctatctccatagtccacgaagtagagatcgatcacctgctcctttggattgtactggttaggcataatgtccacgatttctgcgcgataccacttctcgtcgaacttaaacacggctgccacaatctgacccacatatggagcagtcagcacgtgcttggccctgttttcagcactactataatagctggtcatctcctggaccatgctatcgagcttcttggactgcggtccgataagctgaacccagaatttagtgggcgaggccaccgcggagacataaacctccattggcttaccctcgcccttggaggccattagcttgtctctgggctgagtgtgagagcttagggatgtctgggaggagtacatgctggacgcaatgctgttggtgggagatctgcggggctcccgacgctgttccacctcctccatggaccgcacgagttcctcatcctcctctatctgatcatccagcatttttcgggctatgttcacttgcttttgattgccgataatcgtaatcttggcctttccattccgcccatttaaatcgatattcagcttggctagcgaactgctccggatctcctggaggagctcgccgccgcgtccgttaattttgctggccagcctctggggcacctgcagttccactttcaccacgggcgcacgttcaatttccttgataagcagagctcgagccgccttaaccgcatcgggaacgccgctaatgtcgcagaatttgtggccactgtctttgtctctggaggagaagaatttgatttttgttagtcaggtttaattcctgggtcgataattttcaaatccaattaccgtaatcttatcttggccagggtcttttcttcaatcaacttgatattggatccaccgcgacccattatcaggggcacatgctcgttgtccacgacgattttgaggcacacttccttctggggcttctgttcctctgtctgtcctctaatcccggatgccggccgttggccacctgagtccgcttcctcctcgtcgtttcgagtcttgaaataggcatatagcatggcgcccccaagggagcatagtccgaagcccagaagtagtttgtaggtgggcgtggcaccgaaaggcgtgttgcgcaacatgttgattaacttgttgtgggtggatttgcgtagagctgggtgtttggggcagccttttcaagtctgcctttcgaggttttcgaaaactgaaataaaatatttctggtcacaacattacatatcaacagtacgagcaactaaatcccactgaaacaacttaaaaataaataaaaagcattaagacctcttttcaaggcctctttaatatgttaatatcgttgcgtgtgcttgggaacacaaaaatagaacaagttcaagaccatctgatgtcccaagtcgactggtacgagcattaatgtcgtcttatggaatcaataaaggcctacgggtacgcagtatcgatgtacactcccccttttcttatgcaatcctatcactcactggatatcagttttgacaaatagcccaagacaagcaattctagccgcaaacaaacgaattttggcacacaattcgcgagtgacttcataattgaaattgcttaggtagacattgcacggaataaatagacaagtgacgttattggggtacactagcccacataattcagccacttacagcgattaatgcattgcctggcggatttcgccattaaactgcgaatttttgtgccgattgaagaatcgagcaattccaagacaaaacgaacaaatactctgatatgttgttttgaagcaaaattcaagatttgctttaaatagaaaaaaaaatctatttaaattaaagatggaaaaactcttccgatttccatcgcatataatatatgcatgcatatgtgtatctactattccacttgttgagtctcaataaatcgcgatatttccgagctttgcactggttcttggacaagttaaacgggtttatgcgctcatcggcgttatcataccggtttaacctttgggctccaagcatgaatgcacttcctccgagtcaaaccgcctttatctcgaactgataaaacgagtaccaattatttttggccatatgtaaacaagccacaaaacacataatagagtacatatccactgaccttgatcgtgaatttttgtctatgtttgtttaaagttcgatttttagatagcaaaaagcgcttaagctcaatgaagcgttttatttgaaagccattcgctgtttggttttcacatttttatgtctcgtttttcgttcgaaaagtcgtaaattttatggcttaattctcgcggccgaacttgatttcgcctctacatttcaggcataactgaggaaaacatttagaatcagacggccagcgaatgcgagagagcatcgtcagctgttttgcgattgcaatcaattctctccgtctctctctctgttgtttactttgccggttgatttgcaaatagcgaattgtgagttgtaggaactggtaattaacagcggtactggcacaaagacaaataatgcaaagcaaacaatgcgtaaatcaaccagccatatgtctgatgaaaaatagagagtccacacaccgagagaaaagctttggtattaacatctgcattcgcaacaaaatcatcattctgaattaaataaatattacaagtattttttgaagctttcttataatactaatccatttaaagcatatacagttatattgttctcagtgtaaaagagcgcggtgagcgtagaagagcgtagtgctaaatttagtggagtgacataatgaaccgttcgtttcgtttaagttgtgtttgagttcccacttcttgatttataaccgatttctgaatggaaaccagaagctgaagcgtaagacattaaagatagcttcaagtctggatcttctgaaatgtttaccctaatttttaatggtttttcggacgctctatttccccggcgagaaccatacaaaaaacgctgcgttttcgattttcaaaggggtcacgcggtgaaaatgcctgagatgcgtcgaattttgttggcaaagtttcaaaactttttcgcacacgaatttattgtctcgatttctaaatacagctagttcaacaagaaaacacgacgtcaccaaaggtatttaataatccgccaaaagctatttggagagaccttctttgatcttcgcatcaaaatataaataaatgcggcttgtatgtatgtatttgcattttggatttgtatgcgctgcaggttttaaacttgggagttcttaatgggaaacccgttttcgggcactcagattggacaaaagcctcaggtgtagacacgaatgagttgaaaaggtcaagtaactaaatatcgctattttcaaagctatcatgtacaaatatttaatcttaactgccagttaaagtgctgtgctcaaattccgtagcactcacatgctttatggaaatttgtacccccacccacaacttaccgtctttatattatatcttgtgtatcggcactgtcttttggtttaatctattcactatatcttgatttgtttgttcaggcgttatcacataatgttattaaccattcacttaagccctacgagtggaagcactttttctgcacatttacgtcagaaagcaacaaaaaataataacgccgcataaaaacgtgcgaagcggtgtgaccgttatcagttccaacaagaatgctaataagtactacctgaaagtgttgcaaaacacgaaactataacggtttcaactttcaaaagaaaagctgagaaatatctatagtaatttgtcgcacatagtcctttatttgaatgtaagtataaaatgcaattgagcagctaaaagctggtaggtcataaacactaatgctacgggcacatcccttgtctaagtacaatgaacacttctgagtttgtttaaggcgcacgcgtttggaacaaatcaacaacttaatgcatatgcatatggcctgggcgagtaagggctgtgtatggtgggtgctccggacagctaggaaatgtctctcaatgtgttcggcttggtgccgtccatgtcgaagcagcggcagttgcacgacgacacggggcactctgaattttgcctggcaaataaacgcgtacattggtcagaattcaattaaatattggtaactttgaactcacttgaaccactgcatgatgtgctcggtgtgtccgccgtggcgacaggtctgacaccaggaaaaccactttgagaagggcttggtctgccagccgggcacgtcgggcgtggtggtcggggtctccccattgctcatgttcaccattgtgcccatgtgcattaggcagagcgagcagcggggcaggggtttccggcagctggggcatgaggagagcctgttggtgctggtggtggtgctccgtggacgcggctcgtccagcaaggcgttggacacagacttgccgcaaaagttgcacgacagaaatacggtgcgggaactgcgggaggatgggcggatgctctcgatcttgatgtccagctcggcccgcttctcccacaagccccagctattgaggtgatccaagtagctggcgatccagtactggatgcgcttgtcctcgaaaagctcttgccggaagtagttaatggccaccagggctaccgtctaagaaaca

SEQ ID NO: 15620 - DNA, 2268 bp, DROSOPHILA
tttatgcggcgttattattttttgttgctttctgacgtaaatgtgcagaaaaagtgcttccactcgtagggcttaagtgaatggttaataacattatgtgataacgcctgaacaaacaaatcaagatatagtgaatagattaaaccaaaagacagtgccgatacacaagatataatataaagacgttttcgaaaacctcgaaaggcagacttgaaaaggctgccccaaacacccagctctacgcaaatccacccacaacaagttaatcaacatgttgcgcaacacgcctttcggtgccacgcccacctacaaactacttctgggcttcggactatgctcccttgggggcgccatgctatatgcctatttcaagactcgaaacgacgaggaggaagcggactcaggtggccaacggccggcatccgggattagaggacagacagaggaacagaagccccagaaggaagtgtgcctcaaaatcgtcgtggacaacgagcatgtgcccctgataatgggtcgcggtggatccaatatcaagttgattgaagaaaagaccctggccaagataagattacgagacaaagacagtggccacaaattctgcgacattagcggcgttcccgatgcggttaaggcggctcgagctctgcttatcaaggaaattgaacgtgcgcccgtggtgaaagtggaactgcaggtgccccagaggctggccagcaaaattaacggacgcggcggcgagctcctccaggagatccggagcagttcgctagccaagctgaatatcgatttaaatgggcggaatggaaaggccaagattacgattatcggcaatcaaaagcaagtgaacatagcccgaaaaatgctggatgatcagatagaggaggatgaggaactcgtgcggtccatggaggaggtggaacagcgtcgggagccccgcagatctcccaccaacagcattgcgtccagcatgtactcctcccagacatccctaagctctcacactcagcccagagacaagctaatggcctccaagggcgagggtaagccaatggaggtttatgtctccgcggtggcctcgcccactaaattctgggttcagcttatcggaccgcagtccaagaagctcgatagcatggtccaggagatgaccagctattatagtagtgctgaaaacagggccaagcacgtgctgactgctccatatgtgggtcagattgtggcagccgtgtttaagttcgacgagaagtggtatcgcgcagaaatcgtggacattatgcctaaccagtacaatccaaaggagcaggtgatcgatctctacttcgtggactatggagatagcgaatatatttcgccagctgatatctgcgagctgcgcactgatttcctcacgctcaggttccaagccgttgaatgcttcttggccaatgtaaaatctaccatccagacggagcctattacgtggccaaagtcttcaatcgcaaagttcgaagagctgacagaggtggcacattggagaaagctgattgctcgagtggtgacctacaaggagcgtccacgggcaaccaccgctgtaagtgctgctgccaaggagggaaccccgctgcccggagtggaactattcgatccagccgacaactctgaactaaatattgccgatctgatgatcacccagggctttgctctgcccctggacgattcgtatccagtgcggtcacgctcctcgacgccctcaagtaacagcgactccaccattgaggagttgtgcgtcagcaatccagtgactccgcttacgccccactcacctatgtcgatgtccattgatgttgacagcattacgcaggcggagaacgagcacctcgcccagcagctgcagcatttgcagcataaactgaacggaaacgacataaaaaacattaatccggctaaactgacggctacagacctcgaaaacgggaataacaataatgccagcaccacaaatggtgctagcgcgcattaggatttcacattgttactaattatcctcgcctaattgtttataagatgaaggctggacgagcagctcactacttgacgtgtacataaaagtatagctcttaaggaacttattgtataggtacgaaagaaaactgtttaatttatcgccgtgactgatcgacatatcctagatcctaaaagctgacgatggaacggcacagatccttaattgtttatagcaacctttgccatgttacttattgttagcaagaacaagaaaaacatttg

SEQ ID NO: 15621 - protein, 576 aa, DROSOPHILA
MLRNTPFGATPTYKLLLGFGLCSLGGAMLYAYFKTRNDEEEADSGGQRPASGIRGQTEEQKPQKEVCLKIVVDNEHVPLIMGRGGSNIKLIEEKTLAKIRLRDKDSGHKFCDISGVPDAVKAARALLIKEIERAPVVKVELQVPQRLASKINGRGGELLQEIRSSSLAKLNIDLNGRNGKAKITIIGNQKQVNIARKMLDDQIEEDEELVRSMEEVEQRREPRRSPTNSIASSMYSSQTSLSSHTQPRDKLMASKGEGKPMEVYVSAVASPTKFWVQLIGPQSKKLDSMVQEMTSYYSSAENRAKHVLTAPYVGQIVAAVFKFDEKWYRAEIVDIMPNQYNPKEQVIDLYFVDYGDSEYISPADICELRTDFLTLRFQAVECFLANVKSTIQTEPITWPKSSIAKFEELTEVAHWRKLIARVVTYKERPRATTAVSAAAKEGTPLPGVELFDPADNSELNIADLMITQGFALPLDDSYPVRSRSSTPSSNSDSTIEELCVSNPVTPLTPHSPMSMSIDVDSITQAENEHLAQQLQHLQHKLNGNDIKNINPAKLTATDLENGNNNNASTTNGASAH

SEQ ID NO: 15622 - DNA, 3123 bp, DROSOPHILA
accacatatatattacaagcaatcaacgtaccattataaggtaactccctcacactaaacaatgaatttatatttgaattgtgtgcgtaaggtgatcaacacctataaacacattatgagcaatctgaaagacataaaaacttcaaaataacgcacctataaaaatagattaaacgggccttatgcgagtttaatagtttgcaaatcatttgcaaatcagcagacatatttaaacacaagcataaagttatatagttatgcctgcgtatttgagccaagatccaacttttacttttcgccgagcttcaaaacataacttgcttcgcagaaagcgcagaccgatgatgcgaggcgaattaaattacattaaacttggccaaagcgaaccgtactgaagtggctaaaagcggaaaggccgaaaccattttcacggccctcagcactaaaaaaaaatgtggtatatttccgtggactagaaattagcataagcaacaaaactatgaataggcaattattgttgttaactctattacacatacatctaaatttaagattataactattatttaaagtggcaagatatttggatgaaagccttaagcttttttagaactgtcataatttttccgagtgcgtggtgaaatgcaggtagacaatgaagagcagccagagcagcagagctggcactttaattacgacaaaatttgcgtgagtgatagtcaaatgatgccgcaagcatcattcgagtgttggagcggggtaaaaaggtaaaaaggtaaacaaataagaaataaacaccgcagagacaataaatggaaaagaaattatgaaattatgtgttcgaactgttacaacgaatcagagccagctggcaaaagtggcggcagtcggagccatactataccgagctatgccaaaacccgttttcggagtgatcttctggcgggttgggttggcttggcgggtgtctgccctgccgaagttcatttagttgccagccggcgaagagttcacaacgcgtcgagtgtccaacaaaaaaagcgagcaagatgccctccatatggctgttagtctcgacggtgggttaactagtgctgccgttaaaaaaaggatatacctttaagctggattaaattctttacccacagctggctttggttagctgccaggactatcattaccaccgtccacagactcctttcgttgcggaatcttaccatcagcaccagcagcctcaagccaccaagtttgtggtgcagactttgggtcgcacctacggtttggaaacccaaagggcaccagccatctatgaggattatcagacgcatattgtgcagctcttccagcagcgacaggtgccgcagtatcatcaggctccccgccaacaattgcacacttctagctaccagaatcccctgctggtcagcgccaactaccaggccggcaccgtgtccttggcgcctccagctcccgctgctcctgcccagccactgaccagctatgggccacctcacctgcagcaccagtcacagcctctgcaacctccaccgcagactccccaatacttcccccaacagcagcagccacctgcaagctatttgccacctcagcagcctgcccagaaattgttcttcggcaatccgtttccctatgcccctgtgacgaccggctcggggcaacaggtgctggatgcaggacatggatcaggtgtggcgcccaatgaagtgcaggctcagcttttgcaagccaccggagctgcgccaccacaaactcgagtgggtaaccaggtggctcagtcgcagagctcctctttggatgcctatgactacaagcagagcactcccggagaaaaccgagagtaccaaaggttcgtcaccagctgcccgggaggtggagcctgccagcagaaggagttcaatccaggcgaggtggatgagagccaccagcgggttctgcagacagtgcgagccagtacccaacctcgagtggagggctgctacaagagccaggtgatctatgtgccagcgggagctgctgtcaatagtcagggtcagttgcgaccaaagaatcgacgcactttcgagcgcaaggagcaggtcctctccagatacccctacaactaaatgtcctctctaatcttactcaccgaatttcacatcgaattagttgatatgcttagttgtcagtttgttgtttgttgtaaataaatcgatcattgtttaaattttaaatcacgcatacttaccgtttcgggtgattaatttaacaagcccaaaagtaggcatacaagtccattcgattcagcaaatatgttaatcgcataacctgttgcatgttgctcaatcagctggtgatggtgatattttattgtgggattgcatatggtcgagccatgaaatgctaattagctaaattgattacacagcgagaaatggggtcgatgtacctaaccacagatgcaaatgtctggtcgtaaatgcaattgggaatatagtatgaccaaaaaaaaactattaaaatagataagaaaagggagttatgggttcgcaaaaatatttttgatactaattaaaatttgattgacatatatacatagctaattacgcagcttattatatgtatagataatatttaaatggttccagatcaataaaaacactttgtaattaatcaatttctcattaccaaaccacatttagtttatgaaaattgtatgactttagtcatcgttggcttgttcagttacacaaatgtactccaaggcagcaaaattgtttgtgctagttatattttttggaaatataatggaagtaaggatacaataaaattaagcatcttacattataaagatgcagtcatttgtttttaaccccagaatgcctccaagttggagtttacgaattttaagtgtcatgtgaaggacccgacttatttgagcttcgagtactgtttcataaaatccgtaaatcgaacctataagtacatatcactcaaggccaacatgtacgaagtacctattacaaacgcatcggtatgtattaaaaaaaaatggcttaaaaatcccactcactaagcgtatatattgatgtaggcaaaacttcaaatttcgagaagatttcggtc

SEQ ID NO: 15623 - DNA, 1054 bp, DROSOPHILA
ggcgaagagttcacaacgcgtcgagtgtccaacaaaaaaagcgagcaagatgccctccatatggctgttagtctcgacgctggctttggttagctgccaggactatcattaccaccgtccacagactcctttcgttgcggaatcttaccatcagcaccagcagcctcaagccaccaagtttgtggtgcagactttgggtcgcacctacggtttggaaacccaaagggcaccagccatctatgaggattatcagacgcatattgtgcagctcttccagcagcgacaggtgccgcagtatcatcaggctccccgccaacaattgcacacttctagctaccagaatcccctgctggtcagcgccaactaccaggccggcaccgtgtccttggcgcctccagctcccgctgctcctgcccagccactgaccagctatgggccacctcacctgcagcaccagtcacagcctctgcaacctccaccgcagactccccaatacttcccccaacagcagcagccacctgcaagctatttgccacctcagcagcctgcccagaaattgttcttcggcaatccgtttccctatgcccctgtgacgaccggctcggggcaacaggtgctggatgcaggacatggatcaggtgtggcgcccaatgaagtgcaggctcagcttttgcaagccaccggagctgcgccaccacaaactcgagtgggtaaccaggtggctcagtcgcagagctcctctttggatgcctatgactacaagcagagcactcccggagaaaaccgagagtaccaaaggttcgtcaccagctgcccgggaggtggagcctgccagcagaaggagttcaatccaggcgaggtggatgagagccaccagcgggttctgcagacagtgcgagccagtacccaacctcgagtggagggctgctacaagagccaggtgatctatgtgccagcgggagctgctgtcaatagtcagggtcagttgcgaccaaagaatcgacgcactttcgagcgcaaggagcaggtcctctccagatacccctacaactaa

SEQ ID NO: 15624 - protein, 334 aa, DROSOPHILA
MPSIWLLVSTLALVSCQDYHYHRPQTPFVAESYHQHQQPQATKFVVQTLGRTYGLETQRAPAIYEDYQTHIVQLFQQRQVPQYHQAPRQQLHTSSYQNPLLVSANYQAGTVSLAPPAPAAPAQPLTSYGPPHLQHQSQPLQPPPQTPQYFPQQQQPPASYLPPQQPAQKLFFGNPFPYAPVTTGSGQQVLDAGHGSGVAPNEVQAQLLQATGAAPPQTRVGNQVAQSQSSSLDAYDYKQSTPGENREYQRFVTSCPGGGACQQKEFNPGEVDESHQRVLQTVRASTQPRVEGCYKSQVIYVPAGAAVNSQGQLRPKNRRTFERKEQVLSRYPYN

SEQ ID NO: 15625 - DNA, 4319 bp, DROSOPHILA
tttaaaatcttatgtttagatcgaggcaagtagcggtgaggcggtagaaatgtatgtataaaagattgtgattgtacttgtagtgattaaactatagtacggactccatgtatccatggatatccaatatgtagacatgtatgtatgtaaatcaatgtttatctatatgtccaagctataaaagtaaacgataaatgtactttacgacttaactaatattgtaaaatcgaattaagcggaataaatcctttgaagcacacgttcaaagtagaaatgtaattggcctttttgcgagcattatcccaaataatccatcaataatcaatcacatcgaccagccatgtctccgttccaagttacccaagctacccaagctatgcgtttgttttgtccgtatagtcgcatcccacatccccgtgtacgtatcatccgaattcggcgcgccgaacagaccatttgcctctgcaccatttgtttgcgggtgggtaaaacgttctccccctctcgtatcgttacagccccggagattctgtgcggggaaccctatggccatgcggtggactggtgggccttgggcgttattgcctgtcagatgctgacgcagaaggtaagcgaccaaatccggtagtcggtaattcaatcggtaataaccattcagaatgcgagcatgcgccatctcggcgaaccgatttgttttccgacgcaatagccatagtaccgtgtagtgcagtcttagctggttctggaactggggaactggtttgctgcattgcatcagtggggaatactcggggtgtgttggccaccgtagtccgcaatgaagctctataatccgaacgtttataattggcctcgcagtcagagaatcagagctgtatataatcaggtgttgtctatccaattcaaagtcggtatttatctatttgatgttcaggattagatgtttcccattccccaacccaggttggaattaagatctccccacatagtattcgaggcctttttagtttttcgatttttatttaagaattttctcagtctatataaaagcatatatacttcttctcatatatacgttataacactatcgttattaaatgtagtttcattatgttagaactcaaataaaaaaaaaggttttctcatttataatgtatcataggcgatactcatcgagtgctggcttcattctgggtgttatttttggaaaggacttggtcttgatctcgctcttggtttggacatggttaggctgctgatctaggagttttttttttttgttcttggggcgggcgggtaccgggttggttgtcttgcaatgactaagatttaattaagattacatttattaaattataattataagtattactttatgccatcttagcggtttgtcctgtttgttgtgtgttgaattgttatgcctacgcgtggtttaccttccgatccacttggttctattgatcctggggcagaacgccatcctttccacagtcctgcccttcattttgtgtgtgtcattacgttctgctccatttacaactaaggataccactaactacgatcgtaatattaagacgctgccaaggcgtagcagtggtgcgatggtcggtagggttggtggtgctggtgttggtgttggttggtgcgggtggtgcggtgcggtggtgagttggagttgagttggttaaggcaaggtggtagatgtaaagctcttactattcctagttctccttcgattcgctgctctcctccgactccttggactctgaggactcatcgaccttggactcggacttgtcagacttttcctccgacgactttttgggctcggccgatggtgactgggcaatgggcttggcaatggcctcctcgcccttgaccacggtctcggcagctggtgcttcgtcgatcttcttggcctcgggcacggcagcaggggcaacggcggcggttggctctggtgctccagctggtgctgctgtctcctccgtcttcttctgttctggcagggccttggcagcggtatcagcggctggctgttccttctcctgctccttgacggcctccgtcaccttggtggcaccggccggagcaagtggggcattggtctttaggacgggagcggattcggcaacggtttcggtgctcttctgctggtcaactggcttgggggcctcaccggacttggcctgggcagcctgggcggcaggagaagcagccgcagcagcaggggacgactcgatggacttcttctcgggagcaatcacctggatgttggagtccgacttggtggcggcttcaggagcggcggtgggtgtggcttcagcggccttggctggctcctcggcaacagcagcgtccttcttggcatccttctgttcgatttcgttgatcctctcctggcgggcgggctgctcgggcacgggtgtctctttctcggcggccactacggcgggaatcgctggctcctcggcggacttggcatcgatcttgggctcctggggcttgacctcgtcgacaacttgcttctgcacctcggcattggcggctggggcttcgggggcctgttcaatggccttggtggcctggggctgagcctcgacagtgggttccgcctccgtgcgggcggtcttctcctgcttcttctcggcctcaacgggagcgttctcctgggcgggcttggcctcctcgggcagggtcttcttctcaggaatggccggagcggtctctacgtccggcgcgctcgacttgagctccacgctgttgatctccttggctggctcggcggcaggagtgctgggtgatgggttggcgttgacgtcgggctgctctggaacggcggccttggcttcgatggtcttggtctctgccggcttctcggcctcgggcttcaagggagcaggctcaacggcggtgggcagcacggtcttggtcaggagctcggccttggcaccgctgtccggctggatggccacctcctcgtcgggcacgggaagcgcccaaacgctggccaggcacacggtggccacgaaaagcagttggcacttcattctgaaaaaggaaacgacaaacgggggactttaatttagaatccacaaagcaatcggctgcacaatgaccctcactgagattgttttttttttttttttaatgtggtccggactttctattccgctttaaattccccaatcatcgtttcgtcttccgcggaattacgtttcgtttggttcttttgtaattcgattaaatgaaattctacctctgaattgaaattgcctgtcgtcgtcagttcgtagacccggtctgtcagtcctgctggcaaccgactggctgccttatgcatctaatgatgctcctcctcctttctcccggctccggttggtccacattgaaagcgtttaattattcaaatgcgccacttaaacggtgatcacttaagtttttcaaaactaaccatctcggaccatctgataacgactgacttgcaaatttggaccgcgagacggccatctgcttatttccttatgctaattaattcggccatttaatggccatcgataaagcttaatttattaaacaaaaaaatatcagatataacggttcgaattcaaatctaatggggttcttgagcccgggtcccatgaataatgtgcatttgaatgtgcccgaatgatattgtcatgtattgtgctgtatggctgcacacgactattcaactattggccattactggccattatttcgtgggtgttacgcaacgtttgtctgtctggtcgagaagccatggttcccctacccatgtccatgtcccctacccaccaaaagatacgatctttataatttacgagcggctcttgttggccaaaaactgcatttaggtacatatgtacgtcgtcgccaagacttggcaatcgaaactcgttaagagacgctggcggtgatttgcgaaacccaatcggttggttcacccatttggccacatcgatgacccaccaccgatgcagataaggcaggctcgttacttgcaccaaggattccattcggatcagtcggtgccatcggtaccttggccttggccagcactcaccttttgattgaagcggctaacgttggtttagaaactgtgtttgctttggcactgcgtatctcacagatacacttatttgttaacaatttgcggttttgcaattatcgtttgagaatattctgggatttcgtttcgcgccctgcaacaaaacacacaacgcacagagttaaaaaaaaaaaggtagattgttgttaaaaaaaaaatatatatatatatggtgtgtgatatg

SEQ ID NO: 15626 - DNA, 2282 bp, DROSOPHILA
catatcacacaccatatatatatatattttttttttaacaacaatctacctttttttttttaactctgtgcgttgtgtgttttgttgcagggcgcgaaacgaaatcccagaatattctcaaacgataattgcaaaaccgcaaattgttaacaaataagtgtatctgtgagatacgcagtgccaaagcaaacacagtttctaaaccaacgttagccgcttcaatcaaaagatgaagtgccaactgcttttcgtggccaccgtgtgcctggccagcgtttgggcgcttcccgtgcccgacgaggaggtggccatccagccggacagcggtgccaaggccgagctcctgaccaagaccgtgctgcccaccgccgttgagcctgctcccttgaagcccgaggccgagaagccggcagagaccaagaccatcgaagccaaggccgccgttccagagcagcccgacgtcaacgccaacccatcacccagcactcctgccgccgagccagccaaggagatcaacagcgtggagctcaagtcgagcgcgccggacgtagagaccgctccggccattcctgagaagaagaccctgcccgaggaggccaagcccgcccaggagaacgctcccgttgaggccgagaagaagcaggagaagaccgcccgcacggaggcggaacccactgtcgaggctcagccccaggccaccaaggccattgaacaggcccccgaagccccagccgccaatgccgaggtgcagaagcaagttgtcgacgaggtcaagccccaggagcccaagatcgatgccaagtccgccgaggagccagcgattcccgccgtagtggccgccgagaaagagacacccgtgcccgagcagcccgcccgccaggagaggatcaacgaaatcgaacagaaggatgccaagaaggacgctgctgttgccgaggagccagccaaggccgctgaagccacacccaccgccgctcctgaagccgccaccaagtcggactccaacatccaggtgattgctcccgagaagaagtccatcgagtcgtcccctgctgctgcggctgcttctcctgccgcccaggctgcccaggccaagtccggtgaggcccccaagccagttgaccagcagaagagcaccgaaaccgttgccgaatccgctcccgtcctaaagaccaatgccccacttgctccggccggtgccaccaaggtgacggaggccgtcaaggagcaggagaaggaacagccagccgctgataccgctgccaaggccctgccagaacagaagaagacggaggagacagcagcaccagctggagcaccagagccaaccgccgccgttgcccctgctgccgtgcccgaggccaagaagatcgacgaagcaccagctgccgagaccgtggtcaagggcgaggaggccattgccaagcccattgcccagtcaccatcggccgagcccaaaaagtcgtcggaggaaaagtctgacaagtccgagtccaaggtcgatgagtcctcagagtccaaggagtcggaggagagcagcgaatcgaaggagaactaggaatagtaagagctttacatctaccaccttgccttaaccaactcaactccaactcaccaccgcaccgcaccacccgcaccaaccaacaccaacaccagcaccaccaaccctaccgaccatcgcaccactgctacgccttggcagcgtcttaatattacgatcgtagttagtggtatccttagttgtaaatggagcagaacgtaatgacacacacaaaatgaagggcaggactgtggaaaggatggcgttctgccccaggatcaatagaaccaagtggatcggaaggtaaaccacgcgtaggcataacaattcaacacacaacaaacaggacaaaccgctaagatggcataaagtaatacttataattataatttaataaatgtaatcttaattaaatcttagtcattgcaagacaaccaacccggtacccgcccgccccaagaacaaaaaaaaaaaactcctagatcagcagcctaaccatgtccaaaccaagagcgagatcaagaccaagtcctttccaaaaataacacccagaatgaagccagcactcgatgagtatcgcctatgatacattataaatgagaaaacctttttttttatttgagttctaacataatgaaactacatttaataacgatagtgttataacgtatatatgagaagaagtatatatgcttttatatagactgagaaaattcttaaataaaaatcgaaaaactaaaaa

SEQ ID NO: 15627 - protein, 442 aa, DROSOPHILA
MKCQLLFVATVCLASVWALPVPDEEVAIQPDSGAKAELLTKTVLPTAVEPAPLKPEAEKPAETKTIEAKAAVPEQPDVNANPSPSTPAAEPAKEINSVELKSSAPDVETAPAIPEKKTLPEEAKPAQENAPVEAEKKQEKTARTEAEPTVEAQPQATKAIEQAPEAPAANAEVQKQVVDEVKPQEPKIDAKSAEEPAIPAVVAAEKETPVPEQPARQERINEIEQKDAKKDAAVAEEPAKAAEATPTAAPEAATKSDSNIQVIAPEKKSIESSPAAAAASPAAQAAQAKSGEAPKPVDQQKSTETVAESAPVLKTNAPLAPAGATKVTEAVKEQEKEQPAADTAAKALPEQKKTEETAAPAGAPEPTAAVAPAAVPEAKKIDEAPAAETVVKGEEAIAKPIAQSPSAEPKKSSEEKSDKSESKVDESSESKESEESSESKEN

SEQ ID NO: 15628 - DNA, 3648 bp, DROSOPHILA
ggcatacccctgctccagagcaacaggtacgcacctcgtcgtaatccgtcatatctatatcaaaaacgagttcacgttgtacgggcgttaagccgccaggaattgaacgatggtttttgggtttggaatgcattactggtcctatgtcaatcttaataggattcctcgagcagatctccttttccaattcagcttgggtatcaaagcagaggtaacgtatgtagatatcgtcctgcagtgtaaaggaaatttcacgattggaaaagatagcatcctcggctgaaaagaataatgatcaacggctatttttaaggattgtagttgggtgtacttacatgatccatacgatagccaacggtagaagggcaggtggggaaagaggcgcctgtaatacacgggcaacatatcctgcaggacttcgggattgtaggcatgcacagcagtagtctgctgctgtggagcctggttctcctgatctgtgacttgttcgggcattttaagaaactgaaaataaaccacatatcttatgattatatccagaaaaagaacagaatacttataaccgtaaagaaatcaaaaccattcagctttttgtcgaaaccttatatttatatatttttttgctgattttttctttttcaaagagagatacacgattggagcttaaagtactgaaatatattaacgacatgcattttttaaacgtaagaggcttattaattgtcagttatgggtcgaaacaaattgaatcgagctatcgcaatggaataccgcagaatgaacctggtcagagagttcgtccgatgattggcttagcttacattggaaatctacgtctaccatgtatatatatatatctatatattactatataatgtatgtgtctactttacggctatgttagatcattgttgtagcttaaagattagagcacgaccggcgggctttcccttgttcagcatcatggagcagcgaaaggagcccagtaaattccacaactttaggccactgtgaggcgaatgtcttgcattttgtgctgctgccaggaatgcgctggctgcctgggaggcgcagtattgtagagcgttaccgaggcgatgtggctattgggcatcacctcgaaaatcaggtcttggtagccatagcaaaaggtggagccgaacggattcgctgtgttcgtcgagctggcgcgatgcagcaccactggccgctctgaggtggccaatgcgctgctgatcgcgtcccatttggtgtaggcggttatgttcacatgttcctgcttagtcggcgtcaccaaatcgtgaccactatcactcatcgaagggtgatccgcctgcagcaggaactggaactcgcagcgatggtacatattaaagttgaagtgaccggggtagttggtgtgcagaatgaatttcttgcaggtctgcgtccgtgcatcaaagagcacatcgatgccaagtgtaaagtagttaaagaaaatatcgcttcgcttgctctgtgcttgtcgattgacactcgagctgtgtatcttcattttgtcctcgctcttgaagaatatacgattgggtgctccaagactggtggccacatcctcgcagctatcgccgaagagcagctctcgcgtaaagcactgacggcgtggctccaaagcccttcctgaaccctcagtaaagagcttcagcttcagacccttcgtgtgaccaaaggcggttcggagaacagtggccgattccaaatacatctggcggtgatagcaggacaagggaagagatggtaccctgttctccaacacattgctgcctgcgtagagagacatcttggacacgacgggtgaggcgccattcaggaaaaccagagaactcagtccatgggcgtagcccgagtgcagcttgctgtccaccggaaagtagaaactcagcccgcgaaagtgtagagcaaacaattgtttggctgcatcgtaaaccccaggatgtgtggctccaaaggagtgctcgatttgctcgatactcggcagcacctccggggaattgaagtatacgccgaaataccgcagcttcaccagtttcatgttgaaaacctcgatggtcttcaaacgctgactgacgggatcaaagatcaagcgaacgccatcctgtggcaggttgataatgatgtccacgcccaggggagtggtatccgagtacagcacctggactcccttgatgatgcccacctgcgactggatgatggcgatagcctgcgagaagtgcatgcccagcacaaattcccaggcatcgcagcccagggaaatctccggcacgatctccagatctagcattttcacctgggggtttttaagggatcttggtttgttattgttgttgctgcgagtcgtcaacttactgaccttgatatgtgaaatcagttcgcgttgcgaatatatttaaacaattatatatatacgcaattgatggccaagtgtatttgttattatttcagcactttctgttttcaattgtttgctctcgttttcttattttcgctggttatgcctttatttatttttatgcaattacgcaactccaaaaaaattgtttaattcgtgggtttccaactacttgtcgtgttcttggtgaagcgattaattgtattgttttcttcaaaaaaattcggacaaagacgaaatgcgcagcagaaaaatgagataataacaaagtaatggcgttgccacatcgccgcaggcagctgattcgcgaaattgcaaaacaaattgggtgtggctttgccacccaaaaaatatgaatattaatcatgttcttagtctatctatctaatctagtggcttaaatacggttagagctacttaacagttgagttcatataattgcttaatttatttgccacatttggcaacgctggttgagaatgcaacagctgttcccatattttcgcgcgctttttatttaccaaagatagggatttagaacttactttttgatcttaactgttgttcttggaaaatcagcagttaactttggatccgcaaggctttatacttcgccctaaacagtttttgctttttattttcgtttaattatacactttttatgtagtttatatcgcacgactcctggcactgggcaagtaaataatagctgtttttgtacgactaccaacactactctgcttgctaacactaaaagtacacacatttggcggaatatgaaaatgatttgtttattacttacagcccacttttcgcttaaaactaataaaagacatataaaaccatcacatgcactatattcctatttatcagacactttggattcccgactcaggacacgcagaaccgcagttggggcagcagaaactggcatccgttaaaacatttgcattaaggcagtaatagcaataaatatgaccacagcccatgtggtggggcaatgtgggtcgctctccacagaatgtgcaggtggtgcttagtgtcatctgcggcgccaggaaagccggaccatctctatcctctaaccgtcgtccggaaaatgtccatgattttagcactctttgtagcttacggaaattgatgatgggcaacaccagtccgaggatttcctataatatacactgtaatatatatgtataataagcaaactaactaacacgcac

SEQ ID NO: 15629 - DNA, 1585 bp, DROSOPHILA
atttttttgaagaaaacaatacaattaatcgcttcaccaagaacacgacaagtagttggaaacccacgaattaaacaatttttttggagttgcgtaattgcataaaaataaataaaggcataaccagcgaaaataagaaaacgagagcaaacaattgaaaacagaaagtgctgaaataataacaaatacacttggccatcaattgcgtatatatataattgtttaaatatattcgcaacgcgaactgatttcacatatcaaggtgaaaatgctagatctggagatcgtgccggagatttccctgggctgcgatgcctgggaatttgtgctgggcatgcacttctcgcaggctatcgccatcatccagtcgcaggtgggcatcatcaagggagtccaggtgctgtactcggataccactcccctgggcgtggacatcattatcaacctgccacaggatggcgttcgcttgatctttgatcccgtcagtcagcgtttgaagaccatcgaggttttcaacatgaaactggtgaagctgcggtatttcggcgtatacttcaattccccggaggtgctgccgagtatcgagcaaatcgagcactcctttggagccacacatcctggggtttacgatgcagccaaacaattgtttgctctacactttcgcgggctgagtttctactttccggtggacagcaagctgcactcgggctacgcccatggactgagttctctggttttcctgaatggcgcctcacccgtcgtgtccaagatgtctctctacgcaggcagcaatgtgttggagaacagggtaccatctcttcccttgtcctgctatcaccgccagatgtatttggaatcggccactgttctccgaaccgcctttggtcacacgaagggtctgaagctgaagctctttactgagggttcaggaagggctttggagccacgccgtcagtgctttacgcgagagctgctcttcggcgatagctgcgaggatgtggccaccagtcttggagcacccaatcgtatattcttcaagagcgaggacaaaatgaagatacacagctcgagtgtcaatcgacaagcacagagcaagcgaagcgatattttctttaactactttacacttggcatcgatgtgctctttgatgcacggacgcagacctgcaagaaattcattctgcacaccaactaccccggtcacttcaactttaatatgtaccatcgctgcgagttccagttcctgctgcaggcggatcacccttcgatgagtgatagtggtcacgatttggtgacgccgactaagcaggaacatgtgaacataaccgcctacaccaaatgggacgcgatcagcagcgcattggccacctcagagcggccagtggtgctgcatcgcgccagctcgacgaacacagcgaatccgttcggctccaccttttgctatggctaccaagacctgattttcgaggtgatgcccaatagccacatcgcctcggtaacgctctacaatactgcgcctcccaggcagccagcgcattcctggcagcagcacaaaatgcaagacattcgcctcacagtggcctaa

SEQ ID NO: 15630 - protein, 438 aa, DROSOPHILA
MLDLEIVPEISLGCDAWEFVLGMHFSQAIAIIQSQVGIIKGVQVLYSDTTPLGVDIIINLPQDGVRLIFDPVSQRLKTIEVFNMKLVKLRYFGVYFNSPEVLPSIEQIEHSFGATHPGVYDAAKQLFALHFRGLSFYFPVDSKLHSGYAHGLSSLVFLNGASPVVSKMSLYAGSNVLENRVPSLPLSCYHRQMYLESATVLRTAFGHTKGLKLKLFTEGSGRALEPRRQCFTRELLFGDSCEDVATSLGAPNRIFFKSEDKMKIHSSSVNRQAQSKRSDIFFNYFTLGIDVLFDARTQTCKKFILHTNYPGHFNFNMYHRCEFQFLLQADHPSMSDSGHDLVTPTKQEHVNITAYTKWDAISSALATSERPVVLHRASSTNTANPFGSTFCYGYQDLIFEVMPNSHIASVTLYNTAPPRQPAHSWQQHKMQDIRLTVA

SEQ ID NO: 15631 - DNA, 4662 bp, DROSOPHILA
attggacaaggcctaggtcgcggaatgtgtctcgtgctttgggtgatggttcactgaactccagaccccaaaaaccgcaccacatttatgcaagcagtcagccaagcctgaaaatcaatatgcttataaacggaagccagagccgatgcctccaaccagttgattggcgaccatgtggcagttggcattgggactgggtctaatccagcagctgagtctagccatcgtggtggagcgcaacatgttcgcctactacaaggtgccagccgctcagctacttttcgcccaagactcggatgcggacatcgactcccactcccaagaaatcagcactctggatggaggccagctcagcgacttgtactacgtactacagtgtccaccaaagcatgatgaaggcattcccaaggcgcgggacatgcaaacatgcagcgtggtagaccagtacagaggcatgtggaaaaaacccaagaagccaaagcccaagaagcactttcacatggtccctttccggatagtactacgtccattaggaccgccggccaggagacgcagtctaaagcgtcgtaaacgccaggaaaaagttggcgagactccggatattacaactccgattgatggggctgcttccctagcaaagttggaagtggtgactagtcccctacagttcctgggacgcacccataagcggcagaagcttcttaagctgtccgccgaccatcgaaagtccaaggtgggcaccagttccaaagctcttcagcatatgtaccatcgcgatgagtcctacaacgatcatatattctacgacgaacttcaggaggacggagagttccacaacctcggcaatgaaaaattgaattaagtgtagttattccagtatattatatagtatatatcggagctggtgggataaagaatataaaaaaaagcacacacacaaacctaataatatattatataatatatgcataatatatgcaatcctaagcagtcgcttttattaggatcccatccgaatgtctacataaggaagaaacatatcatcgtaggctacgttatcgaaaactctgttgagcaggacagtgaaggcattggtgaaggctttgactagaccgggctgcaaatcattccagaactccacccagttctcgttgaatagcttattcatgaaaattgtcacatctgtgttttccttgtacagtccatccaaccatatgatccatctaaaagttgaaccggaaagtaaatcagggaacacagttcatttgccatccaattaccgatccaagtcgagactgggcaccagattgtaaatcttcagatagcgcttgtcatttctgtactccaccaacgccttgatggtcagggtaatccggaagttctgaaagtcggatatcaacctcccagtggtattgaagaagaagagcaaaaccctgccactcatatcataggtggcctcatgcacaagtcgtggcaatcggaccttcagcacaatttgcttctgattgggctcgtacaggaatccctcgacgtgggtgattgtggcattattgaagcccttgttcacattgtcccgcattcgaaagtccatccagataggaccgcgactgggtgattccataataacggaatcgggaaagttgtaggcatccagcggcggaagtcctatctctggaatgcccttggggtagtgtttaatcaatgcattgatacttctgaccaggcaggttgagtccccgaaatggcacttctcaacatcttcggctagaaatgttcatctcagttaaaatcagatcaatctggcactgaaaacccacgcacgtaagcttgctcccgagatcataactgggatacaccaacacaggaaagtcagtgaaatcaacctgtccattgcaatcacgtaattgtactgactacaaaacaataaacgcctcggtcacgaaatagtgaatagtgagtgaatagtgaactcgaatgcttagaacctgatctaaggcggagcttttcaacagtcaacaataatgtatgtaatgctaacgctattgcaaccggtttcgaacaatattcatctttgtcctttcaagtctctaataaaaaaagcagcaagtaatatctttaatcacctttaatcatttacttcgaactctttggaaatcggtaagaacatgtcatcgtatgggacctttttgaaaatatcctcgaaaacggagcgaaacacaccggcgaatattttcaggtttgtgggctccagctcgttccaaaactcaacccagtgcagattgaacacctgattaatggctatcgtcatatccgtgttggattcgaaaaagttgtctagccagaatacccatctgtagagcaatgcttggtcagtttacattggattacattgtggtgcccaattgggtaactcaccggtccatggtcacgaagggggttagctcgtatatcttcaagtagcgcttattattgcgatactccattatgaccttcaatttgagaacaaagcgaaagttctgaaaatccgaaagggattcccccgtggaattcatctgtacaatccacacccttcccatactgaagtaatcgcccttatggattagactgggtatccggccgtgtatttcaatcaagctggatgtgggattctcatcaaacccactgaccttcgtgatcgtcgtgttctcgaagccgtagttcacttgattgaacagatcgaagttcaaccagaaggcgcctaccattgcatcattccagaactttgagtccctaatgtccaccacatcaatgggcttcaatccgatcgccggtatgcctttgggataattctttattatagcattcatggaattaacaatgcacttagaatctccaaagcggcacttcttaatttcctttgctgcggtaccgagtaataaaaaaaagtatattattccttaaatcacctaaaaacaacgcgatgcccgtttttttttttttttttttttgttacctacggagaatttggccttgcaacgatccgatgatctgcaggagcaccagaacgattattgtatctttcattttgatatatttgtgccactagtattccatgttgacttccagtgccttcacccgacgacttcgatttgaaaccataggtggaacaacaactagaacttagttgtgcgcttaagtgcaaccggttttgttgaaagctctacttgtcatatttgcattttcaacttgagatattttcaattattcaatgaaaaaaatattttttgtatttaatgatttacgagctattttacagtttcaatccagttgcagtctcttgaaaatcgaaaatttccaaaatgtatattacaaatctagctgaaacctttcaataatctgtaagctttttatttatttcttactggagaaaaggttcatattcaatccaaaaaccatcgatttcccaaacagaacatcctcacttcgagtttcaaagtgaatgtaattcaaaaagctttcgaaatcccgaaatcatgtatgaaatctagacagattgagatttgttatgatttttattaaataccttctcatcgctttgcagttgagaatgaaaattagtggaggaatcagatccaagaacaattgcacaatttctaaacttgtattgccactcattcaattggctaataaactaacaatttataacaagtatgactcttatattacaattgcagttttcaaaggccaacaaacctggcaggaatgcgcataaatcgagaaccagttttcatatcatatacaatacatttgtcccctcaaactgatcacatacggagtataataaggtactcttagcacaacatttacgaatatcctactttatttttactagcaaatacgtttaagtcatcagtactgaaacttaagattactttgggtcttcagcggctaggaacagatcatcatagggtactttttcgaataaatcctcaaatagacttaaaaagacggtttcgaacaaacgcagaatacccggctccagttcgttccagaactccacccaattccggttgaacagattgttaactgcaatcgttaggtcttcattgtcgggaaagaagttgtctagccacataatccagctagaattagaaagaaaatattatagggtaatacaataagaatgagtatatttatatctagtaggctcaccggtccagccttatattaggaactagctcgtagatctttaaatatctcttgttgtttctgtactcgacgcgcactttcagcgtaagaacgaattgaaaattgaggaaatccgactccgacgttccctgagagtggatatcgacgaaccagagcatccgtcccttggccacatagtcgcccttgtaaaccagccggggaatcttgccgtgaatttcgatcttggtggtggtgggatccttgtcgaatcccctgatctccgtgatcgtggtgttctcgaagccatagttgatctgattgatcagattgaagtagtaccaggcacctcccacctgggaatcgttgaccagcagccaatcccgcacggacagcacattgaagggtttcagatcgacctcgggaatgccctttggaaaatctctcagcagtgcatttgccgactctaccaggcactttccgtcaccgaagtggcat

SEQ ID NO: 15632 - DNA, 1988 bp, DROSOPHILA
ccaattgaatgagtggcaatacaagtttagaaattgtgcaattgttcttggatctgattcctccactaattttcattctcaactgcaaagcgatgagaaggtatttaataaaaatcataacaaatctcaatctgtctagatttcatacatgatttcgggatttcgaaagctttttgaattacattcactttgaaactcgaagtgaggatgttctgtttgggaaatcgatggtttttggattgaatatgaaccttttctccagtaagaaataaataaaaagcttacagattattgaaaggtttcagctagatttgtaatatacattttggaaattttcgattttcaagagactgcaactggattgaaactgtaaaatagctcgtaaatcattaaatacaaaaaatatttttttcattgaataattgaaaatatctcaagttgaaaatgcaaatatgacaagtagagctttcaacaaaaccggttgcacttaagcgcacaactaagttctagttgttgttccacctatggtttcaaatcgaagtcgtcgggtgaaggcactggaagtcaacatggaatactagtggcacaaatatatcaaaatgaaagatacaataatcgttctggtgctcctgcagatcatcggatcgttgcaaggccaaattctcccaaaggaaattaagaagtgccgctttggagattctaagtgcattgttaattccatgaatgctataataaagaattatcccaaaggcataccggcgatcggattgaagcccattgatgtggtggacattagggactcaaagttctggaatgatgcaatggtaggcgccttctggttgaacttcgatctgttcaatcaagtgaactacggcttcgagaacacgacgatcacgaaggtcagtgggtttgatgagaatcccacatccagcttgattgaaatacacggccggatacccagtctaatccataagggcgattacttcagtatgggaagggtgtggattgtacagatgaattccacgggggaatccctttcggattttcagaactttcgctttgttctcaaattgaaggtcataatggagtatcgcaataataagcgctacttgaagatatacgagctaacccccttcgtgaccatggaccgatgggtattctggctagacaactttttcgaatccaacacggatatgacgatagccattaatcaggtgttcaatctgcactgggttgagttttggaacgagctggagcccacaaacctgaaaatattcgccgccgaagatgttgagaagtgccatttcggggactcaacctgcctggtcagaagtatcaatgcattgattaaacactaccccaagggcattccagagataggacttccgccgctggatgcctacaactttcccgattccgttattatggaatcacccagtcgcggtcctatctggatggactttcgaatgcgggacaatgtgaacaagggcttcaataatgccacaatcacccacgtcgagggattcctgtacgagcccaatcagaagcaaattgtgctgaaggtccgattgccacgacttgtgcatgaggccacctatgatatgagtggcagggttttgctcttcttcttcaataccactgggaggttgatatccgactttcagaacttccggattaccctgaccatcaaggcgttggtggagtacagaaatgacaagcgctatctgaagatttacaatctggtgcccagtctcgacttggatcgatggatcatatggttggatggactgtacaaggaaaacacagatgtgacaattttcatgaataagctattcaacgagaactgggtggagttctggaatgatttgcagcccggtctagtcaaagccttcaccaatgccttcactgtcctgctcaacagagttttcgataacgtagcctacgatgatatgtttcttccttatgtagacattcggatgggatcctaa

SEQ ID NO: 15633 - protein, 462 aa, DROSOPHILA
MKDTIIVLVLLQIIGSLQGQILPKEIKKCRFGDSKCIVNSMNAIIKNYPKGIPAIGLKPIDVVDIRDSKFWNDAMVGAFWLNFDLFNQVNYGFENTTITKVSGFDENPTSSLIEIHGRIPSLIHKGDYFSMGRVWIVQMNSTGESLSDFQNFRFVLKLKVIMEYRNNKRYLKIYELTPFVTMDRWVFWLDNFFESNTDMTIAINQVFNLHWVEFWNELEPTNLKIFAAEDVEKCHFGDSTCLVRSINALIKHYPKGIPEIGLPPLDAYNFPDSVIMESPSRGPIWMDFRMRDNVNKGFNNATITHVEGFLYEPNQKQIVLKVRLPRLVHEATYDMSGRVLLFFFNTTGRLISDFQNFRITLTIKALVEYRNDKRYLKIYNLVPSLDLDRWIIWLDGLYKENTDVTIFMNKLFNENWVEFWNDLQPGLVKAFTNAFTVLLNRVFDNVAYDDMFLPYVDIRMGS

SEQ ID NO: 15634 - DNA, 5677 bp, DROSOPHILA
aaaagattctaatcgggcttatttcggagccataaccgtcgtagctttgctttgtctagtctccgaaatatttctgaatcccgaaatgcaatcgtcttgggtctatcttatctgctgagagacttgcgggcgtgttggactactggcttatagcctctataaagatgaaattgcatctgcaatcgcctggatgccccatatcaatgaaaataatttccttatataactgacagcaatcgaaatgtaaacatttttacggccgcctacatattgcgcaattcaccgggttcattagatcccaattaaccatttgttttgctgtccaaccgattagcataatgacccacgatggccttatcagtggcgctggagaaaggtgataagatttgcgggctctgcgaataaaaaacataacctgctcaacggggaaaccatcaccttctggcacattttggacaggttgagagtgctcggctctcgcaatggttatacacattggtgtaaatcagatagacgtcctgttatcagttgttcgttttataatgccccttttggactgataagtcgcaccacagccgttcggtcattcagaacagcaccgtcgcgtgttggccacagttgatgagctctcgcagacgtcctaatcaaaagtttcgccgttttgcgacgggatgtgaaaagtgcaacaaaactggcaaaatccgtttatatttccaaatttccctcagattgggatgatttcgttaatctgactttatccattcaaataaattaaattgcaaggtatcaataactaaagtttaaatcgaaatcaattaaaaaaaaaacctattgaatatatcgaagttttagtgcctaaaatcttaaaaagtggtaagtgaaacaagaagaaattatattagttttgtaaatgtacttatcaaaaaaggaataaaagaaagaggaagagataagaaagtgaataaaatatatccaacgctttgacagatggcatgttaaaaaaaaaactaaatctcccagttagcaaacatttatcaccaagatattatggctgcaatttttgagcaccatataatcatgaatgattttataccgcccaaacaagcaaatcgtatatgactcaatgtgattttatattcataatttgaagattttaacaacgttttggcgccaactggcgtggcgacaagtgtctgcttaggagccccggcaatctgccttagctaattgcctagcaatcttcgcatccgagctgaattctgtgccccagatgccataaagattagtctgcttatctggcccttcgactgactggggactacggtacagccacttggaatatcagtagagcaaaatgagagacaagaaggaacaggcgaacagccgcaaggcctcccaagtctcgggacacttttcccaaatggacgtggacgactcggagttcaacgatcccttccaggctctgatggagaaggctggcaaccatggacggtatcaaaccctatacaatttcgtatttgtcggcggtttggccttcagcggtgctatgatctacatgaacatcatcctggccctcaatatacccgatcactggtgcacagtgccaggtagggaaaacaccaacttttcactcgaggagtggcgggacattaccctgcccaagtaagtgggaaatgcaaccatccaagttcaaaaaaactgaatctagttttggaatagacaggctgacaaccgaggaaggaagacgttcagcaactgtgaaatgtttcaaatgaacttctcagagatcacggactggtcagcttggaatagcaatctgacaaaaacaacagaaggtgagtttcatttttcttaaaaagatgcaaactattttgaagaacgagtataaataaatgaatgcgattaaatttaacaaatcttcgctgctgaattttaaaagccatatcttaccaaatcatgtggcttttttattcgctccatatgcacttatttatttgtgttaactttctgtgaaaccttaccaagtggtgggcttattgccaaatatttaacgagccagccgttttccatcaaacaactttttaagagaaagtaaatacatacgtttgccggattagtggtgaaattacttggcatttggctgctcctgctgccgtcttcttataaatatttgcaactttgcactcgaatgcattttacgacccagtacccacttcgaactcccacttctcgctcgtccttacagcctgccagaacggctggagttacgacaagacctggtacgagagcaccatccccacggaccacaactgggtgtgcgccaaggatttgttcgtgacaaatgtgttcgtggtgggtcgtgtgacggaggtggccggttcatttatattgggacaaatgggcgactcgtaagtagcgcgactttcacctaactaagttatggcagcgtcggtaattgaatttgtccacttggccgcagctacggtcgcaggtttgtgtactacatcagcgtggtcttctgctccctgggacgtcttgggtccatcatgtgcaccagctcatacacatggttccttatcatgtccggcatcgtgggcctcactgtgaacagcctcttccaatcgcctcaaattatcggcatggaaatctcgcgggagtaagtttcgccaaagtttttgtccaacttttattgctgatgcacccactctattcgtatccagggaggaccggagtcgaattgccttcttccagagctgcggctggtccatcggcaccaccctaatgcctctgctgtactggtggctacgccactgggactccttcatgtggctcacctcgatacccacagcgatggttctgcttttttccaagtaagtcacgcagcagtagcccacgaaactttaatcatcatccaagtttccaccgtgacactaattgtttcttaagttggtcaatgcagtagttataaagtttgactcagtacataaagcaatttcatcccttacgaaacagctctgtaaatgcatgcctcctaaaactacaaaatcttgaatttcctgcagatacgtcatcgaatcgcctcgatggttgattagcaaacagcgcttccgcgaggccattgtccaactgcagaagatagccaaaattaacggtcatcgcttcgacatgaccgaaaaggaattggcggagatctacagtcgggacaagcaggacgtcacctatggcattgcgtcgctctttgctggttggcggctggcacgcaacaccaccatcatgggatttagctggtgaggaatgtcgatagacagcgggaaaatgtttgaaattcaaattatagtttatatttagaaagataaaatagtcaaatttgtccaatgagaaatatataataatttaattaaattaatacgagggaggagttcagtgagtcaaagggatgatgtatatatattatcttataaagtcctgttgatattttaatgatttctcttactgcatttaagacttcacaccgaaagcaatttgcatctctaactgctgattcactcctttttcaggtgcgtggtggccgtctcctatttcacgctggtgctcttcagttcccgcatggcgggcaatccgttcctgaactttttataccagagcattgtggaaatacccgcctacgtcgtgggccgctatatgggtgagtgctgcggggcgtgacgccacgctgattggagcagtccatcaccgtcgatttgtcctcttacccacttttccaatttccaccaggcgatacgtacggcaggcggttcaccaactccgtatccttcctcatctcgttcgtcacctgcctgcccatcattgtgtattcgacggatgagcggtacgagaacctcatgatctacctggccacgttcatcaagttcctcaacgcgctcacctttttcacggtgaacctgcagtgcctggagatctatcccacgtgcatgcgacaaacgggcgtggcgttgggcaccattctggccaacgctatcggagtcctggccccgtacttggtctacctgggcaccaccgtggacatccgggcaccttactacatcctgggcgttctctttctgctgggcggcattggagctctcttcctgccggagaccctgcacaagaagctgccggacaccatggaggaggcgggtcactttggcaaacacgatgtgagtgcaatctgggttgagtttttacagttagcccaggtgtaaaacttggcaattgagatataaatcgaatgagtgcgcgttttaataaccaatattttgaatgaatttatcttacactttcgccacaaagtactaacccactatacaggctaagagagtttagaaaccccttagaaaacgtgcaacaaaatatgaaaagcagtcaggcaatttctgtgtaattactttctccaaagtggcaagagttcttcaaccttcttccgcttcatgagcaatgaggcacgctggagttttgctggcacatctaatttataatctaaattatgcaaagcagccgtagcctaatttcatttttcacaaatttaatttacagaaattcttcagtctgccgaaaccgccgcaggcggcggagaaggacgacaagctgtcatcccatccggagttaaccaggctcagacgctcggagacggcgccatgaatccccgaatccccgaatccgaatcctcgagtcctgctaactccatcgaagtccttgccggcaatcgattcccgttgccattcccgtttaccactcacgcgccccttgtgatgttacgttaagtttggccccaagtattgcgaataaagtattgttatgtaggcagccgtaataagacccgtataaatcacaattcacccgaacgcccgaaccatcggtgcacaaagaaatctcggcaatgagtttatcagcgcatctgtcagaaatttacaaattacctggggtggctaatgctgtggctaatttaataaatgacgcgccaccagcaccgcgccgcacacatggcgtatgcgtaatgcgtggcaggcgcctgatttatgcaagttatgtatcaatttttatcaccagttgcaggaattgagcccttgccctcgtctgtctctttcgcactggaagttggccaagtgctaaactgtaagcagccactaacaccaaaaccaactgtcagcggaaacgagaaatacaatgtattgaaatgaagagaaattgtaagccgacgctggaatgcactataaaagggttgaaaataatttaacatctagcctaatttggatacaaattttatagcttaataggaaaataaaatttaatttcttaacttaatacgcaggtaaactacaatatttataggcatttaaaatatgtttttctttcaaaattcccctataatgcgtagaataaataatgtttctagcatgcaagtcctgccatttaaatctctctatattatcacaacttttcgctgcatttggcaagttaaacctcctccagcagactgatatagacctccttgaactaaccatctttgcaccggtaaaaacttttactcgtacggcttgccagaaacaggacgtgcaacttttgtgcgcaaaggtgtttcgtttttcaagttatttattatgatttatttgccaatgtggcgcgctgatgtgccaacgtc

SEQ ID NO: 15635 - DNA, 2148 bp, DROSOPHILA
aaaaaaactaaatctcccagttagcaaacatttatcaccaagatattatggctgcaatttttgagcaccatataatcatgaatgattttataccgcccaaacaagcaaatcgtatatgactcaatgtgattttatattcataatttgaagattttaacaacgttttggcgccaactggcgtggcgacaagtgtctgcttaggagccccggcaatctgccttagctaattgcctagcaatcttcgcatccgagctgaattctgtgccccagatgccataaagattagtctgcttatctggcccttcgactgactggggactacggtacagccacttggaatatcagtagagcaaaatgagagacaagaaggaacaggcgaacagccgcaaggcctcccaagtctcgggacacttttcccaaatggacgtggacgactcggagttcaacgatcccttccaggctctgatggagaaggctggcaaccatggacggtatcaaaccctatacaatttcgtatttgtcggcggtttggccttcagcggtgctatgatctacatgaacatcatcctggccctcaatatacccgatcactggtgcacagtgccaggtagggaaaacaccaacttttcactcgaggagtggcgggacattaccctgcccaaacaggctgacaaccgaggaaggaagacgttcagcaactgtgaaatgtttcaaatgaacttctcagagatcacggactggtcagcttggaatagcaatctgacaaaaacaacagaagcctgccagaacggctggagttacgacaagacctggtacgagagcaccatccccacggaccacaactgggtgtgcgccaaggatttgttcgtgacaaatgtgttcgtggtgggtcgtgtgacggaggtggccggttcatttatattgggacaaatgggcgactcctacggtcgcaggtttgtgtactacatcagcgtggtcttctgctccctgggacgtcttgggtccatcatgtgcaccagctcatacacatggttccttatcatgtccggcatcgtgggcctcactgtgaacagcctcttccaatcgcctcaaattatcggcatggaaatctcgcgggaggaggaccggagtcgaattgccttcttccagagctgcggctggtccatcggcaccaccctaatgcctctgctgtactggtggctacgccactgggactccttcatgtggctcacctcgatacccacagcgatggttctgcttttttccaaatacgtcatcgaatcgcctcgatggttgattagcaaacagcgcttccgcgaggccattgtccaactgcagaagatagccaaaattaacggtcatcgcttcgacatgaccgaaaaggaattggcggagatctacagtcgggacaagcaggacgtcacctatggcattgcgtcgctctttgctggttggcggctggcacgcaacaccaccatcatgggatttagctggtgcgtggtggccgtctcctatttcacgctggtgctcttcagttcccgcatggcgggcaatccgttcctgaactttttataccagagcattgtggaaatacccgcctacgtcgtgggccgctatatgggcgatacgtacggcaggcggttcaccaactccgtatccttcctcatctcgttcgtcacctgcctgcccatcattgtgtattcgacggatgagcggtacgagaacctcatgatctacctggccacgttcatcaagttcctcaacgcgctcacctttttcacggtgaacctgcagtgcctggagatctatcccacgtgcatgcgacaaacgggcgtggcgttgggcaccattctggccaacgctatcggagtcctggccccgtacttggtctacctgggcaccaccgtggacatccgggcaccttactacatcctgggcgttctctttctgctgggcggcattggagctctcttcctgccggagaccctgcacaagaagctgccggacaccatggaggaggcgggtcactttggcaaacacgataaattcttcagtctgccgaaaccgccgcaggcggcggagaaggacgacaagctgtcatcccatccggagttaaccaggctcagacgctcggagacggcgccatga

SEQ ID NO: 15636 - protein, 597 aa, DROSOPHILA
MRDKKEQANSRKASQVSGHFSQMDVDDSEFNDPFQALMEKAGNHGRYQTLYNFVFVGGLAFSGAMIYMNIILALNIPDHWCTVPGRENTNFSLEEWRDITLPKQADNRGRKTFSNCEMFQMNFSEITDWSAWNSNLTKTTEACQNGWSYDKTWYESTIPTDHNWVCAKDLFVTNVFVVGRVTEVAGSFILGQMGDSYGRRFVYYISVVFCSLGRLGSIMCTSSYTWFLIMSGIVGLTVNSLFQSPQIIGMEISREEDRSRIAFFQSCGWSIGTTLMPLLYWWLRHWDSFMWLTSIPTAMVLLFSKYVIESPRWLISKQRFREAIVQLQKIAKINGHRFDMTEKELAEIYSRDKQDVTYGIASLFAGWRLARNTTIMGFSWCVVAVSYFTLVLFSSRMAGNPFLNFLYQSIVEIPAYVVGRYMGDTYGRRFTNSVSFLISFVTCLPIIVYSTDERYENLMIYLATFIKFLNALTFFTVNLQCLEIYPTCMRQTGVALGTILANAIGVLAPYLVYLGTTVDIRAPYYILGVLFLLGGIGALFLPETLHKKLPDTMEEAGHFGKHDKFFSLPKPPQAAEKDDKLSSHPELTRLRRSETAP

SEQ ID NO: 15637 - DNA, 5535 bp, DROSOPHILA
aaatgttttatatttttcctctgatttatggaggggtacaaccgaaattgcaataaactttcaattttgcgtcagttatatattttatatttgtattttattaggcctttaaatatctaagaattagtattatttgacgtgcacagtttacatttacataatttttcttttcttgctgtccacttcttgtcgttctttatttttcttttagcagttagaaaaggtttttcaacttcaatgttcccgaaattcaataacaatttaaattaaaacattgcctagattgaatgtcgctccgtgtcaaattgtctgcatgtctgtctgttcatgtgggtgggtgcatacttaaggtcgaacgtactaaggtaaaattgcggagctcgagaaacgttttgaactgattttctacgcgcaatcgaatacatggaaagggctcgaaaatacttgacaatcaaaaatagaattgaaaagttttgataaaatatatataggatatttgacaatagacaatcgcacgcagcttgcccagactttatcaaagttttcttgttggcgcttacaattagtgctagatatataattacaaaaacaatgctgcagctttaaattttccatcatacattttgatttgcattgccagagaaatcatcaactaaactctatgtgtcgtggaacacaacttactgattatgattgcaaaacattggcatgtattattatgctcaacagaacaggaaaaaattaaaggacaatggagcgtttgattggtattattgaagtgttgataaacatatgtatatttaaataggaattatggctgctttatagtctcgcttaaaaaatatatattactgaaacagatatttggggtggttgccatttaagaaaatcctatcgcccgattcggttccactcacagcaaagtttctaaaacaaaagcagcaaaatgtattccagatgtgggtctgtatttctgtgttggggtgtgtgttgtgtgtgtgtgtgtgctattgagaggagcgtagaggatcagaggatcgtctatttcgtgaacgccatgaacaccgcccacagaatttcgttcgcattcggcttggccgactcggcttcgaagtcgagatccagcagctcccgcacccgcttcatggccacctcatagtcgtcatcattcagcggcgcgaaggcgttctcgatcacatcgctggcgtgcgccaggaagataagcgccagcatccgcttgtccatgcgctgtggatcgttgacccacttggagagcacagaatcttggatctgaagtcatacatttcggattcagttttagaattcttgaatatatccaagtctagttacgcaccttcttcaccaggcgacatttgacaacattgtcgctcagcggatgtgtcgtcatatcgaagagtagaaaattttgcttttccgtcgtgagcacacccttctccaccagatttttggccagacgttcgcgtacatttttcagttggtagcgcaatttcaacggattccaggtttcacctgccacaacaataggttatacaaaacatacttggcgaaatggcaggcgcctaaatacacaccactaagatattcaatccagctctgcaccgtctccgggggatctgtttccttaatgtgtttaagtgcctcatcgagtagaacgtctcccgtctgctgatccgatttcagtattaatttcctgttggcgaattgaagttagcatgcttctgaaaggatgtggaaactagatttctatacataccttgtacatagaccacgtcgccgcattccagatttctcgatcatcacgcgacctcgcagtccaagctctatgagaatgcatccgcgcaagccgcttgatatgcagtcgttccagaaagatgtgtagccctgaaagtaattaaaaatgctattagattcaagctatttgattggcctggatgggcatctaaaaataagaatgtgtgaatgcgttacttgtttattttttaaaattttattaaattctatctaacataaatgtaagtacaaacttcattaacaaatggttactgtctcatgtttcaaggttttgaaatatatttgagcaagtctatggtttggccttttcacttgtgttgggcgtaaaagaaatgaataattaccctgttgccggggtcgtaaagctcccagacgaaagtattcagttgttaaaacattaaacacttgagtttgtttaggccttgcccacagaagtgtatgaactgtcaatttaaaaaatacaatgcttatctagctagtataaatgaaaaaacgaacaagaagagttatgttataaccacataaaaaatcaattacaaaaattactcttgttattaacgcttgaaaagctatgataattggaaggtatagatagatacctcaaccacgtttcaatgccatttcacgattttaaaataatttatataacaatcgctcagatgattgataaggaatcgttccgaacgaaaggtataaaagtgaatcatttgcaaagaacacgtcgcttatcagttcggcagttcgagatattgaaattttcctaatggatggtgtgggtagaagccaagtactttgtataatttcgaaaatgagtgacgtactgacataagaaaagcccgaaacggatgagagctaggcagaggagagcagcacttgatagtatgtacttcctcaaacaattaaccaaatggacaaaatcttcgcgataagagcgctcggaaggggaatgtaaaacaaaagcgggcaacacgtcccactgtttccagctcgtatccctcttatgcgaagggagaggaggtggcagggatggaggtgtgggtggtcacacaaatacactgcgggcaaaatgatgaaaacaaatagacgtggtgccagccacaaaggcacatgtgtgcattcctatgtggtacaagcgaacagcaattgagcgataaagctgtgtgccaagtgaaatataaaaaccgaattcaatggagaaatgcgaatctgcctgttcgccataatgggtcacgtatggatgatggttcgcatttacggacatcatcccgcgctatacgtagatttatgaatattacaaacctatgcaaattaaccacttattggaaaactcgtttgacgaaaccgttctccgtgctgcgcggagtgaagttctcgaagagatatgtatgtatttatagccacaactgccaaccgaagaagtattagagcgctatctttccaacaactaagaacgttggcaacaattctaagaatctttttgatttggcactggaagcaattgcgcgatagtgtaacacataaaataaacctattatatactatatataaatatatcatcacttatttgggaagtacatcaaagtattacaaagggcaagtaatgggttctatagattagaatgaacggctgattagaccttaacagatggagcacactattaattaatgcaaaaacaaaagtggttaagaaaatggtgttggcagtctcactgattgcgcattagtcagcaggctggtcaaaagatttcatagtgcattgcttaacaaactggaaaagctaagagaagtggctaagacatggcataaaatgtttatctgtaggacagataaacattgttgcccccataactgaagtgataagttacccccctgtatccaattttcactacgcccctgctggaagatggactgcgttgcacttggggccaagcaagaggttgcgaaagagagaaatcgtgagagcgacagagagagagagacgtcggttaacaggtgaagaagaagcacttatgttgcgaaagaaaccaattaattagtgcatcccaagcagataagagataaggagcacacccacctccttgtccttgagtcccagcagcagaacctcctccatgagcgttagtcgtgtttccttggagtcgccatcgtcgatattgtcctcctggtcctttaggttgtccagtgcatcctggttgtcgtccggcgtgttggcattcaacccaccctccgccccaccgttttcgcggggtttcaccgagcgacgcaccaatccgtcggagcgattcattccggagagttgggttgggtagtcgggaagttcggatcgatggagttttggagatgtgggatgcgagcggagcacctatgtttttctgctgctgctcttcttcctctttcctcgttttgtgtgtgtggcacaatttgctgactcgacgttgggagtttcacagtgtgtgtgtgtgtctgtttgcgcgagtgcgggtgtttgcgtttttctctgtgtacttgtgtcttgtgtttttgtgtgttgttgttttcactgactcttttgcgccccctttattttgtattcttttgcacacacgcacttttcacactatcgcaaaaatgcaggccctaaactgcgtttcgttgttgctgctttgctcggcgtttttgcgctgggaactcgacggtttgatttacaatttggtggcccgtactaatggtgcatttgcattggccttgcatttactgggaatatgcgagtgcctgcgcgaaataagctttttcctattatttgtgtcttttgtcgacgttccgacgtgacatgatttccgcacttttcagtactggcaattttccagaccttaagtgttggataacgttttgcttctagaggtgctgttaaaacgaaattaatttaacttttactcttaattttttgtaattcagcttaatttatttaatcgtaaagtttttgtttgaatgatattacagttccttgtccatactaagggtttggtaatgttatgaatccgaaccgatagtttgtccgatagttgtaatcgctgtatgactcatctctaacggaaacacaaaataaaacctactacaatttgttgcattttgcctaaattcgtcacaaacactgccgttaaaacgtttataatgtcctacttgaccaatttcaacagtgatactgccaagcaaattcttatggacataatacgctgtgtaaatcagccggaaaactcgaagaaactctcagaggcaaaggcttccgctggaaaagagatgattctcatgatgcagcacgtaaataccaagcaaatcaaaacaaataaccaaatagtttaacataatacattgcaggtttttccattggtgatgcaactccaactggaggtcattaagggtcatgggtttcctggaaaccgcgagggattagtccagttctcccagctcatcagagaaatggaaagggacgacatggaaatcgtacgcctgcgcagtcagatccgcgccatatacctgccccccatagctataaacaccaccaacgacatcctaatctaagcgtggggtaaatcccccaaacaagactgcaattctgccccccggtgggttttttaatatactttaagcgacttttaatatttgtagcccttttcatttgaagaaactatattcattttcaattatgccttaacgtcatctagaaaatcttattttcaaagaata

SEQ ID NO: 15638 - DNA, 1362 bp, DROSOPHILA
gccaatgcaaatgcaccattagtacgggccaccaaattgtaaatcaaaccgtcgagttcccagcgcaaaaacgccgagcaaagcagcaacaacgaaacgcagtttagggcctgcatttttgcgatagtgtgaaaagtgcgtgtgtgcaaaagaatacaaaataaagggggcgcaaaagagtcagtgaaaacaacaacacacaaaaacacaagacacaagtacacagagaaaaacgcaaacacccgcactcgcgcaaacagacacacacacacactgtgaaactcccaacgtcgagtcagcaaattgtgccacacacacaaaacgaggaaagaggaagaagagcagcagcagaaaaacataggtgctccgctcgcatcccacatctccaaaactccatcgatccgaacttcccgactacccaacccaactctccggaatgaatcgctccgacggattggtgcgtcgctcggtgaaaccccgcgaaaacggtggggcggagggtgggttgaatgccaacacgccggacgacaaccaggatgcactggacaacctaaaggaccaggaggacaatatcgacgatggcgactccaaggaaacacgactaacgctcatggaggaggttctgctgctgggactcaaggacaaggagggctacacatctttctggaacgactgcatatcaagcggcttgcgcggatgcattctcatagagcttggactgcgaggtcgcgtgatgatcgagaaatctggaatgcggcgacgtggtctatgtacaaggaaattaatactgaaatcggatcagcagacgggagacgttctactcgatgaggcacttaaacacattaaggaaacagatcccccggagacggtgcagagctggattgaatatcttagtggtgaaacctggaatccgttgaaattgcgctaccaactgaaaaatgtacgcgaacgtctggccaaaaatctggtggagaagggtgtgctcacgacggaaaagcaaaattttctactcttcgatatgacgacacatccgctgagcgacaatgttgtcaaatgtcgcctggtgaagaagatccaagattctgtgctctccaagtgggtcaacgatccacagcgcatggacaagcggatgctggcgcttatcttcctggcgcacgccagcgatgtgatcgagaacgccttcgcgccgctgaatgatgacgactatgaggtggccatgaagcgggtgcgggagctgctggatctcgacttcgaagccgagtcggccaagccgaatgcgaacgaaattctgtgggcggtgttcatggcgttcacgaaatagacgatcctctgatcctctacgctcctctcaatagcacacac

SEQ ID NO: 15639 - protein, 294 aa, DROSOPHILA
MNRSDGLVRRSVKPRENGGAEGGLNANTPDDNQDALDNLKDQEDNIDDGDSKETRLTLMEEVLLLGLKDKEGYTSFWNDCISSGLRGCILIELGLRGRVMIEKSGMRRRGLCTRKLILKSDQQTGDVLLDEALKHIKETDPPETVQSWIEYLSGETWNPLKLRYQLKNVRERLAKNLVEKGVLTTEKQNFLLFDMTTHPLSDNVVKCRLVKKIQDSVLSKWVNDPQRMDKRMLALIFLAHASDVIENAFAPLNDDDYEVAMKRVRELLDLDFEAESAKPNANEILWAVFMAFTK

SEQ ID NO: 15640 - DNA, 6077 bp, DROSOPHILA
ccaaaatggcctgttcgttcagctggccactttcggacccttccccatcggtggccggcaattcaccgaggccttggtgcagtttatttgcgaggagttccgtcgcaagtacaagctagatccgcatgagtctcgccgctcagtggccaaaatacgcactgccgccgccaattgcaaacacatcctgaccacgatgccttccacgcaactttatatcgactccctgatggacggcgttgattacaatgcccagatgtcgcgtgctcgcttcgagagcctcatacagccagtgatcaataacctcatccagcagctaggcgagtgtgtggagcaggcgcaaaaggagcatcccgggttgagtaaaatagatgacatcgttctactaggcgccacaatgcaaatccccaagcttcaggcggcagtgggagcccgcttcccggatgccaagctccacaacagccattcggcggacgaggttgtggccatcggctgcgcgcgccaagctgtgtgcctgattgaccccctcgaacagcagcttcacaaggaggaggattgcgtggtggctgaggatgacctcttcatttggcacggtaatgacgaatccaacgccaaattggtcctgggcagggggagcgttctgcctgccaaaatacggatatcactgccccaatcagaggagggaaagggtgacgacgtaagcaaagcagctgcttcgtttaagctgcgcaccggggagagcgagatcctggcccgtctgcccgacagcacgataccggaggatgggctttaccagctagaggttgaggtagatgtggacgataaggacggcaacgtggtgccgctggtgcgactgcgctgcatgtgagagccggattgtgaaccggaaccggtgcgatgtcgcctagactatttattgttgctagcctaatgattacaatacaaaaacttaataaagataaatacgcaagcggcaaacgagaaagtgtatgcatactgaaatattcattaaccttttattttcttatgttagtttgtaaaattagaatcaaaactgcaagctggcagatttctggctgcgctccagttttcgcaggaactcctcgaaaaccacgacacccttgaacatgctagtcttcttgtgatccttgatgcggctcttatcctccggcgcctccatgtagctcttgctcttatcatcgaaagcgttgatctcgtgaagcaactgggtgatcgtcggcactgtggtgggatcaaacttggccacagcactcacactaaacggaacgcacacttttccagtggctggatgaatgcaaaacggtgcctttagcaaatgattgaatcccctagtgacattgatgtccaaacgaggatagagcagtccaagctggatttcggctacaatgttcttcagcttgcgactccaggcacttgtcgtggatgttctcatagagttggcgtacttaatgaagctctcccaaacgagtcgcgagtgtgctccatcctccaaattcttttgcatataagattctagttcgccacgcgcagcgtcatcgtggaccatgttaagaagtttggtaactcccttgggagttccaaaaagattctgatcctctagtacaatctcctcgaacatgggctccactatctttaaggctctctttaggctatgatgcggtcggtctcccattgaacatctgggtgaattgccgcccgcgaaactggcataggtaataatgttaaggtattccgccacagcatagcgaccacgtccgtccaagtgacgggcttggtagtcgcaaacccagcaatggatacctcgtctacctgagaaaatccagattatgtgctcgaaaccgaaatcctcgcgcaaagcgacatccaaaaccctggcagccagcaccataaacttccagcatttcaggcatacccctgctccagagcaacaggtacgcacctcgtcgtaatccgtcatatctatatcaaaaacgagttcacgttgtacgggcgttaagccgccaggaattgaacgatggtttttgggtttggaatgcattactggtcctatgtcaatcttaataggattcctcgagcagatctccttttccaattcagcttgggtatcaaagcagaggtaacgtatgtagatatcgtcctgcagtgtaaaggaaatttcacgattggaaaagatagcatcctcggctgaaaagaataatgatcaacggctatttttaaggattgtagttgggtgtacttacatgatccatacgatagccaacggtagaagggcaggtggggaaagaggcgcctgtaatacacgggcaacatatcctgcaggacttcgggattgtaggcatgcacagcagtagtctgctgctgtggagcctggttctcctgatctgtgacttgttcgggcattttaagaaactgaaaataaaccacatatcttatgattatatccagaaaaagaacagaatacttataaccgtaaagaaatcaaaaccattcagctttttgtcgaaaccttatatttatatatttttttgctgattttttctttttcaaagagagatacacgattggagcttaaagtactgaaatatattaacgacatgcattttttaaacgtaagaggcttattaattgtcagttatgggtcgaaacaaattgaatcgagctatcgcaatggaataccgcagaatgaacctggtcagagagttcgtccgatgattggcttagcttacattggaaatctacgtctaccatgtatatatatatatctatatattactatataatgtatgtgtctactttacggctatgttagatcattgttgtagcttaaagattagagcacgaccggcgggctttcccttgttcagcatcatggagcagcgaaaggagcccagtaaattccacaactttaggccactgtgaggcgaatgtcttgcattttgtgctgctgccaggaatgcgctggctgcctgggaggcgcagtattgtagagcgttaccgaggcgatgtggctattgggcatcacctcgaaaatcaggtcttggtagccatagcaaaaggtggagccgaacggattcgctgtgttcgtcgagctggcgcgatgcagcaccactggccgctctgaggtggccaatgcgctgctgatcgcgtcccatttggtgtaggcggttatgttcacatgttcctgcttagtcggcgtcaccaaatcgtgaccactatcactcatcgaagggtgatccgcctgcagcaggaactggaactcgcagcgatggtacatattaaagttgaagtgaccggggtagttggtgtgcagaatgaatttcttgcaggtctgcgtccgtgcatcaaagagcacatcgatgccaagtgtaaagtagttaaagaaaatatcgcttcgcttgctctgtgcttgtcgattgacactcgagctgtgtatcttcattttgtcctcgctcttgaagaatatacgattgggtgctccaagactggtggccacatcctcgcagctatcgccgaagagcagctctcgcgtaaagcactgacggcgtggctccaaagcccttcctgaaccctcagtaaagagcttcagcttcagacccttcgtgtgaccaaaggcggttcggagaacagtggccgattccaaatacatctggcggtgatagcaggacaagggaagagatggtaccctgttctccaacacattgctgcctgcgtagagagacatcttggacacgacgggtgaggcgccattcaggaaaaccagagaactcagtccatgggcgtagcccgagtgcagcttgctgtccaccggaaagtagaaactcagcccgcgaaagtgtagagcaaacaattgtttggctgcatcgtaaaccccaggatgtgtggctccaaaggagtgctcgatttgctcgatactcggcagcacctccggggaattgaagtatacgccgaaataccgcagcttcaccagtttcatgttgaaaacctcgatggtcttcaaacgctgactgacgggatcaaagatcaagcgaacgccatcctgtggcaggttgataatgatgtccacgcccaggggagtggtatccgagtacagcacctggactcccttgatgatgcccacctgcgactggatgatggcgatagcctgcgagaagtgcatgcccagcacaaattcccaggcatcgcagcccagggaaatctccggcacgatctccagatctagcattttcacctgggggtttttaagggatcttggtttgttattgttgttgctgcgagtcgtcaacttactgaccttgatatgtgaaatcagttcgcgttgcgaatatatttaaacaattatatatatacgcaattgatggccaagtgtatttgttattatttcagcactttctgttttcaattgtttgctctcgttttcttattttcgctggttatgcctttatttatttttatgcaattacgcaactccaaaaaaattgtttaattcgtgggtttccaactacttgtcgtgttcttggtgaagcgattaattgtattgttttcttcaaaaaaattcggacaaagacgaaatgcgcagcagaaaaatgagataataacaaagtaatggcgttgccacatcgccgcaggcagctgattcgcgaaattgcaaaacaaattgggtgtggctttgccacccaaaaaatatgaatattaatcatgttcttagtctatctatctaatctagtggcttaaatacggttagagctacttaacagttgagttcatataattgcttaatttatttgccacatttggcaacgctggttgagaatgcaacagctgttcccatattttcgcgcgctttttatttaccaaagatagggatttagaacttactttttgatcttaactgttgttcttggaaaatcagcagttaactttggatccgcaaggctttatacttcgccctaaacagtttttgctttttattttcgtttaattatacactttttatgtagtttatatcgcacgactcctggcactgggcaagtaaataatagctgtttttgtacgactaccaacactactctgcttgctaacactaaaagtacacacatttggcggaatatgaaaatgatttgtttattacttacagcccacttttcgcttaaaactaataaaagacatataaaaccatcacatgcactatattcctatttatcagacactttggattcccgactcaggacacgcagaaccgcagttggggcagcagaaactggcatccgttaaaacatttgcattaaggcagtaatagcaataaatatgaccacagcccatgtggtggggcaatgtgggtcgctctccacagaatgtgcaggtggtgcttagtgtcatctgcggcgccaggaaagccggaccatctctatcctctaaccgtcgtccggaaaatgtccatgattttagcactctttgtagcttacggaaattgatgatgggcaacaccagtccgaggatttcctataatatacactgtaatatatatgtataataagcaaactaactaacacgcaccataaatcctccccacagcagctccctcgttaggtacttgtagccaatgtctctcctttgattgttccgcagactaatgtagtccaatcccaataagtagtccaccaaagtgggttttcgtcctgtcttcaggaaccgaaagtaattgaggatgttcagtatcagggcactgttctccacccacataatcgcctcgctaaaccattctacgcgccttgttaagcgtcgctcctcccagctcttcacgtagcccggcaagacggtcaggatgaaatggagcaccagcctggaaacggtcagcttttcggcatcgtaagccagaaccagtagctgttggccaaaagtggagcaccgcttgccgacggaaccaaaccaaattgcggattgaatgatcaagtcgagctccggttggattttgatgaacaaaacgggctgtgagagatatacagtatatattggccaattatggtagtgttcatatactcactgagatggcttgcaagttc

SEQ ID NO: 15641 - DNA, 1555 bp, DROSOPHILA
tggtagtcgtacaaaaacagctattatttacttgcccagtgccaggagtcgtgcgatataaactacataaaaagtgtataattaaacgaaaataaaaagcaaaaactgtttagggcgaagtataaagccttgcggatccaaagttaactgctgattttccaagaacaacagttaagatcaaaaatttcttaaaatgcccgaacaagtcacagatcaggagaaccaggctccacagcagcagactactgctgtgcatgcctacaatcccgaagtcctgcaggatatgttgcccgtgtattacaggcgcctctttccccacctgcccttctaccgttggctatcgtatggatcatccgaggatgctatcttttccaatcgtgaaatttcctttacactgcaggacgatatctacatacgttacctctgctttgatacccaagctgaattggaaaaggagatctgctcgaggaatcctattaagattgacataggaccagtaatgcattccaaacccaaaaaccatcgttcaattcctggcggcttaacgcccgtacaacgtgaactcgtttttgatatagatatgacggattacgacgaggtgcgtacctgttgctctggagcaggggtatgcctgaaatgctggaagtttatggtgctggctgccagggttttggatgtcgctttgcgcgaggatttcggtttcgagcacataatctggattttctcaggtagacgaggtatccattgctgggtttgcgactaccaagcccgtcacttggacggacgtggtcgctatgctgtggcggaataccttaacattattacctatgccagtttcgcgggcggcaattcacccagatgttcaatgggagaccgaccgcatcatagcctaaagagagccttaaagatagtggagcccatgttcgaggagattgtactagaggatcagaatctttttggaactcccaagggagttaccaaacttcttaacatggtccacgatgacgctgcgcgtggcgaactagaatcttatatgcaaaagaatttggaggatggagcacactcgcgactcgtttgggagagcttcattaagtacgccaactctatgagaacatccacgacaagtgcctggagtcgcaagctgaagaacattgtagccgaaatccagcttggactgctctatcctcgtttggacatcaatgtcactaggggattcaatcatttgctaaaggcaccgttttgcattcatccagccactggaaaagtgtgcgttccgtttagtgtgagtgctgtggccaagtttgatcccaccacagtgccgacgatcacccagttgcttcacgagatcaacgctttcgatgataagagcaagagctacatggaggcgccggaggataagagccgcatcaaggatcacaagaagactagcatgttcaagggtgtcgtggttttcgaggagttcctgcgaaaactggagcgcagccagaaatctgccagcttgcagttttgattctaattttacaaactaacataagaaaataaaaggttaatgaat

SEQ ID NO: 15642 - protein, 438 aa, DROSOPHILA
MPEQVTDQENQAPQQQTTAVHAYNPEVLQDMLPVYYRRLFPHLPFYRWLSYGSSEDAIFSNREISFTLQDDIYIRYLCFDTQAELEKEICSRNPIKIDIGPVMHSKPKNHRSIPGGLTPVQRELVFDIDMTDYDEVRTCCSGAGVCLKCWKFMVLAARVLDVALREDFGFEHIIWIFSGRRGIHCWVCDYQARHLDGRGRYAVAEYLNIITYASFAGGNSPRCSMGDRPHHSLKRALKIVEPMFEEIVLEDQNLFGTPKGVTKLLNMVHDDAARGELESYMQKNLEDGAHSRLVWESFIKYANSMRTSTTSAWSRKLKNIVAEIQLGLLYPRLDINVTRGFNHLLKAPFCIHPATGKVCVPFSVSAVAKFDPTTVPTITQLLHEINAFDDKSKSYMEAPEDKSRIKDHKKTSMFKGVVVFEEFLRKLERSQKSASLQF

SEQ ID NO: 15643 - DNA, 4148 bp, DROSOPHILA
gattggtatggattggattgttagtcgggcgagatgcgtagctcggcaaaggaaattggcgcatttaatgagaatggacgaaactttgttgccacaaaggatacgtcgagggatttcagcaattcccaagataataccgaccgtggcagcatgagcgatcaggcgttcgcctgttcggccagctccgtggaaagtttgcccagcgcatccggttcgagtaagtatacgaatacgaatacggatagggatagggatagcaatggagttgcggatacggatacgagggttgtagatacacaaacgggactgcctgtgtatctttgtctgagctggcaatttagagtttttgggctttgatttcgccagctgcagtagcaagccgtctgctggatgctcctttccttctcgatggccatgccgaaattcccagactgccttgctggcttggttggctggcttggctggcttgcttgcatattggtctattaacagttgtagttcttgttgcggttttttgttgctccttcaaattttgcaaacttaatgaatttttaatgcacttgctgctctggcagcccctcgggaggccaaagaggggccaagtgccgatgggcgaggcagattgcaatgtctggggcgtggttaaatgaagggcaaccgcttcctttttaatgaacaaaacttttggccaaataaaaggcaataccggaggaacaggagcaggagcaccggcttaactggatgggtgcgtgggtgggcaactttgaaaagtgcaaggaaaaatactttatttttcatgtggccaggacacaaagcaaggattagccaaaagctttggccagcaaaccaaacaaaagcaacgcaaagaaaacaacagctcgaaaaaataatgggaaacttcaagtgcatatttgaatattttcggggccaagtgaatgtacaagtatgtgtaagtgtatgtgtgtgaaaatatttgaaaagtttttaattaaccaaacgaatgagtgtgagttcgaacatgcatggctggatgtttgtccatagtaaattccttgggtcctgcggctaattggctgtgggcgcattaattggaaatttgccaggacaaactttggcccaaaaaagcagggcaaatatttatcaagcctccttctcgcctctcctgtcgtccgcaggcacccaggctctggttcgtcctggcagtccgcacagctcgatttcggccgaggatcgcacctcgatggccagctgcatctgcaaggccaaggctctcgtggatagtttgcccaatccctacgataaggaggcactcaaattcaaggtgagttgctggattaagcaaaatattgtattaaactttcatttaaagttctgcttaaaaggcagtaatcccctggccatgagaagctttcctaactacccaaaaagatttcttcaagcacggtaatctaataatattattattccatctacagaagggcgaccttatcgatgtgctgtcgatgaacgcctcgggcatttggaagggtcgatgccacggccgcgtgggccacttcaagttcatcaacgtggaggtgctgccggagcagcgaatgaagaactccagcagcaagaccctggccgccggctcgcgtttggctaattctggaaatggcagccacaatggtggaccctgctccgtggaggacctgctaattcgcattggactcaaggagtacacctccgtctttgtgctcaacgggtaagtggtgtagatgaaacaaatttaccaacaattttgttggattgtttcacctatcgttccatttgcagctacgaggacctggaactgttcaaggaactggagcccgctgacctggattacctgggcattctcaaccaggaacatcgtgccaagctgctgacggctgtgcaactgctgcatgacattgaatgtaagtctagtcaccaaaagaccgcttagattcctcaaactgtggctcattttatgcaacgatttccatgaatggcgcaccttatgaagaattgtgaaattcatcaatttagatcgaaactttattaggcctagatgaggtacaatgtagttgttatcaggtaccaaaacaacacttgataagttttatgcaaccataaatatgattttataaaacagtttgaactagtataacttgcgttcgccctctactgtgaatcattgttgaaataagccataaattgataaagcctaacctaacctactctaaacccgaaccgaacaccacacccacccacacccacccacacaccacgcatactcacagctacaaatttcgcccgcacaggctccgatgtggatatacccggatccagctcggaaaatgatgaagcccgcctgaacaacatcaatatgaagcatggagcatcgccctttggtcgacgccactttccccgcgactctggatgctacgagggatccccgctacccagctcacagacacctacccaggcggtaaactcgacggacgagtcgaacagcttggacgacgtggtgaccaagtgttccagtgaaattatgaagcgcgtggagagcgcccgccgttgcaaggacaatccgttcaaaaccactctgcccggcggaggacgactgggcaagaagtcctttctcggcggcaacggccttatggcggacgatacgctcacgcgtggagggcttagcgagaagtcgagcgattcgggggtcagcagcagttcgctatcgtcgggtccgctgaagagcagcacttaacatttgcccaccatactggcccacgagttgctgctgggcgtgggctcgggcatgggcatgggtcttggtcttggcaccatgagtcatggcaccacaggtaccctgacgccccacggagtggccactgccacctcgcctaccgcccattcggcaccgctgggtaacatctgcaacacgctgccacatgcaccaagctcctcaggcggcggcggcgtatcttcctccatggccagcaacctgccactcaaccggaatctggtaatgctgcgcaatcatctgcgcaagaatacgggcggtagcattaccggaaatggcggcgtaggagcttccggtgttggagcacagctgctgcaggatcaggacgacagactggaggatcaataacccatttactacatcaaattcttagtttagtctcccattgagttaagtgtatttcaattgctgtgattcgatagtgaaaacaaaaggccaacatgcgtctttcagttcaaatgtatagtatgtatagagagagatagacagacagttaagagagagaccggtatagtgggggatgtgtttaaaggaaagagaaagatagcaagcagagatagtaagagtcagtcaatccttcctccgataatgttggcatttacacaaatatttaacacttatataaatacagactttacagacttatatatacatacacaatctgcagaaaaggagaaattttatatacttagtgatgtaatgaaaatatttatatattttgactatattttgatttttagttagtttgaagctatgcattgaatgagacttgtatgatttgccattttattactgtttaattgctttgtgtatgcatatttctcaacgtgatattgtcaaacgtccaacttgaattgcattttaaatagattcatttctaacattttaataagagacacacatagaagttgattcctattttaaggcactaatctgagtgcaagcaatagaccaattcaattttagcaaccaagcaaaacaaaatatttataaacaaaaatagaaaacataagaagaaacagaacaccaactgccattcgaaactaattttaatttgttaatctcgtattaggacaatgtaaatggaatgaatgcatcgtgcaaatccgtcagaaacttgtaaaaattaatgccgaaaattgccaaatcgagcaaacaaaagtaatgtacgctaagcaatattttcaaatcgtagcgtgtcgtgtccggatcgtgtgtacatatataggatgatccagttaagatctattatgccacttatagcagatatcagatcgtaaacactatgagcgatttagcgttaatcaaaagcagacaatgaaattagtcaggcagcgcaaatgttttt

SEQ ID NO: 15644 - DNA, 1329 bp, DROSOPHILA
atgagtgtgagttcgaacatgcatggctggatgtttgtccatagcacccaggctctggttcgtcctggcagtccgcacagctcgatttcggccgaggatcgcacctcgatggccagctgcatctgcaaggccaaggctctcgtggatagtttgcccaatccctacgataaggaggcactcaaattcaagaagggcgaccttatcgatgtgctgtcgatgaacgcctcgggcatttggaagggtcgatgccacggccgcgtgggccacttcaagttcatcaacgtggaggtgctgccggagcagcgaatgaagaactccagcagcaagaccctggccgccggctcgcgtttggctaattctggaaatggcagccacaatggtggaccctgctccgtggaggacctgctaattcgcattggactcaaggagtacacctccgtctttgtgctcaacggctacgaggacctggaactgttcaaggaactggagcccgctgacctggattacctgggcattctcaaccaggaacatcgtgccaagctgctgacggctgtgcaactgctgcatgacattgaatgctccgatgtggatatacccggatccagctcggaaaatgatgaagcccgcctgaacaacatcaatatgaagcatggagcatcgccctttggtcgacgccactttccccgcgactctggatgctacgagggatccccgctacccagctcacagacacctacccaggcggtaaactcgacggacgagtcgaacagcttggacgacgtggtgaccaagtgttccagtgaaattatgaagcgcgtggagagcgcccgccgttgcaaggacaatccgttcaaaaccactctgcccggcggaggacgactgggcaagaagtcctttctcggcggcaacggccttatggcggacgatacgctcacgcgtggagggcttagcgagaagtcgagcgattcggggttgctgctgggcgtgggctcgggcatgggcatgggtcttggtcttggcaccatgagtcatggcaccacaggtaccctgacgccccacggagtggccactgccacctcgcctaccgcccattcggcaccgctgggtaacatctgcaacacgctgccacatgcaccaagctcctcaggcggcggcggcgtatcttcctccatggccagcaacctgccactcaaccggaatctggtaatgctgcgcaatcatctgcgcaagaatacgggcggtagcattaccggaaatggcggcgtaggagcttccggtgttggagcacagctgctgcaggatcaggacgacagactggaggatcaataa

SEQ ID NO: 15645 - protein, 442 aa, DROSOPHILA
MSVSSNMHGWMFVHSTQALVRPGSPHSSISAEDRTSMASCICKAKALVDSLPNPYDKEALKFKKGDLIDVLSMNASGIWKGRCHGRVGHFKFINVEVLPEQRMKNSSSKTLAAGSRLANSGNGSHNGGPCSVEDLLIRIGLKEYTSVFVLNGYEDLELFKELEPADLDYLGILNQEHRAKLLTAVQLLHDIECSDVDIPGSSSENDEARLNNINMKHGASPFGRRHFPRDSGCYEGSPLPSSQTPTQAVNSTDESNSLDDVVTKCSSEIMKRVESARRCKDNPFKTTLPGGGRLGKKSFLGGNGLMADDTLTRGGLSEKSSDSGLLLGVGSGMGMGLGLGTMSHGTTGTLTPHGVATATSPTAHSAPLGNICNTLPHAPSSSGGGGVSSSMASNLPLNRNLVMLRNHLRKNTGGSITGNGGVGASGVGAQLLQDQDDRLEDQ

SEQ ID NO: 15646 - DNA, 5975 bp, DROSOPHILA
gggaagcccattgtgcctctctttgtgtgcgtttgtctgcgtgtgtgtgtgagtgaatgcggagtgcctttgttttgtgtaatttaacatggcagtttgttaacaaattttatcaggcccgagatgttttgcctaccgaatgaggaaaatgagggaaatcgcttcgagagctgtaaacacagtcaagtgtgtgtgtgtgtgtgggtgccataatttatgcccagactaagtgcattatgtttggcacacgggcttttagttacgctgccccctcgtctaccttccccggggcagactcaattatttgtggcaattggcagcagcagttggcgcaactaatttgacttgagcggcgtattgtaggcaaacatatgaactcgaacatataggcatttatttaattatgaccaggggtgcacttaagctcaaatccgataatgcgttttataagccaaaatgcgtagccataataactattaattatgtggaaatatatatatatatataatcatttgaaatataaaccatttattttcgctttcaagacattaaagcagccctatgaaattgatatttatcccccatcacctatttacccttgcgttccggaataacctgtagcttagttatggttatggttgctcttaactaaccggataagcgaattaaccccttgcattattaacccggtgactagaccccatccaacgccaacatcaatgtagcatcattaaccgctctagctcttcgcatcttccacccactctgtctcacccgattttcatccaatgagccccactgtaaccttcgcacaccttatagcattcatacccacccccaactctcatcagcaaaaaaaaaaaaaaaaaaaacaacaacaaaaacgaaatagaacttggccaagtgtcttaccgatctctgctgctcgtttctcgctcttttgcaggatggacaacgcggccatttagagggcctggcatccgtctattgcgaattgctaatggctcccttcggggacattttggcaactatcgagcgggcgcgccaggcggcctgggcggagcggagtccgctgcacagtgccgcccaggtggtgggcggatcaggtggggctggcggcagcacgggcagcggcagcggtggggcggccagcggtggcagcggcggcagcagcggcgtactgcaccaccgccagcagcatggccatcgtggccattcgatgcacggcgccggtctgcccaatagtcatagccagcccatttatgtgcccggaaagtactcggtatgtatgatgatgacccggaacgaaccaaacacccacccaatctcccgcctccttaatcaccaacacaaaaaaaaaaaaaaaaatgaatgactccattagcggccccctaaggaaaatatttacaaaaccaacaatatgaacgaagaatttttggaaaaatgaaattgatgttggcgttgcttgaaaagaaataattgaaaaaaccattaagcctgtatgcgaataaatttatttaattgtgtgctaagaattgtgtaaatattttttgcttgcttgcgttctccactttcacttgcatgtagttgtagttgtgttttaacaccccccaaaagagtggccaataaaatgactaattttccattccccaaccttacagccctcgagttgtctgtccgacaaggaggaggatgagatttacggattcggctatggcgtcttcgcaccccgcgtggccagaggagggttaacacaacagcaacagctgctgcagcagcagacgctgcaaacgcaacagagcatacagcaacagcagcagcagatgcaacagcagcagcaacagttaccaattgtgccaggacaacagcagcaaggacctcatcagcatcagaccctgccaccgaatgtcgcgcatttgaactttgtgcagcaaaagtgagtaaaggatttaaatatttcgagcgctctccattgaatcgtagtgctaataaaaattctattctattccattcagctgcctgagtccgcgctcagcttatttctacgaatttccaccgacagctggtaagttgaaaagagttgaaaagtccagagaagtaaaattcttatcctggtagacgatttctaaagcttttgtgtaaaggtgataagctttgtacttaacgtttaaaggaaatctttagactttagttttttaatttatttatgaaagggccgctcagaaattgcagtaaatgtagagcacaattgtaatgaggtcagaattttaaagaagaactttaatgaattttcatagataaatagcagaagtagcatgtaatcactatcccagcagagtttgaatgctttctgttttatcgtagttatttacttgacttaaaataatcttttaaactataaaactcttaggaaagttatatctccctaccagggtttgaaaataaaacaaaaatgatgtacatcagccgccgacttgagttccttacactaattcaatttctgtcctttttatgccgatttttccccgcgactttcagagggccgcgagacaaagaaacgcaccacactggcccggctgctgaaaggcttgaagactgtcaatcgacgggatcggaacaatcaacagaatggcgcccaggccagggtaagtaaagtactccctcgatacaatttcccacccatcctttttccccccgttttcgtccagcgagtgaaactcattttcgcgcttcgttttatgaccgcaagcaaattgtttgtcctgtcccgcaagttttgtcccgtccccagcctttcatttgaatcaactgctgcggtaattctttcaatttatttgctcgcatttcgtttggtttcctttccttttctcgaattcccctgccctgcctcttctaggctgccatttttatgactttctgcgtcttgatttgaatattccgcagtcttcttgtgtagtatacttaatcttggccctggggacatgtaaatttttatgcgcgccgcgccgagcagcttctccctttttgccagctgaaaaggttaaaaatgttttgccagcggccatgtctacattgccacttctcatcctggcagtgcaccaatagcgccaggaccaaacgccatcagtttcctgcctcccactcaacgtcccccttttgggggaagttgttgtacactcgctttatctgcgccgctcacaaaggattcattcagcgcctttgattagagcaacctttggggaaaagcatcaggatcaggagcagcagcagcagcagcagaagctgagttagtccaagttggagtcgcagcagctgcgacagctggttcagctggtacagcaggggcactattcttgagccgagtctggcaatgaaactgcggccaagagcagagataacgtggcacaggacggcgacgctgctcataaataagcaaggacatgcataaatttttcacaagcagcacagaaaagaataaataaaggcgtggagagcagaaggaggaaaaatataaataataaactgccggtggggaaaaaagggcagcgaaaaatggctggctagcagcctcggaggtcctcaggaggtcctggcacacagataagcgcaggaaatgactaaggatatgtgcctaagtagcggcatcctactcaacagccatggcctggcctttcaaaatataattaaacagcactccacgtggccatgcgtttgttgcctggttcgttggctctcccacctgatttgctatttatgataagaaaacaaacgcattaaacagcgacccgtgaataagggtcgaagggtgaccctaacctgacccttgactcgttattaattaaaaattaaagccccgctgaaaggtgtgaaatacaaaatggcgtcctaatggcgataaagcacgttgctgcccgccattcaaggactcctcttgatttacgagcgtcctgttcaacctcacctcaacacccttcgcggcccacaacctttgtgcatacttgagaaagttaataagcctggcgattgaaagcacgccaagcttgtgttctttctgaaaatgaatttaaaactttgccccaaattgattccattcccgcttattttgcaggcggctaacgatcgtctgcggcactttcaaatgataaacggcggcgccggcggacagcagcacagtttcgaggagacaatccacagggtgagtagcataaataggtgattgcacctaatacaacatttagaaagagatttcgacggctttagaaactgtaaagggtaatctactaaacttagaacaatgctagtgctgcataatatcatttaaaagtgcacattcatcagcagagaaattaatatcatattcaacttaaaatctcctaccatatttctatactttgcttaaaaatgcgtgtgcgatgtgggatgtttggttgcttcgactggaatagtggcataaatatttatgctgcacatttaacaagctgctgttgctgctttgcttcttgcctctgtgtgttgcaacagctgtgacagccaacaaaattgtgcagcaacaaaaaaaatttgcacaaactgcaacaacagggtgaaactttcgcacaccgcccagcggacgaatgccaccccaccattttgactgcatttgcaatgcaatttcaacacgaaagctgcggctgttgcttttgagcacgtttacctgtaatggcatgccaccagcaacaaaaacaatcgcatacgcggcgagtgccgcagggcaaaaaggacgatgatggggaggaagaagaggaagaggaagtggcagcgtgtggatgcatgcaacatttaaaagttcattgccgtcaacattcattattaatgacagcgcgcacggagccaaactaaaaacaagcagcaaaatgcaatcaacggcgacagcagcaacagacagcagcagcaacagcagcagcaacacctgaagcaacagcaactgcaacaatagttagcaaatgcataatgcattaccaaacatcccttccaaatttgagtgcgccccttttccatttgcagcgcaaaaagtagactttaaattttcgttagcaaagaaattagttgccacattcataaataaacaaagtcactcagcaaacgaccaaagctaacaaaccattttccaattgcagttgaaagtacaagaggccatgcggaaaaaggaaaaatttcaacgtgaacacgaggaggtaagtgacatgaacatatccacatattcaaatatccagatatacagataaccaaatatcctgtgaccacaaggcaaagatttatgccttcaagatgtctattccgaaattgataaatgcacatggcaaacatgtgcagtggccagggataaatcaagcatatttgttctgggcacttttcacaaattaaataaacataaaacactcgcagccccgaggcttggctgaaattgttagccggtctggctagtgcaggctgcactattaatttcacagattccgtagccttatatttgcatgcattaaatacacaaatggatgaaacagttgcaattgcacagaccaaaggttttcctagctttttcttgccctgcagccgaaggtgcgattcgaatttataggtttgctttcacgacatatagatgcaacttaaacaagagtaaaaataaatcaaatgtataatttaaagtctcaagtgtgcgtaatagtcattagaatcattaataaaagcaggccaacgaatgtttataaggtttacgtgctccgctaaacttcttaatattcttttcgtagctatgggaaatacattcataaaatttcgcttaattatgaaacataaactcaagcaacttacggttgcagcacgcactgtttgcaccccaatttgttattgcaatgtataaatgctacgacttctatatggacaagccaattaaaaaagctattaaaaatatttgatataaaaacagcaattattccaag

SEQ ID NO: 15647 - DNA, 996 bp, DROSOPHILA
atggctcccttcggggacattttggcaactatcgagcgggcgcgccaggcggcctgggcggagcggagtccgctgcacagtgccgcccaggtggtgggcggatcaggtggggctggcggcagcacgggcagcggcagcggtggggcggccagcggtggcagcggcggcagcagcggcgtactgcaccaccgccagcagcatggccatcgtggccattcgatgcacggcgccggtctgcccaatagtcatagccagcccatttatgtgcccggaaagtactcgccctcgagttgtctgtccgacaaggaggaggatgagatttacggattcggctatggcgtcttcgcaccccgcgtggccagaggagggttaacacaacagcaacagctgctgcagcagcagacgctgcaaacgcaacagagcatacagcaacagcagcagcagatgcaacagcagcagcaacagttaccaattgtgccaggacaacagcagcaaggacctcatcagcatcagaccctgccaccgaatgtcgcgcatttgaactttgtgcagcaaaactgcctgagtccgcgctcagcttatttctacgaatttccaccgacagctgagggccgcgagacaaagaaacgcaccacactggcccggctgctgaaaggcttgaagactgtcaatcgacgggatcggaacaatcaacagaatggcgcccaggccagggcggctaacgatcgtctgcggcactttcaaatgataaacggcggcgccggcggacagcagcacagtttcgaggagacaatccacaggcaacaaaaacaatcgcatacgcggcgagtgccgcagggcaaaaaggacgatgatggggaggaagaagaggaagaggaacgcgcacggagccaaactaaaaacaagcagcaaaatgcaatcaacggcgacagcagcaacagacagcagcagcaacagcagcagcaacacctgaagcaacagcaactgcaacaatag

SEQ ID NO: 15648 - protein, 331 aa, DROSOPHILA
MAPFGDILATIERARQAAWAERSPLHSAAQVVGGSGGAGGSTGSGSGGAASGGSGGSSGVLHHRQQHGHRGHSMHGAGLPNSHSQPIYVPGKYSPSSCLSDKEEDEIYGFGYGVFAPRVARGGLTQQQQLLQQQTLQTQQSIQQQQQQMQQQQQQLPIVPGQQQQGPHQHQTLPPNVAHLNFVQQNCLSPRSAYFYEFPPTAEGRETKKRTTLARLLKGLKTVNRRDRNNQQNGAQARAANDRLRHFQMINGGAGGQQHSFEETIHRQQKQSHTRRVPQGKKDDDGEEEEEEERARSQTKNKQQNAINGDSSNRQQQQQQQQHLKQQQLQQ

SEQ ID NO: 15649 - DNA, 2777 bp, DROSOPHILA
agaagttataacccaatgacattacctataggactatcattattatcaaatcttaatgacacacatctatatgtgtatatttcatagctgaatatggccatataaatgagatgtttctcttgcaactaaacctactttttaggactatatattgtgcatacacataacacgttttcattagaaagaaagcttaataacaaagggcattccatgcttcggttaaccaatcgagcctcactgttgtacttatttttacttctggttgtactgtacttgtctttggagctggagcggatctgaacgactccttcccgggaaggaccgttccgtttcagtacgttccgtgtgcaggatatgtttacaatttgcggacacgccgaccgtcatttgattgctcccctcgcgcttgtcgaattctcggttaattcgccaggtggcttcagactgcgcattgccatcggcggcggggggaaaggattgggaggctttggggcggaaaaatgggagggcaatgataagcgttcctcgtttgtttgctcggaagcctcacggaagatgacgtgcccgggatggcccataaatgagactggccaaagcaaacagaccggatacacaggatacattcaatcaaataaggctattcgtaaccggaaaagggcaggacgactctatgtcttcctcaatctgaccaaacactccgctaatcgtatggttaataactaaaatacctgtggataatctttaaacgttttcaatatgtaagtcagtgagatacagatacagtagattgaagctttctgactatataaagtatttacttatttatgatgagcaaaattgaatgttgatgatgaacattttatttgttccagcaaattgttcaaattcaaattaaaagtaatggcgccaaagatagaattcatctgttgacgaaggctggcagctacagaacaatctaactaagctatgggattcgtttcaacacactcgtcgtagaactccactagttttgttttctcactaaattaacatgcagccccgcgatcttatgcgcattttaatattattctgcttgcgttttgcatttaactttttgattgtttacctccaaaaacataacgccgttccagtggagcagaaacggcttggaaccctcgatagaggcaaaagctggaggctataaaactcgcacagctgagttttattttgcacgcgacattgaatttgatgagatggaaaaatgcattatttgcgtagataacttgagaaaatacaagtgcagcaaatgctcggcaccctagtaagtagctattcgaacagttcactacggagataataaatgtcgcaaaatgtagctgctctgtggcttgttataagacacacagggattcgccccaatgtgcgacaagggagtccgacttgaaaaagactgaagttggctaccaggaggaacctacgcttcatgtgcccttccccaccgacgacacagttgccgcggagaagctccagcaactaggtaggtgtttaaattcgcaattatacacatttctcatagtatgatggtttccgtacagaaaactgccaggaactgcgtaatttgctccacaatccacacctgcgttcgctgctccagcagattgatgtggccatcaatgcccagtcggccatgatggccgccatgcaggagccactcttcgtggagttcgctaatgcctgccttcaagtcgtcgaaccgatgacggatgctgagcgcactgaatttgagttgtactcctgaattaagttgacacacagtctcaataaaactaagcctttattttgtaactaatagtactgtcaatccttggcagcttctagaggagcttgcattgaagaactcctggaaacttctcattgaaatccgccggtaaggttgaatcttttccataaccagggaaaacgtacaactaattatttggctcggccatttaaagttatctatctcagctggcatatcaaactagtcatcagtctacagcttcgttccttggcaatcaaactcaatcaaagtaaattgaaactggatccgagttaaaagtgatttttggatgcttcatgtgcaacttgaaaagcctatgttccccttgcactttccaggtcatggggatgggatcctgtaatgaaaaatattagaaacgaaagctaatataagttgtgaaatacttagacctcattagacatgagatacgtgtttagttccacataaatattaagtgctgtggtacggttttctcccagtttcttcgcatcgaatgtgaactccttaaatccgaaggtgcaatggtatatacccaggacctcgtgtgtgtttaggttttgtattaaggtatgaaacttaatttcgtccacacaaaccgaattttgtatataaaattcattgacattaatgtgaagatgctgatacgcatgcataccaaaattagccacctttagggtcttaatagccacatttaaaccgtaagtttcacaaaatatggatgtattttggcttatctcgatcatatttatagtgcttctcttcgcagctatgagaatctctctcagaaatccgtatctaacgtgaccacaaagaaatagcttcttcaagtgagttagacgttccagtttcgataggaaccacaccatcatttcctcctggaagcactgcagctgctctaggtttctaatccctttccagggcagttctgtgttcgaaatctggtcaatatcgaagatacccagcttcagggattttattt

SEQ ID NO: 15650 - DNA, 664 bp, DROSOPHILA
ccactagttttgttttctcactaaattaacatgcagccccgcgatcttatgcgcattttaatattattctgcttgcgttttgcatttaactttttgattgtttacctccaaaaacataacgccgttccagtggagcagaaacggcttggaaccctcgatagaggcaaaagctggaggctataaaactcgcacagctgagttttattttgcacgcgacattgaatttgatgagatggaaaaatgcattatttgcgtagataacttgagaaaatacaagtgcagcaaatgctcggcaccctactgctctgtggcttgttataagacacacagggattcgccccaatgtgcgacaagggagtccgacttgaaaaagactgaagttggctaccaggaggaacctacgcttcatgtgcccttccccaccgacgacacagttgccgcggagaagctccagcaactagaaaactgccaggaactgcgtaatttgctccacaatccacacctgcgttcgctgctccagcagattgatgtggccatcaatgcccagtcggccatgatggccgccatgcaggagccactcttcgtggagttcgctaatgcctgccttcaagtcgtcgaaccgatgacggatgctgagcgcactgaatttgagttgtactcctga

SEQ ID NO: 15651 - protein, 143 aa, DROSOPHILA
MEKCIICVDNLRKYKCSKCSAPYCSVACYKTHRDSPQCATRESDLKKTEVGYQEEPTLHVPFPTDDTVAAEKLQQLENCQELRNLLHNPHLRSLLQQIDVAINAQSAMMAAMQEPLFVEFANACLQVVEPMTDAERTEFELYS

SEQ ID NO: 15652 - DNA, 3874 bp, DROSOPHILA
agctatgagaatctctctcagaaatccgtatctaacgtgaccacaaagaaatagcttcttcaagtgagttagacgttccagtttcgataggaaccacaccatcatttcctcctggaagcactgcagctgctctaggtttctaatccctttccagggcagttctgtgttcgaaatctggtcaatatcgaagatacccagcttcagggattttatttttctggttttcaggatctgtatcaagttggtgacattgaatttgctgcagtaggagaccgtgaggttctcgagaaactcgaattcatcaaagtgtttgccagtaaactttccatgggggctaaaagttgtcagatttggaaaagttttcaacattcttggcacgtccgcatcgtttaagttaaacgaatgcgtggaaaatcgaaaatctttaagttttggaaaactacagctggtaagtgtttcgaagttagatctattattcattttgagccgcagagtgctgaggatttgttgagtactttccaggaagaatagcaaatccttgtcgctcagctgcatttcaatcaaggatatatatgcacatttgttataagcacgccacacatacggcattaatttcttaaaccggaaatgaaagtctttcagttttagttgggtcttcaagtcgagataacttagaattatcattagaacatcatcgggcagacatagtaagccaggcttggtattctgcaaagggcaaaagaaattaggaaacttgtatacttatatttctgctatattgttgcattgcggtaccataagatcggtgtttatcattgtcggtctatattcgtatgtttagctaatatcgagtccaaataaaacaataaaattataacaaaagttttatcaacatttttaaaatgatatctgttaattttgagtatttttggtgacagcagactgtcagctgcgatgttggttagtcaccgcgtgctgtaagcgaataacagtgtgctgttaggcgcacgaatccctggccagcaaaaacaaactgcaaaaacaataatccccggagttttccatctgaacgcaaaataatacacaccaaaacacagcaaaatgcagaagtacgataaaatggagaagatcggggagggcacctacggcacggtgttcaagggtcgcaaccgcgacaccatggaaatagtggccctgaaacgggtgcgactggacgaggacgacgagggtgtgcccagttctgccctccgggagatctgcctgctgaaggtcagtcggacgagcaggaagtgattccagtttataaactaaatcggcacattaccatccgtaggagctgaagcacaagaacattgtgcgcctcatagacgtcctgcactcggacaagaaactcaccctggtcttcgagcactgcgaccaggacctcaagaagtactttgacagcctcaacggggagatcgacatggccgtctgcaggagctttatgctccaactgctccgcggactggcattctgccacaggtatacctatatatgtatcagcactggattaggtcttatcttgtgtcgattatagttagaatcaagtgttatttggagtaacttcatctgtggcacatttccgaatgatatccattttatagcattgagacttaacttacgctacattatcctattttagccataatgtcctgcatcgcgatctgaaaccacagaacctgctgatcaacaaaaacggcgagctaaagctagctgactttggtctcgctagagcctttggcattcccgtgaagtgctactccgcagaagtggtgaccctgtggtaccgaccacccgatgtcctatttggagccaagctctatacgaccagcatagacatgtggtccgctggatgcattttggccgaactggcggacgctggacgaccgctgtttcctggctctgacgtgctcgatcagctgatgaagatcttccgtgtgctgggcacccccaacgaggactcctggccaggagtttcgcacctctccgactacgtggcgcttccatgtagggattctagacggattttatttatcgataccaatattaaaagcctatttatattatagcttttccggccatcacctcgtggagtcagctggtacctaggctaaactccaagggacgcgacctgctgcaaaagctgctcatctgccggccaaatcagcgaattagcgcggaggcggcgatgcagcatccctactttacggacagcagctcttcgggacattgaggtcggaaggttctttccaagccactgttttcacgacctttgattagacttaagccaaaatgcgagactttgtccagcaaagatcttttaattatatatgtatgtccttgcagtagagttcgattatagtataagataaaaagttctttataatttcattagtttgatttaccaaagcaaaaggtttgatttatgacaatccctaccaatgtgacacttaatatagccatttgagctgccaaattaacatttatcgataaaatacttattgattcagtaaaatagttttattcttaaaaatttttatgttgagtgtatcgttaagatccgaaaattgttcaaattcctagacgatatctactgtttgtgtgaatgtggaaaaaatatttgaaatcctagtttctgttttcaaagactaaaaactaggcaatacatctggtttccaaatttaatgagtgtcgacgattttcttattacatttattgtgtatttttaagaatttcgatctttctgaatgatatgagtcattaagtaaattagaataaaaaaaattgagatgtaacctagatttttaaaccaataaagacacttaccgcagcactacgtcgtcgcagcatgatgaatattttgaagtggtcgcctcaacccccggcactcaataggggttaaagtcgttctgcgcactcgcgagttagaaattgagaactttacagattgagagatttttttattgtgctacgaattgctaaccgaaccggtcggatttctgaatcttaagcaccgagtacctcggaaattcttttatatatattattagacgaataaacaaggctacctgtggatcggataattcgctatatagttaataatcggaaaactgtgttaaccgcgcagataaaacaaaagctgttatcagcagcaacccattttctaatataaataacaaataagtgctgcagaaatgacttggggatttgtaacctgcggccccaacgaggctttagttgtctctggtaaatcacacgatccttatatgctcaaaataatgtcaaatcgattaaataaataagtcagtgaataaaaatgaaattgtcacgcacacacacatatatatacaccccaccccaagtgacgtcactatcgatttttgtgtaccgcaaatgttgttgttgggataacaggggaagaagctgaatatgcggcagtccgaagccatgcgtgcgcatttgaacggcgttgcggtgctgttatccaaatgctgcaatgttttgtaaacaaagtgttttttgtttgttttctgcgcagggtgctgctacatgaagccgcttttggtgccgggaggacgagcattcgtttggccagtgggccagcaggttcagcggtgagttttaaccggcttagaccaggggttccaacgaaaagccacaggttagggaggcgctaaaaagcgcgggtattcgaaatattattcgtaagaattcggttttattaaaatatattaaattataataaaataatcttattttatcagataatatttagttaatatttctggcttcgtatctgagtccctagtcttaagataacaagccctcagatgtt

SEQ ID NO: 15653 - DNA, 1588 bp, DROSOPHILA
taggcgcacgaatccctggccagcaaaaacaaactgcaaaaacaataatccccggagttttccatctgaacgcaaaataatacacaccaaaacacagcaaaatgcagaagtacgataaaatggagaagatcggggagggcacctacggcacggtgttcaagggtcgcaaccgcgacaccatggaaatagtggccctgaaacgggtgcgactggacgaggacgacgagggtgtgcccagttctgccctccgggagatctgcctgctgaaggagctgaagcacaagaacattgtgcgcctcatagacgtcctgcactcggacaagaaactcaccctggtcttcgagcactgcgaccaggacctcaagaagtactttgacagcctcaacggggagatcgacatggccgtctgcaggagctttatgctccaactgctccgcggactggcattctgccacagccataatgtcctgcatcgcgatctgaaaccacagaacctgctgatcaacaaaaacggcgagctaaagctagctgactttggtctcgctagagcctttggcattcccgtgaagtgctactccgcagaagtggtgaccctgtggtaccgaccacccgatgtcctatttggagccaagctctatacgaccagcatagacatgtggtccgctggatgcattttggccgaactggcggacgctggacgaccgctgtttcctggctctgacgtgctcgatcagctgatgaagatcttccgtgtgctgggcacccccaacgaggactcctggccaggagtttcgcacctctccgactacgtggcgcttccatcttttccggccatcacctcgtggagtcagctggtacctaggctaaactccaagggacgcgacctgctgcaaaagctgctcatctgccggccaaatcagcgaattagcgcggaggcggcgatgcagcatccctactttacggacagcagctcttcgggacattgaggtcggaaggttctttccaagccactgttttcacgacctttgattagacttaagccaaaatgcgagactttgtccagcaaagatcttttaattatatatgtatgtccttgcagtagagttcgattatagtataagataaaaagttctttataatttcattagtttgatttaccaaagcaaaaggtttgatttatgacaatccctaccaatgtgacacttaatatagccatttgagctgccaaattaacatttatcgataaaatacttattgattcagtaaaatagttttattcttaaaaatttttatgttgagtgtatcgttaagatccgaaaattgttcaaattcctagacgatatctactgtttgtgtgaatgtggaaaaaatatttgaaatcctagtttctgttttcaaagactaaaaactaggcaatacatctggtttccaaatttaatgagtgtcgacgattttcttattacatttattgtgtatttttaagaatttcgatctttctgaatgatatgagtcattaagtaaattagaataaaaaaaattgagatgtaacctagatttttaaaccaataaagacacttaccgcagcact

SEQ ID NO: 15654 - protein, 294 aa, DROSOPHILA
MQKYDKMEKIGEGTYGTVFKGRNRDTMEIVALKRVRLDEDDEGVPSSALREICLLKELKHKNIVRLIDVLHSDKKLTLVFEHCDQDLKKYFDSLNGEIDMAVCRSFMLQLLRGLAFCHSHNVLHRDLKPQNLLINKNGELKLADFGLARAFGIPVKCYSAEVVTLWYRPPDVLFGAKLYTTSIDMWSAGCILAELADAGRPLFPGSDVLDQLMKIFRVLGTPNEDSWPGVSHLSDYVALPSFPAITSWSQLVPRLNSKGRDLLQKLLICRPNQRISAEAAMQHPYFTDSSSSGH

SEQ ID NO: 15655 - DNA, 3037 bp, DROSOPHILA
tatgaatgctgtacatgatgccttgccacgaatttttgacttaagtcccccattcgcgagaccgcaaactcgtgaaagtttgctagccctaatgttggaaatttgttaatttttcgttagcctcgaaagcgagtgcaattacatgccccactgaggctgtggtcctaagtaccaaatcgtgtcgcgaaacgatgcgtatacgtaatgtgcgtatacgtaatactccatactccaactcgactaagcccaagtggctattcatccgtatggccgggttgctcgtctctattttcgtagagttttcgagaatttatacgcacaattgccacaaagcaaatatatttgaaaattaattccttgattatgtggctgtggcggcaagcaactttaaactatcaaacaacacattttcacttagctttgaccaatgcaacacatattaataatatatgcctctaaaaatggcattcaaaattatattttaagctaacatttatgacgcgtgtgcaaaattactggaaattactgcattattaatagtcgcaagtttacaagtgccgcccattattaagagcttccgttcgatgactctatcgttgtcattataaagaccaattgctggtggtctatataaatttttaaccagccctaggcaaatatgtgtgccactcctgtgcaatacaatcgcttcttcgcgttgcattgttagttcacaaaactgaattatttatttggcttgaggaaaggtgctgaacacatatgccatatatagatacatatatgtatatactacgtagtaactgaacacaataataaaaataaaacgaaacgaggtgagtgccaacagtttgtggcaaaccaaatgtgggggggtatgtgagtatctcgccgtgtgtcatgtgcgccatgtcggatcgggtcgttcgcctttatttgatttttactgttccactgcaagtcgattgcctaatctcgggggctgcgttgtgttgtcgggctatcagaaatattcgcccaccgccctcagcgttatctgctccacctgagtgtgcggtggcgtggatagggcgtacagtacagcctgagcgacgtcgtccgcctggaggattacctcgcccagcttggccttcgtttcgtccggaacgatctcggtggccacccagccgggattgatgctctgcaggattggaaaatttatgcaaatattattgactcaatgagttattaaaaaataattctattaaattaaattcgatttgggaaagcgtttataacgaggttatactgtaccaaagcagctgtgcttatcgaaatgctagtttatgtttgagcaggtacttattatttatggatttttacaactttttgcggagatcatagccggtaaatggttttcgttttgttattgattgctaaccaatttgatgtgcccacaaatttcttttgctcaccgtggtcttaatttttgatccttgattgattagctcctgtcggcagatctcctggacggcagtcagggcaaatttgctgggcgtgtacgcatttaggctctcatccgccggatctggcttataaccggccactccggccgtgctattcacaaagatcagatgtccagccacctggcggcgtctcatgctgctggcggccaatttggtgcagtaaatgctgcccatgagattcgtctgtagtatgttgttgatgtccttggtgggcatatcgattagctggccacccagcacaatgcccgcattattgatcagcacatcgatgccgcccagttccttttcgatccactcgaacgctgtgtccacctgcaactcctgcgatacatcgcatttgtgctgatggaagcgcatcctctgctccgccggcaaagattggcgcagctgctcgaggcgatcggtgcgtcgggccaggccaaccacctgtagaccggctgccaccaaaagccgggcacaggctgctccgattccggaactggcgccactgataacggccacgcgattctgccaacgatccatcgctcacgaatttcggcgctcaactgaggccgcagtacagccgatgatcgggttatatgcattcggtggagcttatcgcagcgtcgtgatagctctctctctctctctctttgtgcactgagagaaatgcccatgatgattatgtattaaatgtattaaatatgcagtatgaagtgtaagttaatagtatagcaacaaatctatcttttaagagtattcaaagaactactgatgagttctttttctgagtgtactttcaaagcgtgtaaacgttgttggcatgacgtgtctttcgttccttgaaacagaccatccgatcagtgggactgctgacaacagatgttgtttcggcctatcaaccccaatgaattcaatatgataaccaatcattcaaggccttaagaaatgtgcttgttcatattgcaaaaacttaaaaacattgatttaaaatatatatatataaaagtatatgataatattatatcgagattatgggaagatttcaatggcttgtgtaatggtctgttgatagcttctattttaagcactgccttgggattccttgtttttaggtgcctgcagttttcatcaggagtttttttttagcctcgtttcattttcccatgcatttaaggccgaccattaaagaggccagcacgcaatgcagttaaatggcgcctcaagttatggcccacacacacaaacacacacacacactcacacatgtgcaatactgcagcggcacgtgtgtgttagtgagtgggtatctgtgtgtgtgtgacgggtttatcgcccgcacacacgcttgacatatttttgtgcagcaccgctggcttttgtttttttttttttttttgttttttatgtccgctcgtaacattcaagagatgcttaaatggcaacaataaggcaacaaaagggatatcccctttgcttggctccatttgccgcatccagttgcaacatgttgcaagtgccaatgcccatcaaatcacaactgtggccattttgcc

SEQ ID NO: 15656 - DNA, 763 bp, DROSOPHILA
aaattcgtgagcgatggatcgttggcagaatcgcgtggccgttatcagtggcgccagttccggaatcggagcagcctgtgcccggcttttggtggcagccggtctacaggtggttggcctggcccgacgcaccgatcgcctcgagcagctgcgccaatctttgccggcggagcagaggatgcgcttccatcagcacaaatgcgatgtatcgcaggagttgcaggtggacacagcgttcgagtggatcgaaaaggaactgggcggcatcgatgtgctgatcaataatgcgggcattgtgctgggtggccagctaatcgatatgcccaccaaggacatcaacaacatactacagacgaatctcatgggcagcatttactgcaccaaattggccgccagcagcatgagacgccgccaggtggctggacatctgatctttgtgaatagcacggccggagtggccggttataagccagatccggcggatgagagcctaaatgcgtacacgcccagcaaatttgccctgactgccgtccaggagatctgccgacaggagctaatcaatcaaggatcaaaaattaagaccacgagcatcaatcccggctgggtggccaccgagatcgttccggacgaaacgaaggccaagctgggcgaggtaatcctccaggcggacgacgtcgctcaggctgtactgtacgccctatccacgccaccgcacactcaggtggagcagataacgctgagggcggtgggcgaatatttctga

SEQ ID NO: 15657 - protein, 249 aa, DROSOPHILA
MDRWQNRVAVISGASSGIGAACARLLVAAGLQVVGLARRTDRLEQLRQSLPAEQRMRFHQHKCDVSQELQVDTAFEWIEKELGGIDVLINNAGIVLGGQLIDMPTKDINNILQTNLMGSIYCTKLAASSMRRRQVAGHLIFVNSTAGVAGYKPDPADESLNAYTPSKFALTAVQEICRQELINQGSKIKTTSINPGWVATEIVPDETKAKLGEVILQADDVAQAVLYALSTPPHTQVEQITLRAVGEYF

SEQ ID NO: 15658 - DNA, 4826 bp, DROSOPHILA
ttcgcacctctccgactacgtggcgcttccatgtagggattctagacggattttatttatcgataccaatattaaaagcctatttatattatagcttttccggccatcacctcgtggagtcagctggtacctaggctaaactccaagggacgcgacctgctgcaaaagctgctcatctgccggccaaatcagcgaattagcgcggaggcggcgatgcagcatccctactttacggacagcagctcttcgggacattgaggtcggaaggttctttccaagccactgttttcacgacctttgattagacttaagccaaaatgcgagactttgtccagcaaagatcttttaattatatatgtatgtccttgcagtagagttcgattatagtataagataaaaagttctttataatttcattagtttgatttaccaaagcaaaaggtttgatttatgacaatccctaccaatgtgacacttaatatagccatttgagctgccaaattaacatttatcgataaaatacttattgattcagtaaaatagttttattcttaaaaatttttatgttgagtgtatcgttaagatccgaaaattgttcaaattcctagacgatatctactgtttgtgtgaatgtggaaaaaatatttgaaatcctagtttctgttttcaaagactaaaaactaggcaatacatctggtttccaaatttaatgagtgtcgacgattttcttattacatttattgtgtatttttaagaatttcgatctttctgaatgatatgagtcattaagtaaattagaataaaaaaaattgagatgtaacctagatttttaaaccaataaagacacttaccgcagcactacgtcgtcgcagcatgatgaatattttgaagtggtcgcctcaacccccggcactcaataggggttaaagtcgttctgcgcactcgcgagttagaaattgagaactttacagattgagagatttttttattgtgctacgaattgctaaccgaaccggtcggatttctgaatcttaagcaccgagtacctcggaaattcttttatatatattattagacgaataaacaaggctacctgtggatcggataattcgctatatagttaataatcggaaaactgtgttaaccgcgcagataaaacaaaagctgttatcagcagcaacccattttctaatataaataacaaataagtgctgcagaaatgacttggggatttgtaacctgcggccccaacgaggctttagttgtctctggtaaatcacacgatccttatatgctcaaaataatgtcaaatcgattaaataaataagtcagtgaataaaaatgaaattgtcacgcacacacacatatatatacaccccaccccaagtgacgtcactatcgatttttgtgtaccgcaaatgttgttgttgggataacaggggaagaagctgaatatgcggcagtccgaagccatgcgtgcgcatttgaacggcgttgcggtgctgttatccaaatgctgcaatgttttgtaaacaaagtgttttttgtttgttttctgcgcagggtgctgctacatgaagccgcttttggtgccgggaggacgagcattcgtttggccagtgggccagcaggttcagcggtgagttttaaccggcttagaccaggggttccaacgaaaagccacaggttagggaggcgctaaaaagcgcgggtattcgaaatattattcgtaagaattcggttttattaaaatatattaaattataataaaataatcttattttatcagataatatttagttaatatttctggcttcgtatctgagtccctagtcttaagataacaagccctcagatgttaaatgtccgccaatcttccccagaatttcgttgaacacgatgaccctccaggtagagagtccttgcgtgtacaccagccaaggagtgcccatctcggtgacaggcattgcacaggtgaaggtccagggtcagaacgaggacatgctgctgaccgcctgtgagcagttcttgggcaaatcagaggcagagatcaaccacatcgccttggtcaccctggaggggcatcagcgtgccatcatgggttcgatgaccgtggaggagatctacaaggaccgcaagaagttcagcaagcaggtgtttgaggtggcctccagcgatttggccaacatgggaataaccgtggtttcctacaccatcaaggatttgcgcgatgaggaggtgcgtagttccaaccgattactttttaccactctccccgcacaactaacccaatcatcagcagtgatgggaataggttctgtattttatatatatattagttttggttttgtatacttgaacaaaaatttatttagcaattctgcagtgattctatatatattcaaacttattttctattttagattttcttttttttattcgattttcccatcactgtgtaccggcttcaaagctcccttttttcaaataacctcttgtatatatgtgaatatatatatttcttgcatgtccacatggatcctctgtagggcgactcaaaggtgcgtatgtccgcccaaccgcctgtgcgtggaatcgttgggacacgtccatcaaattcagcttcttgtgtaactatcgggatactaactcctcgcgttcaatttccattttcagggctacctgaggtcattgggtatggcccgcacggcggaggtgaagcgcgatgcccgcattggcgaggctgaggcccgagcggaggcccacattaaggaggccattgccgaggagcaacgcatggccgcacgcttcctcaacgataccgatattgccaaggcccagcgcgactttgagctgaagaaggcagcatacgatgtggaagtgcagaccaaaaaggccgaggccgagatggcctacgagctgcaagcggccaagaccaagcagcgcatcaaggaggagcagatgcaggtgaaggtgatcgagcgcacgcaggagattgccgtccaggagcaggagatcatgcgccgcgagcgagagctggaggccaccatccgccgaccggccgaggcggagaagttccgcatggagaaattggccgaggccaacaagcagcgcgtggtcatggaagccgaggccgaggctgaatcggttagataccatctaaatatttgcttatagactacgattaactgaagcatctccatcttctttgcaacagatcaggattcgtggtgaggctgaggcctttgccattgcggccaaggctaaagcagaggccgagcagatggccatgaaggcagaggcctatcgtgagtaccgtgaggctgccatggtggagatgctcctggacacactgccaaaggtttgtcaatggttagattaaaagaatctataatttattctatgttgaatctaattcgcaggttgccgccgaggtggctgctccactgtcacaggctaagaagatcacgatggtgtccagcggaactggcgatatcggtgctgccaagctgaccggcgaggttctgtcgatcgtcaacaaagtgccagagctggtcaagaacataaccggcgtggacattgctcgggtacgttccaattctgaatttatctaacttcagagctcgtcgaggtgaatgaatgacgacgcaatcgaaaccaaaacaaatggcaatcaaaagactttgtagacaggaggacgctgctttcgtttgctaccttcgtttgatttgagccttgttttgcgatataaattccctggtttcgattcactttacgtttcctttctcttcatttcagtctgtgcatgctggctaaaaaagtacccaaaagaaaaccaaaaacacacaaaattatgtactcttcaaaacgaaaataagaaaacaaaaaagaaattacgctatattgaacgatcgaatacttcaaaactgaaatcgaacgcatttaaatttctttataattaatatattattgaatctttgtgctaacccgacaaattttgcaacatgttttacacacacactcagagagaggagcaaaaatattttgtattacatgtataatgtatttatataagtgtattgcacaaagcgtggaataaatattcttccttggatcaacaaattgagtttattttaatgggtcggcaaatataaaggaagttgaaattttaaaataccaaaggttttggcggttattccacattgccacacttttcaatttcgcatatgcgctgccaccttttgatataaatacgttgggcaaccagcgttgccatgccttttaattaatccataaacgatacgtcttcagttattttataatgttttattaattttaaatatattattattaatgtattaatcagccaattgtttctgatgaagcattgaagttggcttctctcagataacttcagctttagtgaaagttatgaaaaggaatggaataagagaatttgtaggcatttatatataatagcattgttatcacaaaatatatattatatattcaagacgcaaaaaacaatcgatgcgatataagaagttgaatacatcgatagtttcgataggttgatgttgtaccatcactaatagcagctctgtccagctgtgcggataaaaaatcataatcagaatatcagtattataacgcacattactcccaagagtgtaatctgaaaacccacttgagttaagacaaatcctagaaaatagaaaaccataaatattgtttccgctcaacaaaacaaacacaaagaaaacaattgcggcagtgggaaggaaaaaagttccgccttcaaaagaggaatcaagtggtaaaaactg

SEQ ID NO: 15659 - DNA, 1510 bp, DROSOPHILA
ttgctaaccgaaccggtcggatttctgaatcttaagcaccgagtacctcggaaattcttttatatatattattagacgaataaacaaggctacctgtggatcggataattcgctatatagttaataatcggaaaactgtgttaaccgcgcagataaaacaaaagctgttatcagcagcaacccattttctaatataaataacaaataagtgctgcagaaatgacttggggatttgtaacctgcggccccaacgaggctttagttgtctctgggtgctgctacatgaagccgcttttggtgccgggaggacgagcattcgtttggccagtgggccagcaggttcagcgaatttcgttgaacacgatgaccctccaggtagagagtccttgcgtgtacaccagccaaggagtgcccatctcggtgacaggcattgcacaggtgaaggtccagggtcagaacgaggacatgctgctgaccgcctgtgagcagttcttgggcaaatcagaggcagagatcaaccacatcgccttggtcaccctggaggggcatcagcgtgccatcatgggttcgatgaccgtggaggagatctacaaggaccgcaagaagttcagcaagcaggtgtttgaggtggcctccagcgatttggccaacatgggaataaccgtggtttcctacaccatcaaggatttgcgcgatgaggagggctacctgaggtcattgggtatggcccgcacggcggaggtgaagcgcgatgcccgcattggcgaggctgaggcccgagcggaggcccacattaaggaggccattgccgaggagcaacgcatggccgcacgcttcctcaacgataccgatattgccaaggcccagcgcgactttgagctgaagaaggcagcatacgatgtggaagtgcagaccaaaaaggccgaggccgagatggcctacgagctgcaagcggccaagaccaagcagcgcatcaaggaggagcagatgcaggtgaaggtgatcgagcgcacgcaggagattgccgtccaggagcaggagatcatgcgccgcgagcgagagctggaggccaccatccgccgaccggccgaggcggagaagttccgcatggagaaattggccgaggccaacaagcagcgcgtggtcatggaagccgaggccgaggctgaatcgatcaggattcgtggtgaggctgaggcctttgccattgcggccaaggctaaagcagaggccgagcagatggccatgaaggcagaggcctatcgtgagtaccgtgaggctgccatggtggagatgctcctggacacactgccaaaggttgccgccgaggtggctgctccactgtcacaggctaagaagatcacgatggtgtccagcggaactggcgatatcggtgctgccaagctgaccggcgaggttctgtcgatcgtcaacaaagtgccagagctggtcaagaacataaccggcgtggacattgctcggtctgtgcatgctggctaaaaaagtaccc

SEQ ID NO: 15660 - protein, 426 aa, DROSOPHILA
MTWGFVTCGPNEALVVSGCCYMKPLLVPGGRAFVWPVGQQVQRISLNTMTLQVESPCVYTSQGVPISVTGIAQVKVQGQNEDMLLTACEQFLGKSEAEINHIALVTLEGHQRAIMGSMTVEEIYKDRKKFSKQVFEVASSDLANMGITVVSYTIKDLRDEEGYLRSLGMARTAEVKRDARIGEAEARAEAHIKEAIAEEQRMAARFLNDTDIAKAQRDFELKKAAYDVEVQTKKAEAEMAYELQAAKTKQRIKEEQMQVKVIERTQEIAVQEQEIMRRERELEATIRRPAEAEKFRMEKLAEANKQRVVMEAEAEAESIRIRGEAEAFAIAAKAKAEAEQMAMKAEAYREYREAAMVEMLLDTLPKVAAEVAAPLSQAKKITMVSSGTGDIGAAKLTGEVLSIVNKVPELVKNITGVDIARSVHAG

SEQ ID NO: 15661 - DNA, 4623 bp, DROSOPHILA
aatttatctaacttcagagctcgtcgaggtgaatgaatgacgacgcaatcgaaaccaaaacaaatggcaatcaaaagactttgtagacaggaggacgctgctttcgtttgctaccttcgtttgatttgagccttgttttgcgatataaattccctggtttcgattcactttacgtttcctttctcttcatttcagtctgtgcatgctggctaaaaaagtacccaaaagaaaaccaaaaacacacaaaattatgtactcttcaaaacgaaaataagaaaacaaaaaagaaattacgctatattgaacgatcgaatacttcaaaactgaaatcgaacgcatttaaatttctttataattaatatattattgaatctttgtgctaacccgacaaattttgcaacatgttttacacacacactcagagagaggagcaaaaatattttgtattacatgtataatgtatttatataagtgtattgcacaaagcgtggaataaatattcttccttggatcaacaaattgagtttattttaatgggtcggcaaatataaaggaagttgaaattttaaaataccaaaggttttggcggttattccacattgccacacttttcaatttcgcatatgcgctgccaccttttgatataaatacgttgggcaaccagcgttgccatgccttttaattaatccataaacgatacgtcttcagttattttataatgttttattaattttaaatatattattattaatgtattaatcagccaattgtttctgatgaagcattgaagttggcttctctcagataacttcagctttagtgaaagttatgaaaaggaatggaataagagaatttgtaggcatttatatataatagcattgttatcacaaaatatatattatatattcaagacgcaaaaaacaatcgatgcgatataagaagttgaatacatcgatagtttcgataggttgatgttgtaccatcactaatagcagctctgtccagctgtgcggataaaaaatcataatcagaatatcagtattataacgcacattactcccaagagtgtaatctgaaaacccacttgagttaagacaaatcctagaaaatagaaaaccataaatattgtttccgctcaacaaaacaaacacaaagaaaacaattgcggcagtgggaaggaaaaaagttccgccttcaaaagaggaatcaagtggtaaaaactgcataaataagtcaagcatagccgcagaactgtagataatatcacaattaagtgatgaccagtagacttgttgactttttcagacttcatatcgctgcctgtgtttattgattttgtttttggcctgttatcaacaacctgccgcccactcccaccctccccctctccacactcgacaaatgtattcttatttacccaacaaacaattggttttcaaagccacatatcttatcagtcagtccccccgaaatcttgctaatttgtttatacttatctgatcaccgcgatcggtgataatcccaaattagatggagatatctgctcaagcagatgttaattgaccgatggctttgttaatcgaattgctgctacctaacaaaagcgattcgattcaaacgtgttaaatagtaatttgcgccttgaataatgccgcacccactcgtcaacaaaaaatcaataaatgcagatccctaccaactttatgcactcacacactccctccaatttttccattctagctaaaatgactacctaaagcccaaggtttatctgtgtaaaattcacggaccacggaccttttatcacttttgaaagcagaacctaaagacaccgcaacaatgaaactaaaacgctggcggcacaagcgtaaatagttatttgtcaacggataaccgaaggagcaagacatcccccaaaaggcgggaaaagaagctaagttcgtttggaaaacattcgaaaaacaggcgaataatcatgctaggtcgcacacaacgtctcctgttgggcatatcaatactggtactagtcgatgtggtttgggtctcatccagtgagctgacaaaggtgataattttgttttgaaaacatttggaaatcggtttgaattttgatatactttactagttcctgtacaatgaggccaattttgacaagcccttcttctgcacatacttcaaaacctccatgttcagcatttacctgctagtcatcggtatcctggctccctggaaagagtcatgcgagcgacagaatggaaactatgctgtaagtaattagatatcctaattataaaccctactaagtgattcttcttcccttagatgatggagcagaatgcagatgacgagaattattactccaatcaggctgttttggtaggcaaatcatacaatcatatattatgtacaaaaagatgtaacctttgtctatacctactagggagacccaacctatgtgcccatcagatcgcctcacttaggagccggaggacaatccaatggcacctcaaactccatatcgggcaccgaaagcgatgattcaagtgtaagaagtgtgcgcttcagcaagatggccgaagtcagagagatgtctgcccacgaagccaccgatgccttaatggccaggctttcgtatgccgccagcttgagaattaggcgccaaaagacacaccacaaaacggcaaagactgcgctactcttttgtctgctctggtttgcggccaattacttctttcagctggccctggaaatggacgaggcggccatgataacactggttagctcaacatcgtcattcttcattatctgcctggcagccgtatttccctcggcaacaggtgacaagctgactatcaccaaggtgattgcggtggccatgaacattggcggagtggtggccatcaccatgaacgacctacacgataccaagatgaccagaggcgtccttttagcccttttcagcgctttcttctatgccgcctatttggttttcgtgaagcgaaaaagcgatacggaggagaaggtcgatataccattgtttttcggtgagtaaaattgctaaattttgagtttgatcgctgcttatcttctgactccctttttaggttttgttggcctatggaatatgttgcttttatggccaatattctttatcctccacttcaccaaaatagaaacctttgagctgcccagtcaagggcagtttgcccttctatttttgaacggcttagttggcactgtgctgtcggaggctctttggctgtggggctgctttttgacatcctcactgattggcacgctggcaatgtcgctacagattccgctagccatcctgttcgatgtcctgctgaagaacaaaccgtattcgccgatgttctacatgggctcgatacccatctttgtggccctggtgttcgtttcgctattgatgcgtaacgacgattccgacccactgatgaagctctttaggattgtgtatagaaaagtctgccggtgccataagccaagcattgttaggtgagtctggtgttctggcaatatgaactgtcttttaacagcataatttcttgcctagggtcaacgatgacgaacaacaggagtcgctgataagcaacagcgattaaacaatagcaataatcacgaatggaggctttttgtaaaagtcgggcttctacaaactttgaatgttgctcattgcaatgcaatctaaaacttggctgtttacgagttcgtttcgaatcgttcttaaatcatattgggacaagtcctgcacaatttcccttcggccctgatttgtgtttctcatttgtgcatttttcgttggatattattgtgttgcgaacttacgtacaactatttattataatcttacaagtgtatttattctctgtaaatagctttagatcccacgaataccgtttatctatgtgatagtctacaacgttttgctgaactccacctataatttatttcctcggtattcacactgcgcttagctgtataattgttgacttctcaatacaagatgaaaaaacatatacacatattgataactaattacaataaataaaacttgtctaccgtaagctttaaaatctgctgaatctaaggttaatagccatacggtggcagcggttaatcgtatgtaaattagaaaccattactttttcatttttaaataatgtcgattacacgatttctgagtttatgctttatggaacttatttatttttgataagaactgatttttcatgattcatagaactaatttattttgtattttaccattaagaaccgatttttatattgtacttaatcatgaactttcccaaagttaaaagtcattattttcaattaaataattcactttaattttcatcctatgtcctaaaaatatatatttacaatatgcgactcctaatgtctagaacttaaataggtatgtactcaataagatcacacaagttcatttctgtactgaaagcgcacacaaagtggcatctgtgtggcccagagtggcacggcgaatgcttcagttccaatttatccatgcctccgacggatcacaccgctgtcgttggcaatggagcaggaggaccagatccggagctgggtggaatctgt

SEQ ID NO: 15662 - DNA, 1729 bp, DROSOPHILA
tccagctgtgcggataaaaaatcataatcagaatatcagtattataacgcacattactcccaagagtgtaatctgaaaacccacttgagttaagacaaatcctagaaaatagaaaaccataaatattgtttccgctcaacaaaacaaacacaaagaaaacaattgcggcagtgggaaggaaaaaagttccgccttcaaaagaggaatcaagtgctaaaatgactacctaaagcccaaggtttatctgtgtaaaattcacggaccacggaccttttatcacttttgaaagcagaacctaaagacaccgcaacaatgaaactaaaacgctggcggcacaagcgtaaatagttatttgtcaacggataaccgaaggagcaagacatcccccaaaaggcgggaaaagaagctaagttcgtttggaaaacattcgaaaaacaggcgaataatcatgctaggtcgcacacaacgtctcctgttgggcatatcaatactggtactagtcgatgtggtttgggtctcatccagtgagctgacaaagttcctgtacaatgaggccaattttgacaagcccttcttctgcacatacttcaaaacctccatgttcagcatttacctgctagtcatcggtatcctggctccctggaaagagtcatgcgagcgacagaatggaaactatgctatgatggagcagaatgcagatgacgagaattattactccaatcaggctgttttgggagacccaacctatgtgcccatcagatcgcctcacttaggagccggaggacaatccaatggcacctcaaactccatatcgggcaccgaaagcgatgattcaagtgtaagaagtgtgcgcttcagcaagatggccgaagtcagagagatgtctgcccacgaagccaccgatgccttaatggccaggctttcgtatgccgccagcttgagaattaggcgccaaaagacacaccacaaaacggcaaagactgcgctactcttttgtctgctctggtttgcggccaattacttctttcagctggccctggaaatggacgaggcggccatgataacactggttagctcaacatcgtcattcttcattatctgcctggcagccgtatttccctcggcaacaggtgacaagctgactatcaccaaggtgattgcggtggccatgaacattggcggagtggtggccatcaccatgaacgacctacacgataccaagatgaccagaggcgtccttttagcccttttcagcgctttcttctatgccgcctatttggttttcgtgaagcgaaaaagcgatacggaggagaaggtcgatataccattgtttttcgaaacctttgagctgcccagtcaagggcagtttgcccttctatttttgaacggcttagttggcactgtgctgtcggaggctctttggctgtggggctgctttttgacatcctcactgattggcacgctggcaatgtcgctacagattccgctagccatcctgttcgatgtcctgctgaagaacaaaccgtattcgccgatgttctacatgggctcgatacccatctttgtggccctggtgttcgtttcgctattgatgcgtaacgacgattccgacccactgatgaagctctttaggattgtgtatagaaaagtctgccggtgccataagccaagcattgttagggtcaacgatgacgaacaacaggagtcgctgataagcaacagcgattaa

SEQ ID NO: 15663 - protein, 426 aa, DROSOPHILA
MLGRTQRLLLGISILVLVDVVWVSSSELTKFLYNEANFDKPFFCTYFKTSMFSIYLLVIGILAPWKESCERQNGNYAMMEQNADDENYYSNQAVLGDPTYVPIRSPHLGAGGQSNGTSNSISGTESDDSSVRSVRFSKMAEVREMSAHEATDALMARLSYAASLRIRRQKTHHKTAKTALLFCLLWFAANYFFQLALEMDEAAMITLVSSTSSFFIICLAAVFPSATGDKLTITKVIAVAMNIGGVVAITMNDLHDTKMTRGVLLALFSAFFYAAYLVFVKRKSDTEEKVDIPLFFETFELPSQGQFALLFLNGLVGTVLSEALWLWGCFLTSSLIGTLAMSLQIPLAILFDVLLKNKPYSPMFYMGSIPIFVALVFVSLLMRNDDSDPLMKLFRIVYRKVCRCHKPSIVRVNDDEQQESLISNSD

SEQ ID NO: 15664 - DNA, 15794 bp, DROSOPHILA
ttcgcctttccctttttttttgccggtcgcggcgcggcgtggaaagtggcatgtggcatgtggcatcctctgcagaagccgtcgactcgcgggtggaaagtgggccaggccagtttggagcgacgcaaccaccgcagcggaatgcagcagattttcgagtttccacttttctatgtgtccgaagctcttccagaaagctcagccgcgtcctcagccgttaaaaggataatggccaaagtaaatcacagagagtcaatgtggaaatataatttaatgctaaaaaaatcattgaagttaataaatttaaactattagacaaagtattgtatcaaaaaagtctaattgtaagctaaatacaccaaatctcattagcaactatatttttgaacataaattatatttttatacattttataaactaactctaattcaagtcaagcaaaaataaaaagttacaacatactttaaatgttttcgaacaatttttgtacaggttttacaaatttctttaatttcaaaaatataagagtttaatttttaaataatgtaacgtcaactggaattggatcctttatatttactaaagcttttttaaaagcttcctaccaacaacttggaataaagcttttgggtgaaagtccttgaaacggtgattttaaaaagtggggtgtctaaactttactaataaaactgtaaataagaataatttaaaactaaatctatatctaaatatcaatacattaatatacagattcatgaaaattcttaataccttaggatccttaaaaaaaattaagcacccatcaagatgtcactaaataagcataaatattacagagcatttggagttatgttagcaaacaaacttccaccccctattccggatgtctgacaacagtagacatggcgacggaataacaatccggagcaaccaacagctgtcagtcggtgtgaagccgatcaaaacctagccacatatagccggattctctatagcccgatgtccggaatgaaccgccacctgatctccaagggcaaggataggagcaaaatcaagatcaagggcaaggagaaggagaaggaaaggaagaaggatgaggacgacgatgggtcgcggaaggctcgggaacggggaagaagtaggcggcagtcggcaggaggcggagatcattccgtagatatgggttttaagcgcgtaaccggcgaagaccggccgagtagcatgtccatggatcgacttgacagcgatttcgccgccttcacggatcgcgccagtgatgccaacgacggcagtatcacgggtccggcggatggcaatgggaagaaggcacaaaccggcgggaagcaaaagagggcctccaagcaccgtctgaacttttccacttcgaaatcagccggctcgggtaccggtaacaaatcgcgcagtgccagcaccacaaagatcaccactggagcatcgctcattccggatctgaatttgatcatcaaccggatgcgcaacatgccggatgattcgttcgtctatatggactacatgctgccccacgacagcgagtacttcacaccgtacagcctgcgggaggtggagtacaaggatctgaacacatacgaacccttctataccgtcacccgacacggcgtcaccttctggcactgctccgagaatttcttcacgccactggaccagtggcagcaggagttcaagcagttcctcagcatcatccagatacgatccttctctatcttccggctgtggaagggtttcaaggtgagtttaatcagttggttagggatagtttaagtctttactaatgttcttccatcccttaggtatgggaaaagacgatcaagtggcggaaactgaacgaggcacgggactatctgcagaacaacctctttatcgtgattccccagctggccaaagcgatcctacgcatgcgcagcgatattgtgcagttacagcgattgaatttcgtcaatgtgtccaacattgagaactggcatccattctacttcctggagacgcacatgcgcatctatgagcagctacacaagaccttcaccgacttccgggagtttattgccaagacgatatgtgagtttaaccccaaactggagtctacatttaaccataattaatgtgttaatatagttcgagcctgcacggatgccatccaggcacgtggcttctatccggatgacgaggtcaactactatccatcgctgaaaaagatgcgtgaagcgcatagctttatggaccgagcacgaaagagagccttctgcaagaccctgaccaagtggggaaaacgcattcgacatttctagaattgttcctaatcatttaccttctccacattagtttcctcacctattgcgacatgatggtgtaccaaatgctgtaccgcatcacgaagaaaagttttgaggatttggccacttcgttcgaggtgcacgacgaagttggtccttcggaggcggatatcaataaacatgatcgggtggacaagcggatcgagaagcagcgaccacaggacaagccgcaaagtccattctttttggccatgttgcgtctactgcccgatcgcattgatatcgagccgtcggaggatattatcaggattatatttcagcgcatcacaggactcattctggagacggtcctcgaaatccacccgttcaccacggatcccttcttcacgcagtacactcagtaggttgcttaacttgtgcatccgaaatcggattaataactgaattatgtaatcttagaccctcgattatgggacgccaggaggaggtgctatacgaaggtgcccccgatttgcactatctactgcgcgccgatatacgatttcagtataaccggtaggtaaacattgacaaaataagaaatttgaataataataatacatttttcgcactagcaaaaatatgttcgtactaatacgaaaagcgtatgaaagggcgcgactttatacgcagaggttccaccaaattcgcgaaaactttgagatcgacaatagtacagatcccacggttctcaatacggaaagaggtatatatcaaaatatgatatttaagattctttatataaatcctgttcttttcagatcttcagatactgcgagcatactgcgatagatactgcaacaatgtgagggctttggatggcatcttggaatatgtattcctgggactactaaagctcacccagacgaacttcaaggacacggtgacgccggtctgttcccgactccagaacgtcctggccacatacctgcccaaattggccgaggaggagacgacaaggctgtacgaggaggcacaggatttccatggcaggatctgctacgaaccgcacgagaccctggagattgtggcccacattcgatttctggacaagtgctccaccgaactggacgggatattcgatggcatcgactatgtgcacgatctgttgctcataatcaaggactttggcatacccatcgatgacgattccaaggaggattacatggacaccgaagactatttgaataggacgcgggagacgctggaggagatccgagagaagcggcaggactttatcaatcgactcgaggatgccatgcaggatgacatagcggcgctcaaggaggatatccatgaggtggccatcgaagccctgcagccctggctgctggatgtgagttattcgaaacgaatttgtacattacttttattaagcttgataaataccccaggccaattccaaccgattgtcggtcaccaacaaattggattccatgctggaacgcctgaacaaatgccgcgagacagccgacgagttccttggctatcagaaggagttccagattgacttgaccatgtacgatgagatggccagcggcttctatgacatacggatgcgacagaatctctatcgcacgtggtccgactgggaggaatcgctggccgagtggatagtttccgatttcaacaccctaaatgtggtggatatggttgaactgaactccaagacgatcaagaactgcatgcagttccaaaagtatctgcccgaaaacaacatagtcccagttctacagaaatccgcagaggcatttaaggagaaactaccagtgatcggttacctgcgtaatcccaatttgagagccgtaagttgcggattcagatagatagtaatatatacatatataatatcccctaatcatctatcttcttagcgtcattgggcggagatcgaagatctgctgaatcgcaagttcttccaagagaaggacatcctaatccagacatacgaggatgtgcacgcattcgacgatgtcgccatcggtgaggctctgatgcagatatcctcgcaggccaccggcgaggtgcagctggagaatatgctaaagggcatcgaaaccacctggaaggaaacggaactgtccattgtaccgcaccatgacgccaaggacgtcttcatactggcgggcacagaggagttacaagccgttctcgatgattccaatgtgaatattaacacgatagccgcatccaagtttgtgggtcccatcaagagcaaggtggacgagtggatcaatgccatggaccagtttgccaagaccttcggtgggttatatattttgaactaagatttggtatccttaatcaatcaatgccgaaacagaaagctggatggactgccagggagcttggatctacctggaggccatctttgcctcggcggatattcagcgacagctgccccacgaggccaagatgttcttcacggtggacaagagtttcaaggagacggtccgccaggcaaagaaggtggctctggccctgcccaccatgtctagcgtggatgtgcacaaggtgctggtggagaacaaccgtttgctggatctcatatcacgcggattggaagcatatttggaggtgaaacgggtggtcttccccaggtaagaagtcataatcatacttatatattatatatatatatgaataccccgtagattctactttctgtccaacgacgaactgctggagatcctggcacaaactcgaattccccaggcagtgcaaccgcatctgcgcaagtgcttcgatgccatctaccgattggaatttggatcgaaggaaggcggcgacggcaagatggtggccaccaacgacatcgttgccttcctctcacccgaaggcgaaaagctgcagtttggcaagggtctgaaggctcgtggagccgtggaggaatggctcagcaaggtggaggaggccatgtttgtgtcctgcaagcggtacatgcgattcggttaccagtgctatccggccaaggagcgcgaggactggttccaggatcatccaaaccaggtggtactcaccgtctctcaagtgcagtgggccgccgacattcatcgcatctacgagggcaaggagcgcaatccccttaacattttagagaagatggccaagtttgagatcaaatgcctgaaggatctgggcgccctcgctgcgttgaccaggaagaacattagttcgctgctgcgcaagatcctgtgcgccctgatcaccatcgatgtgcacgccaaagattcggtgcgcatgctcatcgaaaaggaggtctgcaaagcgtaagtgtctgtgcctgcgaaatgttgagccaagattctaagtttcattccatcagatcggacttcaactggctaaagatgctgcgattctactgggccgatgagacggaaacggtctactcccgcatggccgccgcaaatattccatactattatgagtacttgggtgccggcggtgtcctggtgctcaccccgctgacggatcgctgctacctctgtctgatgggcgcctttcagatggatctgggcggagctccggccggaccagccggaactggcaagaccgagaccacaaaggatctggccaaggcgttggccaaacagtgcgtcgtctttaattgctcagatggcctggactacaagatgatgggacgtttcttctcgggattggcccaatgtggcgcctggtgctgcttcgacgagttcaaccgaattgacatcgaagtgctgtccgtgattgcccagcagttgatcaccatccgaacggccaaggccatgagggtgaaacggtaacacattcacacatctaaagaagttaatccccattgactaagtacttccaattccacagctttatcttcgagggtcgggagatcaagatcaatcgttcctgctgcgtcttcattaccatgaatcccggctacgccggtcgtactgagcttcccgataatctgaaggccctgttccgacccatctcgatgatggtgcccgactacgcactcatttcggaggtgattctgtactcggagggcttcgaggatcctaagattctggcccgcaagatggtgcagatgtaccagctgtgcagtcagcagctcagccagcagaatcactatgatttcggtatgcgagccgtgaagtctgtcctggtgatggctggagctctcaagagagcctcacccaatcaacgggaggatatcaccctgattgcggcattaagggactccaatatacccaagtttctggctgacgatgcggtcctgtttcgtggcatccttagcgatctgtttccgggcgtcgaactgccggactcacagcatccgcatctggaggctagcttgcgattgggtttgcggcagaagaatctccaggcggtgccgaccaccatccgaaagtgtctgcaattgtacgagacgatgtgcgtccgctggggtgtcatgttggtgggtcccaccggtggcggtaaatccgtggtgctgcatgccctcgaattcgctctctcacatctcttcgagaacgaagtgcaggacccgaactttcggcctgtggtcatccagacaatgaatcccaaggcggtgaccatgaacgagctgtacggctatgtggatctcaagacgctggagtggcaggatggcttactgggcctggcggtgcgaactgccacaacagtcgaaggtaatgatcacctgcagacatatatatatatatagatgttaaaagatcttcctaaacttccgcttcagatgagattcaccaatggatcatgtgcgatggtcctgtagatgcagtatggatcgagaacttgaacacggtgctggatgataacaagatgctgtgtctggccaactcggagcgcatcaagctgaccgcttggattcacatgctcttcgaggtgcaggatcttctgcaggcttcgcctgccaccgtttcccgttgcggcatggtctatgtggatcccggcgatctcggttggattccactgatcgacacgtggcgagaggtggacatgaagcacaagctgcccgcaccgctggccgagttctgctaccagctctttgtgggctacttcgacaaggctctgaagatcgaacggaagcgggcggtgtacaccatccaccaggtgctcggatccaaggtacgactgtgctgtgagctgaactctgcccagttcgaggcggtcaagtggtcggcaatgagtgaagagcagggcaaggaactggtgaccaagatcttcgcctgggcggtgctctgggccattgcctctaatctcaaggatgccgagaaggtctcctttgaggagcagtggagcaaggccattgcccagcatccgaatatgacgtaagaatgtttgctgtagttaccaaataccaaattatacattcctattccccgcacagcctgcccaacttcaccttgtggaactatcgcatcgacctcgagaaaatggactggggcagctggatagatatcatggcaaagtttgtcttcgatccggaaacctcttactacgacatgcaggtgccaacggtggacaccaccaaatacgggtaagtgttgtcttctaactaaatacatgaagggaaatgagtaatcccaatcccctccagctatgtgtccgatctcctgttcaaacggggtatgcccgtgatggtgactggagatacgggcgtgggcaaaacagtcctggccatcagttgcatgaaacggctgtcgcagggcaatgtcatcccagtgatcttgaacttctccgcccagacgagcagcaatcgcacccaggagatgatcgagggtccgctggagaagcgcaagaagacccagctgggtgctccggtgggcaagaccgtaatcgttttcattgacgacgtaaatatgcccaagctggatacctacggagcctcgccggccattgagttgctgcgtcaattccttgactttaagggcttctacgatcgggagaaactgtactggaaggagattttggacgtggtcctgggctgcgcctgtgctccgcctggaggaggtcgaaatccgctcactccgcgctttgtccgtcactttgccttgttctcgttgccgaaaccgaacgaggagaccctaacccagatcttcaatggcatcctgcggggtttcctgcaaacgttctcctccgcagtaagagctctctccgagcccatggtgaatgcctgtgtggatgtctatatgcgagtggctactgtaatgttgcccacaccggataaatcgcattatatcttcaatctgcgcgatctatccaagtgtatacagggtatcctccaggcgagcaatctgcactacaaccaggagaaccagatactccgactgttctaccacgagaccactcgtgtgtttcacgacagattgattaacatagaggacaagaacattttcaaggccctgatgaaggaagtatgcatggaccacttcaatcggccggtgatcaatgacaatgagccaccgatcctcttcggtgactttatggtctttggcaagccgaagaatgagcgtatctacgatgagattagggatcatacgaagctggaaagcgttctcaacgattacattgcggactacaactcggtggcggtgggtaagcaaatgaagctaatcctcttccaagacgccatggagcacacggtccgattggcgcgacttttgcgcagcgatcgcggcaatggactgctggtgggcgtggccggaatgggaaaacaatccctcacccggctggcatcgcatgtcaacgagtataactgctggcagatcgagatgcgacgcaactacgacctaaatgctttccatgaagatctgagagtcctctaccgcatcgctggagtgagtgcctaagttacattgactaagtttctttggctacatcttccgtttaaatttccaacagatcgataatcaaccggtgaccttcctattgatagacagtcagatcgtggaggaagagttcctcgaggatatcaacaacatcctcaattccggcgaagtgcccaatctattcgagggtgatgagttcgagaagatcatcttggacgcccgtgacggatgcaatgagaacagaaaagatgatgtgggtattaccaaaattgattaatttggatttaccctatcttttatctggtttagccctgcacacgagatgacatctacaagttcttcatcaaccgggtaaggaacaatctgcatgtggtcatgtcgatgagtccggtgggcgatgcctttcggcgcagatgccgcatgttcccctcgctagtcaactgcaccacgatcgattggttcaccagctggccaacggaggccctatattcggtggccctcgggttgctcacaaagattgcacccaaaatggaggatcgcatctcgctggcgagcacaaccgtctttatgcataaggtgagtgcgctttcttcgaaggaatagcctgcttcaaatgaaatcccttccagactgttgaggatgcctcagtgaagttctacaaggaaatgaagaggcactactataccacacccagtagctatctggagttgttaaagctgtaccagaatctgctgaagatcaaaaacatggagatcatagccaagagaaagcgaatcgccaatggcctaaacaagcttctggagaccaatgaagtggtaagtaactaattctccttcatccttagaagatagatccaaagttcttttttcaatcattagatcgctgtgatgggaaaagagctagaggtaatggtgccccagttggatgagaaatccgctatgatgaagtccctggtggacaatctgaccaaggagaccaagcaggcggatgccgtcaagcagagcgtgttagaggacgagatgaatgccaaggagaaggcggcggtggcccaggcgatatccgaggatgccggcaaggatctggagattgccatgccagcgctgcgcgaggcggaggaagcacttaagggtctgaccaaggcggacatcaatgaactgaagtccttcaccacgccgccggctctggtgcagttctgcatggaggccgtctgcattctgctcggtgtcaagtgagtggattaacccctttttaaattcccctatccacctattttgtccgttgcagacccacttgggcatctgccaaggccatcatggcggacataaacttcatcaagcggctgtttgagtatgacaaggagcacatgaaggaggatactctgaagaaggtcaagaagtacatcgaccacaaggacttcgtgccggctgtacgtttacttccatagctagcagagaactttgactaaacatctcgctattcacagaaattcgagaaggtctccaaggtggccaagtcgatgagcatgtgggtaatatccatggacaagttctccaaggtgtacaaagtggtggagccgaagatcaagcgaaaagaggccgccgaagcggagctcaaggaggtgatgaccgtgctgaggcagaagcaaaaggagctggccgccgtggaggccaagatccaaggacttcgcgacagtctcgaagagaagcagcgcgagttccaagtgatccaggacaacgtggacctaacctacggtaggatcaatcgggcgggtcgcttgacctccgccctttccgacgagcaggtgcgctggcgcgaaacggtcaagtccctaaccggagatctagcctgtgtgcccggtgatgtcctggtggctgccgcctgtgtcgcctatttgggagccttctcccatgaatatcgtcgggatatgagtgctctgtgggtgtccaagtgccgtgagcacaagattccctccagtcccgagttcaacttgctcaaggtgcttggagatccgtacgagatgcgacaatggaatgtggacggcctaccgaaggataacatatccattgagaatggcatatatgccaccagagctctgcgttgggccctcatgatcgatccgcaagagcaggccaatcgctggatccgtaacatggagcgggccaacaatctgcaggtgatcaagatgaccgactcgaccatgatgcgggtgctggagaacgctgtacgccagggatatccggtgctgctcgaggagatcaacgagaccatcgatcccagtttgcggccgatccttcagcgcgaaacgtaccgattcgagggtcgtacctatttgaaactgggcgacatggtgattgactacgatgacaattttaagctttacatgaccacaaagttgcccaatcctcactacctgcccgaggtgtgcatcaacgtgacattggtcaactttctggtcacagagagcggtctggaggatcaactgttggcgtaagtaataaatataattataagcatttgcatttctacaactcgcatcataacctaagtgatatcgtggccatcgagctgcccgcgatggagatccagcgtaacgatctggtggtcaagatcaactcggacaaacagcaattgctagcgctggaggacaaggtgttgaagttgctattcaactccgaaggaaacattctcgacgacgaagagctggtggagacactgaacgatgccaaggtgggtcccttctctcgattggaatttgtgatccatcatactcccatataggaaacatcgctgatcattgccgcccgactgattgacaccgaggagacggagaaggtcatcactgcttcgcgggaacgctaccgcatcctggcctcccgaggagccatactctactttgtggtcgcaggcctagccgagatcgatcccatgtaccagtacagcctgaagtacttcacccaggtattttgcaatgtactgcgtttggatcatccacctcagtccgtggaggtgcgcatttccactctgatgacggacgaactgagggcaattttcgataacatatcccgcggcttgttcgaaaaccataagatcatctttagcttcctgctggctttgtcggtggagcggcaagagggtcgagttaccgaagaggagttccttttcctttctcgcggccctgtgggtaacattcggacgaagattcagccggctaagatcaagatgagccagatcgaatgggattcgtgcatctttttggaggataacttcagtagcttcttcagcggacttaccgacgaactggacaagcccttcttcatccagatgcaggagaacaaggaggtctttgacttcgcccagacgaatcagccaccaacggataagtggaacaaacgactgagggttttccacaagctgatgttcatctccgctttccgaaaaccgagattcctgctcaacgtcgtctgctatctgcagtccactgtgggcaagtacttcaccgaggcatcaggtggtacccagttgagctctgtgtaagaactcctgctcccagctatggaaagttttgtaattcttgccaacccctctttcagctatttggacacctcagctgtgacgccgttgatctttgtgctgtccacgggatcggatccaatgtctggcttccttaagttcaccacccagatgcagttcaccgacaagtactactccatttcgctgggtcagggccagggaccactggcggagaacctgatcgaaaagagcttgcgactgggtcactgggtgttcctgcagaattgccatttggccacctcgtttatgcagacgctggagacgattgtgcgaaacctgacgctgggcatcaccaaggcgcatgtcgatttccggctctatctctcctccatgcccatacaaacgttcccgatcagtgtactccagaattcggtgaagatcaccaatgaaccgccgaagggcattaaggcgaatgtgtttggtgcactaacggatctaaagcaggacttcttcgagcagcacatccagaatggcaattggcgggccattgtctttggtctgtgcatgttccatgcggttttgctggagcgcaggaaattcggaccccttggatggaacatcacctacgagttcagcgaaagcgatcgggaatgcggccttaagaccctcgacttcttcatcgatcgggaggttctggatgaaataccctgggaggccatactctatatcaacggtgacatcacgtggggcggccgggtgactgactactgggatctgcggtgtctgcgcaccattctgaccatcttttcctcgaagcgaatcatccagcccgactacaagtactgtcgtggtgatagctactatcgggatccgcgcaaaaaaacgctcaccgaatactcagcctatgtgcagggctttccggtcctcgaagatcccgagatcttcggcatgaaccagaatgccaacatcgtgttccagaccaaggagacggccttcttcatcaacaccctgctcctgggccagccgagatccgccgccgacgagggccaggctatggagaatgaaatcgcccagcagacaatcgcacgcatccagaaagcgctggccaccaagattaagagggaacccatccacgacacgctctctgtggtaggtcgcatggtagtttgcgaaacggtgctccaatcttgatatccccatctcccccattttttccagcttgacgccaagggtcaagtgccatcgctgaccattgtgctggtccaagagatcgatcgattcaacatcgcattgggcatcattcacgacagtttggtcaatttgtccaaggccatcaagggcctggtggtaatgtccgaggagctggagaacgtgttcaaggcgctgctatccaaccaggtgcccgcgtcctgggccaaacggagcttcctctcgatcaagccgctgcccagctatatatccgatttccagcggcgcatcgatttcatccaacagtgggcggagaatggagcacctcgctcctactggatcagtggcttcttcttcccgcaatcctttctcaccggcgtcctgcaaacgtacgcccgtcgccgtgtcctacccattgattcgctgaagatcgacttcgatgtgttcgaacgggaactggtgcagcaggacttctttgagatgcacaccaacaacatgagtgtatgtacatatctccagagcagattcgatttgtattttctacaccgacttttccaccgtaggaccaaaagctatatggcaacctgccggaatgcaccgatgccatcatcaatgtgcacggaatcttcatcgaagcagctcgctgggatttgagcaaaggcggcctgtgcgatgccaactttggcgagctcttctcccgaatgccggtggtgaggttcaagccgtgcctggagatttctccgacggtgcgatatgaggcgccgctgtacaagacccagcagagatccggtgtcctctccaccacgggccattcgacgaacttcatcttggccgtccttttgcggagccacaacgatccggaattttggattatgcggggtacagctctggtttccgctgtgctcgaaaatatttgctaggtctagatacaaattggaacttattgttttactttttatgctgcatacttaaagccgtctttatttcgtttcatgttaattctcggatactttctgctaaggtgtacaatatatattttatgtgtgtgtatgtgggtgtgtgtgttcggggtttattatataatttaatttgtggattgaagctctaattgcgagctgtattttgaaaatccctagagaaggcactgaaatatttacatgcctgcttgagaaatcgtttatcgcataaatagttgcgatttgcgtatcaaaagcgctattacacataggaataatttatttttgaaagcaatcaatagctcaaaattcgagcctactacttatggcaaaatttgacaaagtcttcattaatatctgacgagttgttcttaagcctacgtgtatatagttatgtagacgtctgtactgttcgtatatgcatcatacaacattgcacttttgaagtctgttgatcaaattcactttgaaattctagaccttgcacactcacacacacacacacacacgcagagcgaaaagaacacacacaggcactagcatacgtatactatgtacaattccgttcgggatcagctctagtttaagttctttaaactttatttgttttatgtttcggtttaatttagtttaagtttcgatttggtcacagtctatgtcgtatatcaatcaacaggtggacagacagataacagataaggcagatctaactaatggactaacgataaacatacactgattggattgataaaggaatgtggtggctgcagtttcatttttttttttctcatttctagttattttgttcgccttttctaagtactaatactgccgttctctactccaatttctgtggaaggtatggattacgaattggatttggaaacgtggaaatgtggcttaggaactaaaggttacgggttacggattacgggttatgggtaaatgtataggtaataggtat

SEQ ID NO: 15665 - DNA, 12246 bp, DROSOPHILA
atgtccggaatgaaccgccacctgatctccaagggcaaggataggagcaaaatcaagatcaagggcaaggagaaggagaaggaaaggaagaaggatgaggacgacgatgggtcgcggaaggctcgggaacggggaagaagtaggcggcagtcggcaggaggcggagatcattccgtagatatgggttttaagcgcgtaaccggcgaagaccggccgagtagcatgtccatggatcgacttgacagcgatttcgccgccttcacggatcgcgccagtgatgccaacgacggcagtatcacgggtccggcggatggcaatgggaagaaggcacaaaccggcgggaagcaaaagagggcctccaagcaccgtctgaacttttccacttcgaaatcagccggctcgggtaccggtaacaaatcgcgcagtgccagcaccacaaagatcaccactggagcatcgctcattccggatctgaatttgatcatcaaccggatgcgcaacatgccggatgattcgttcgtctatatggactacatgctgccccacgacagcgagtacttcacaccgtacagcctgcgggaggtggagtacaaggatctgaacacatacgaacccttctataccgtcacccgacacggcgtcaccttctggcactgctccgagaatttcttcacgccactggaccagtggcagcaggagttcaagcagttcctcagcatcatccagatacgatccttctctatcttccggctgtggaagggtttcaaggtatgggaaaagacgatcaagtggcggaaactgaacgaggcacgggactatctgcagaacaacctctttatcgtgattccccagctggccaaagcgatcctacgcatgcgcagcgatattgtgcagttacagcgattgaatttcgtcaatgtgtccaacattgagaactggcatccattctacttcctggagacgcacatgcgcatctatgagcagctacacaagaccttcaccgacttccgggagtttattgccaagacgatatttcgagcctgcacggatgccatccaggcacgtggcttctatccggatgacgaggtcaactactatccatcgctgaaaaagatgcgtgaagcgcatagctttatggaccgagcacgaaagagagccttctgcaagaccctgaccaatttcctcacctattgcgacatgatggtgtaccaaatgctgtaccgcatcacgaagaaaagttttgaggatttggccacttcgttcgaggtgcacgacgaagttggtccttcggaggcggatatcaataaacatgatcgggtggacaagcggatcgagaagcagcgaccacaggacaagccgcaaagtccattctttttggccatgttgcgtctactgcccgatcgcattgatatcgagccgtcggaggatattatcaggattatatttcagcgcatcacaggactcattctggagacggtcctcgaaatccacccgttcaccacggatcccttcttcacgcagtacactcaaccctcgattatgggacgccaggaggaggtgctatacgaaggtgcccccgatttgcactatctactgcgcgccgatatacgatttcagtataaccgcaaaaatatgttcgtactaatacgaaaagcgtatgaaagggcgcgactttatacgcagaggttccaccaaattcgcgaaaactttgagatcgacaatagtacagatcccacggttctcaatacggaaagagatcttcagatactgcgagcatactgcgatagatactgcaacaatgtgagggctttggatggcatcttggaatatgtattcctgggactactaaagctcacccagacgaacttcaaggacacggtgacgccggtctgttcccgactccagaacgtcctggccacatacctgcccaaattggccgaggaggagacgacaaggctgtacgaggaggcacaggatttccatggcaggatctgctacgaaccgcacgagaccctggagattgtggcccacattcgatttctggacaagtgctccaccgaactggacgggatattcgatggcatcgactatgtgcacgatctgttgctcataatcaaggactttggcatacccatcgatgacgattccaaggaggattacatggacaccgaagactatttgaataggacgcgggagacgctggaggagatccgagagaagcggcaggactttatcaatcgactcgaggatgccatgcaggatgacatagcggcgctcaaggaggatatccatgaggtggccatcgaagccctgcagccctggctgctggatgccaattccaaccgattgtcggtcaccaacaaattggattccatgctggaacgcctgaacaaatgccgcgagacagccgacgagttccttggctatcagaaggagttccagattgacttgaccatgtacgatgagatggccagcggcttctatgacatacggatgcgacagaatctctatcgcacgtggtccgactgggaggaatcgctggccgagtggatagtttccgatttcaacaccctaaatgtggtggatatggttgaactgaactccaagacgatcaagaactgcatgcagttccaaaagtatctgcccgaaaacaacatagtcccagttctacagaaatccgcagaggcatttaaggagaaactaccagtgatcggttacctgcgtaatcccaatttgagagcccgtcattgggcggagatcgaagatctgctgaatcgcaagttcttccaagagaaggacatcctaatccagacatacgaggatgtgcacgcattcgacgatgtcgccatcggtgaggctctgatgcagatatcctcgcaggccaccggcgaggtgcagctggagaatatgctaaagggcatcgaaaccacctggaaggaaacggaactgtccattgtaccgcaccatgacgccaaggacgtcttcatactggcgggcacagaggagttacaagccgttctcgatgattccaatgtgaatattaacacgatagccgcatccaagtttgtgggtcccatcaagagcaaggtggacgagtggatcaatgccatggaccagtttgccaagaccttcgaaagctggatggactgccagggagcttggatctacctggaggccatctttgcctcggcggatattcagcgacagctgccccacgaggccaagatgttcttcacggtggacaagagtttcaaggagacggtccgccaggcaaagaaggtggctctggccctgcccaccatgtctagcgtggatgtgcacaaggtgctggtggagaacaaccgtttgctggatctcatatcacgcggattggaagcatatttggaggtgaaacgggtggtcttccccagattctactttctgtccaacgacgaactgctggagatcctggcacaaactcgaattccccaggcagtgcaaccgcatctgcgcaagtgcttcgatgccatctaccgattggaatttggatcgaaggaaggcggcgacggcaagatggtggccaccaacgacatcgttgccttcctctcacccgaaggcgaaaagctgcagtttggcaagggtctgaaggctcgtggagccgtggaggaatggctcagcaaggtggaggaggccatgtttgtgtcctgcaagcggtacatgcgattcggttaccagtgctatccggccaaggagcgcgaggactggttccaggatcatccaaaccaggtggtactcaccgtctctcaagtgcagtgggccgccgacattcatcgcatctacgagggcaaggagcgcaatccccttaacattttagagaagatggccaagtttgagatcaaatgcctgaaggatctgggcgccctcgctgcgttgaccaggaagaacattagttcgctgctgcgcaagatcctgtgcgccctgatcaccatcgatgtgcacgccaaagattcggtgcgcatgctcatcgaaaaggaggtctgcaaagcatcggacttcaactggctaaagatgctgcgattctactgggccgatgagacggaaacggtctactcccgcatggccgccgcaaatattccatactattatgagtacttgggtgccggcggtgtcctggtgctcaccccgctgacggatcgctgctacctctgtctgatgggcgcctttcagatggatctgggcggagctccggccggaccagccggaactggcaagaccgagaccacaaaggatctggccaaggcgttggccaaacagtgcgtcgtctttaattgctcagatggcctggactacaagatgatgggacgtttcttctcgggattggcccaatgtggcgcctggtgctgcttcgacgagttcaaccgaattgacatcgaagtgctgtccgtgattgcccagcagttgatcaccatccgaacggccaaggccatgagggtgaaacgctttatcttcgagggtcgggagatcaagatcaatcgttcctgctgcgtcttcattaccatgaatcccggctacgccggtcgtactgagcttcccgataatctgaaggccctgttccgacccatctcgatgatggtgcccgactacgcactcatttcggaggtgattctgtactcggagggcttcgaggatcctaagattctggcccgcaagatggtgcagatgtaccagctgtgcagtcagcagctcagccagcagaatcactatgatttcggtatgcgagccgtgaagtctgtcctggtgatggctggagctctcaagagagcctcacccaatcaacgggaggatatcaccctgattgcggcattaagggactccaatatacccaagtttctggctgacgatgcggtcctgtttcgtggcatccttagcgatctgtttccgggcgtcgaactgccggactcacagcatccgcatctggaggctagcttgcgattgggtttgcggcagaagaatctccaggcggtgccgaccaccatccgaaagtgtctgcaattgtacgagacgatgtgcgtccgctggggtgtcatgttggtgggtcccaccggtggcggtaaatccgtggtgctgcatgccctcgaattcgctctctcacatctcttcgagaacgaagtgcaggacccgaactttcggcctgtggtcatccagacaatgaatcccaaggcggtgaccatgaacgagctgtacggctatgtggatctcaagacgctggagtggcaggatggcttactgggcctggcggtgcgaactgccacaacagtcgaagatgagattcaccaatggatcatgtgcgatggtcctgtagatgcagtatggatcgagaacttgaacacggtgctggatgataacaagatgctgtgtctggccaactcggagcgcatcaagctgaccgcttggattcacatgctcttcgaggtgcaggatcttctgcaggcttcgcctgccaccgtttcccgttgcggcatggtctatgtggatcccggcgatctcggttggattccactgatcgacacgtggcgagaggtggacatgaagcacaagctgcccgcaccgctggccgagttctgctaccagctctttgtgggctacttcgacaaggctctgaagatcgaacggaagcgggcggtgtacaccatccaccaggtgctcggatccaaggtacgactgtgctgtgagctgaactctgcccagttcgaggcggtcaagtggtcggcaatgagtgaagagcagggcaaggaactggtgaccaagatcttcgcctgggcggtgctctgggccattgcctctaatctcaaggatgccgagaaggtctcctttgaggagcagtggagcaaggccattgcccagcatccgaatatgaccctgcccaacttcaccttgtggaactatcgcatcgacctcgagaaaatggactggggcagctggatagatatcatggcaaagtttgtcttcgatccggaaacctcttactacgacatgcaggtgccaacggtggacaccaccaaatacggctatgtgtccgatctcctgttcaaacggggtatgcccgtgatggtgactggagatacgggcgtgggcaaaacagtcctggccatcagttgcatgaaacggctgtcgcagggcaatgtcatcccagtgatcttgaacttctccgcccagacgagcagcaatcgcacccaggagatgatcgagggtccgctggagaagcgcaagaagacccagctgggtgctccggtgggcaagaccgtaatcgttttcattgacgacgtaaatatgcccaagctggatacctacggagcctcgccggccattgagttgctgcgtcaattccttgactttaagggcttctacgatcgggagaaactgtactggaaggagattttggacgtggtcctgggctgcgcctgtgctccgcctggaggaggtcgaaatccgctcactccgcgctttgtccgtcactttgccttgttctcgttgccgaaaccgaacgaggagaccctaacccagatcttcaatggcatcctgcggggtttcctgcaaacgttctcctccgcagtaagagctctctccgagcccatggtgaatgcctgtgtggatgtctatatgcgagtggctactgtaatgttgcccacaccggataaatcgcattatatcttcaatctgcgcgatctatccaagtgtatacagggtatcctccaggcgagcaatctgcactacaaccaggagaaccagatactccgactgttctaccacgagaccactcgtgtgtttcacgacagattgattaacatagaggacaagaacattttcaaggccctgatgaaggaagtatgcatggaccacttcaatcggccggtgatcaatgacaatgagccaccgatcctcttcggtgactttatggtctttggcaagccgaagaatgagcgtatctacgatgagattagggatcatacgaagctggaaagcgttctcaacgattacattgcggactacaactcggtggcggtgggtaagcaaatgaagctaatcctcttccaagacgccatggagcacacggtccgattggcgcgacttttgcgcagcgatcgcggcaatggactgctggtgggcgtggccggaatgggaaaacaatccctcacccggctggcatcgcatgtcaacgagtataactgctggcagatcgagatgcgacgcaactacgacctaaatgctttccatgaagatctgagagtcctctaccgcatcgctggaatcgataatcaaccggtgaccttcctattgatagacagtcagatcgtggaggaagagttcctcgaggatatcaacaacatcctcaattccggcgaagtgcccaatctattcgagggtgatgagttcgagaagatcatcttggacgcccgtgacggatgcaatgagaacagaaaagatgatccctgcacacgagatgacatctacaagttcttcatcaaccgggtaaggaacaatctgcatgtggtcatgtcgatgagtccggtgggcgatgcctttcggcgcagatgccgcatgttcccctcgctagtcaactgcaccacgatcgattggttcaccagctggccaacggaggccctatattcggtggccctcgggttgctcacaaagattgcacccaaaatggaggatcgcatctcgctggcgagcacaaccgtctttatgcataagactgttgaggatgcctcagtgaagttctacaaggaaatgaagaggcactactataccacacccagtagctatctggagttgttaaagctgtaccagaatctgctgaagatcaaaaacatggagatcatagccaagagaaagcgaatcgccaatggcctaaacaagcttctggagaccaatgaagtgatcgctgtgatgggaaaagagctagaggtaatggtgccccagttggatgagaaatccgctatgatgaagtccctggtggacaatctgaccaaggagaccaagcaggcggatgccgtcaagcagagcgtgttagaggacgagatgaatgccaaggagaaggcggcggtggcccaggcgatatccgaggatgccggcaaggatctggagattgccatgccagcgctgcgcgaggcggaggaagcacttaagggtctgaccaaggcggacatcaatgaactgaagtccttcaccacgccgccggctctggtgcagttctgcatggaggccgtctgcattctgctcggtgtcaaacccacttgggcatctgccaaggccatcatggcggacataaacttcatcaagcggctgtttgagtatgacaaggagcacatgaaggaggatactctgaagaaggtcaagaagtacatcgaccacaaggacttcgtgccggctaaattcgagaaggtctccaaggtggccaagtcgatgagcatgtgggtaatatccatggacaagttctccaaggtgtacaaagtggtggagccgaagatcaagcgaaaagaggccgccgaagcggagctcaaggaggtgatgaccgtgctgaggcagaagcaaaaggagctggccgccgtggaggccaagatccaaggacttcgcgacagtctcgaagagaagcagcgcgagttccaagtgatccaggacaacgtggacctaacctacggtaggatcaatcgggcgggtcgcttgacctccgccctttccgacgagcaggtgcgctggcgcgaaacggtcaagtccctaaccggagatctagcctgtgtgcccggtgatgtcctggtggctgccgcctgtgtcgcctatttgggagccttctcccatgaatatcgtcgggatatgagtgctctgtgggtgtccaagtgccgtgagcacaagattccctccagtcccgagttcaacttgctcaaggtgcttggagatccgtacgagatgcgacaatggaatgtggacggcctaccgaaggataacatatccattgagaatggcatatatgccaccagagctctgcgttgggccctcatgatcgatccgcaagagcaggccaatcgctggatccgtaacatggagcgggccaacaatctgcaggtgatcaagatgaccgactcgaccatgatgcgggtgctggagaacgctgtacgccagggatatccggtgctgctcgaggagatcaacgagaccatcgatcccagtttgcggccgatccttcagcgcgaaacgtaccgattcgagggtcgtacctatttgaaactgggcgacatggtgattgactacgatgacaattttaagctttacatgaccacaaagttgcccaatcctcactacctgcccgaggtgtgcatcaacgtgacattggtcaactttctggtcacagagagcggtctggaggatcaactgttggctgatatcgtggccatcgagctgcccgcgatggagatccagcgtaacgatctggtggtcaagatcaactcggacaaacagcaattgctagcgctggaggacaaggtgttgaagttgctattcaactccgaaggaaacattctcgacgacgaagagctggtggagacactgaacgatgccaaggaaacatcgctgatcattgccgcccgactgattgacaccgaggagacggagaaggtcatcactgcttcgcgggaacgctaccgcatcctggcctcccgaggagccatactctactttgtggtcgcaggcctagccgagatcgatcccatgtaccagtacagcctgaagtacttcacccaggtattttgcaatgtactgcgtttggatcatccacctcagtccgtggaggtgcgcatttccactctgatgacggacgaactgagggcaattttcgataacatatcccgcggcttgttcgaaaaccataagatcatctttagcttcctgctggctttgtcggtggagcggcaagagggtcgagttaccgaagaggagttccttttcctttctcgcggccctgtgggtaacattcggacgaagattcagccggctaagatcaagatgagccagatcgaatgggattcgtgcatctttttggaggataacttcagtagcttcttcagcggacttaccgacgaactggacaagcccttcttcatccagatgcaggagaacaaggaggtctttgacttcgcccagacgaatcagccaccaacggataagtggaacaaacgactgagggttttccacaagctgatgttcatctccgctttccgaaaaccgagattcctgctcaacgtcgtctgctatctgcagtccactgtgggcaagtacttcaccgaggcatcaggtggtacccagttgagctctgtctatttggacacctcagctgtgacgccgttgatctttgtgctgtccacgggatcggatccaatgtctggcttccttaagttcaccacccagatgcagttcaccgacaagtactactccatttcgctgggtcagggccagggaccactggcggagaacctgatcgaaaagagcttgcgactgggtcactgggtgttcctgcagaattgccatttggccacctcgtttatgcagacgctggagacgattgtgcgaaacctgacgctgggcatcaccaaggcgcatgtcgatttccggctctatctctcctccatgcccatacaaacgttcccgatcagtgtactccagaattcggtgaagatcaccaatgaaccgccgaagggcattaaggcgaatgtgtttggtgcactaacggatctaaagcaggacttcttcgagcagcacatccagaatggcaattggcgggccattgtctttggtctgtgcatgttccatgcggttttgctggagcgcaggaaattcggaccccttggatggaacatcacctacgagttcagcgaaagcgatcgggaatgcggccttaagaccctcgacttcttcatcgatcgggaggttctggatgaaataccctgggaggccatactctatatcaacggtgacatcacgtggggcggccgggtgactgactactgggatctgcggtgtctgcgcaccattctgaccatcttttcctcgaagcgaatcatccagcccgactacaagtactgtcgtggtgatagctactatcgggatccgcgcaaaaaaacgctcaccgaatactcagcctatgtgcagggctttccggtcctcgaagatcccgagatcttcggcatgaaccagaatgccaacatcgtgttccagaccaaggagacggccttcttcatcaacaccctgctcctgggccagccgagatccgccgccgacgagggccaggctatggagaatgaaatcgcccagcagacaatcgcacgcatccagaaagcgctggccaccaagattaagagggaacccatccacgacacgctctctgtgcttgacgccaagggtcaagtgccatcgctgaccattgtgctggtccaagagatcgatcgattcaacatcgcattgggcatcattcacgacagtttggtcaatttgtccaaggccatcaagggcctggtggtaatgtccgaggagctggagaacgtgttcaaggcgctgctatccaaccaggtgcccgcgtcctgggccaaacggagcttcctctcgatcaagccgctgcccagctatatatccgatttccagcggcgcatcgatttcatccaacagtgggcggagaatggagcacctcgctcctactggatcagtggcttcttcttcccgcaatcctttctcaccggcgtcctgcaaacgtacgcccgtcgccgtgtcctacccattgattcgctgaagatcgacttcgatgtgttcgaacgggaactggtgcagcaggacttctttgagatgcacaccaacaacatgagtgaccaaaagctatatggcaacctgccggaatgcaccgatgccatcatcaatgtgcacggaatcttcatcgaagcagctcgctgggatttgagcaaaggcggcctgtgcgatgccaactttggcgagctcttctcccgaatgccggtggtgaggttcaagccgtgcctggagatttctccgacggtgcgatatgaggcgccgctgtacaagacccagcagagatccggtgtcctctccaccacgggccattcgacgaacttcatcttggccgtccttttgcggagccacaacgatccggaattttggattatgcggggtacagctctggtttccgctgtgctcgaaaatatttgctag

SEQ ID NO: 15666 - protein, 4081 aa, DROSOPHILA
MSGMNRHLISKGKDRSKIKIKGKEKEKERKKDEDDDGSRKARERGRSRRQSAGGGDHSVDMGFKRVTGEDRPSSMSMDRLDSDFAAFTDRASDANDGSITGPADGNGKKAQTGGKQKRASKHRLNFSTSKSAGSGTGNKSRSASTTKITTGASLIPDLNLIINRMRNMPDDSFVYMDYMLPHDSEYFTPYSLREVEYKDLNTYEPFYTVTRHGVTFWHCSENFFTPLDQWQQEFKQFLSIIQIRSFSIFRLWKGFKVWEKTIKWRKLNEARDYLQNNLFIVIPQLAKAILRMRSDIVQLQRLNFVNVSNIENWHPFYFLETHMRIYEQLHKTFTDFREFIAKTIFRACTDAIQARGFYPDDEVNYYPSLKKMREAHSFMDRARKRAFCKTLTNFLTYCDMMVYQMLYRITKKSFEDLATSFEVHDEVGPSEADINKHDRVDKRIEKQRPQDKPQSPFFLAMLRLLPDRIDIEPSEDIIRIIFQRITGLILETVLEIHPFTTDPFFTQYTQPSIMGRQEEVLYEGAPDLHYLLRADIRFQYNRKNMFVLIRKAYERARLYTQRFHQIRENFEIDNSTDPTVLNTERDLQILRAYCDRYCNNVRALDGILEYVFLGLLKLTQTNFKDTVTPVCSRLQNVLATYLPKLAEEETTRLYEEAQDFHGRICYEPHETLEIVAHIRFLDKCSTELDGIFDGIDYVHDLLLIIKDFGIPIDDDSKEDYMDTEDYLNRTRETLEEIREKRQDFINRLEDAMQDDIAALKEDIHEVAIEALQPWLLDANSNRLSVTNKLDSMLERLNKCRETADEFLGYQKEFQIDLTMYDEMASGFYDIRMRQNLYRTWSDWEESLAEWIVSDFNTLNVVDMVELNSKTIKNCMQFQKYLPENNIVPVLQKSAEAFKEKLPVIGYLRNPNLRARHWAEIEDLLNRKFFQEKDILIQTYEDVHAFDDVAIGEALMQISSQATGEVQLENMLKGIETTWKETELSIVPHHDAKDVFILAGTEELQAVLDDSNVNINTIAASKFVGPIKSKVDEWINAMDQFAKTFESWMDCQGAWIYLEAIFASADIQRQLPHEAKMFFTVDKSFKETVRQAKKVALALPTMSSVDVHKVLVENNRLLDLISRGLEAYLEVKRVVFPRFYFLSNDELLEILAQTRIPQAVQPHLRKCFDAIYRLEFGSKEGGDGKMVATNDIVAFLSPEGEKLQFGKGLKARGAVEEWLSKVEEAMFVSCKRYMRFGYQCYPAKEREDWFQDHPNQVVLTVSQVQWAADIHRIYEGKERNPLNILEKMAKFEIKCLKDLGALAALTRKNISSLLRKILCALITIDVHAKDSVRMLIEKEVCKASDFNWLKMLRFYWADETETVYSRMAAANIPYYYEYLGAGGVLVLTPLTDRCYLCLMGAFQMDLGGAPAGPAGTGKTETTKDLAKALAKQCVVFNCSDGLDYKMMGRFFSGLAQCGAWCCFDEFNRIDIEVLSVIAQQLITIRTAKAMRVKRFIFEGREIKINRSCCVFITMNPGYAGRTELPDNLKALFRPISMMVPDYALISEVILYSEGFEDPKILARKMVQMYQLCSQQLSQQNHYDFGMRAVKSVLVMAGALKRASPNQREDITLIAALRDSNIPKFLADDAVLFRGILSDLFPGVELPDSQHPHLEASLRLGLRQKNLQAVPTTIRKCLQLYETMCVRWGVMLVGPTGGGKSVVLHALEFALSHLFENEVQDPNFRPVVIQTMNPKAVTMNELYGYVDLKTLEWQDGLLGLAVRTATTVEDEIHQWIMCDGPVDAVWIENLNTVLDDNKMLCLANSERIKLTAWIHMLFEVQDLLQASPATVSRCGMVYVDPGDLGWIPLIDTWREVDMKHKLPAPLAEFCYQLFVGYFDKALKIERKRAVYTIHQVLGSKVRLCCELNSAQFEAVKWSAMSEEQGKELVTKIFAWAVLWAIASNLKDAEKVSFEEQWSKAIAQHPNMTLPNFTLWNYRIDLEKMDWGSWIDIMAKFVFDPETSYYDMQVPTVDTTKYGYVSDLLFKRGMPVMVTGDTGVGKTVLAISCMKRLSQGNVIPVILNFSAQTSSNRTQEMIEGPLEKRKKTQLGAPVGKTVIVFIDDVNMPKLDTYGASPAIELLRQFLDFKGFYDREKLYWKEILDVVLGCACAPPGGGRNPLTPRFVRHFALFSLPKPNEETLTQIFNGILRGFLQTFSSAVRALSEPMVNACVDVYMRVATVMLPTPDKSHYIFNLRDLSKCIQGILQASNLHYNQENQILRLFYHETTRVFHDRLINIEDKNIFKALMKEVCMDHFNRPVINDNEPPILFGDFMVFGKPKNERIYDEIRDHTKLESVLNDYIADYNSVAVGKQMKLILFQDAMEHTVRLARLLRSDRGNGLLVGVAGMGKQSLTRLASHVNEYNCWQIEMRRNYDLNAFHEDLRVLYRIAGIDNQPVTFLLIDSQIVEEEFLEDINNILNSGEVPNLFEGDEFEKIILDARDGCNENRKDDPCTRDDIYKFFINRVRNNLHVVMSMSPVGDAFRRRCRMFPSLVNCTTIDWFTSWPTEALYSVALGLLTKIAPKMEDRISLASTTVFMHKTVEDASVKFYKEMKRHYYTTPSSYLELLKLYQNLLKIKNMEIIAKRKRIANGLNKLLETNEVIAVMGKELEVMVPQLDEKSAMMKSLVDNLTKETKQADAVKQSVLEDEMNAKEKAAVAQAISEDAGKDLEIAMPALREAEEALKGLTKADINELKSFTTPPALVQFCMEAVCILLGVKPTWASAKAIMADINFIKRLFEYDKEHMKEDTLKKVKKYIDHKDFVPAKFEKVSKVAKSMSMWVISMDKFSKVYKVVEPKIKRKEAAEAELKEVMTVLRQKQKELAAVEAKIQGLRDSLEEKQREFQVIQDNVDLTYGRINRAGRLTSALSDEQVRWRETVKSLTGDLACVPGDVLVAAACVAYLGAFSHEYRRDMSALWVSKCREHKIPSSPEFNLLKVLGDPYEMRQWNVDGLPKDNISIENGIYATRALRWALMIDPQEQANRWIRNMERANNLQVIKMTDSTMMRVLENAVRQGYPVLLEEINETIDPSLRPILQRETYRFEGRTYLKLGDMVIDYDDNFKLYMTTKLPNPHYLPEVCINVTLVNFLVTESGLEDQLLADIVAIELPAMEIQRNDLVVKINSDKQQLLALEDKVLKLLFNSEGNILDDEELVETLNDAKETSLIIAARLIDTEETEKVITASRERYRILASRGAILYFVVAGLAEIDPMYQYSLKYFTQVFCNVLRLDHPPQSVEVRISTLMTDELRAIFDNISRGLFENHKIIFSFLLALSVERQEGRVTEEEFLFLSRGPVGNIRTKIQPAKIKMSQIEWDSCIFLEDNFSSFFSGLTDELDKPFFIQMQENKEVFDFAQTNQPPTDKWNKRLRVFHKLMFISAFRKPRFLLNVVCYLQSTVGKYFTEASGGTQLSSVYLDTSAVTPLIFVLSTGSDPMSGFLKFTTQMQFTDKYYSISLGQGQGPLAENLIEKSLRLGHWVFLQNCHLATSFMQTLETIVRNLTLGITKAHVDFRLYLSSMPIQTFPISVLQNSVKITNEPPKGIKANVFGALTDLKQDFFEQHIQNGNWRAIVFGLCMFHAVLLERRKFGPLGWNITYEFSESDRECGLKTLDFFIDREVLDEIPWEAILYINGDITWGGRVTDYWDLRCLRTILTIFSSKRIIQPDYKYCRGDSYYRDPRKKTLTEYSAYVQGFPVLEDPEIFGMNQNANIVFQTKETAFFINTLLLGQPRSAADEGQAMENEIAQQTIARIQKALATKIKREPIHDTLSVLDAKGQVPSLTIVLVQEIDRFNIALGIIHDSLVNLSKAIKGLVVMSEELENVFKALLSNQVPASWAKRSFLSIKPLPSYISDFQRRIDFIQQWAENGAPRSYWISGFFFPQSFLTGVLQTYARRRVLPIDSLKIDFDVFERELVQQDFFEMHTNNMSDQKLYGNLPECTDAIINVHGIFIEAARWDLSKGGLCDANFGELFSRMPVVRFKPCLEISPTVRYEAPLYKTQQRSGVLSTTGHSTNFILAVLLRSHNDPEFWIMRGTALVSAVLENIC

SEQ ID NO: 15667 - DNA, 3801 bp, DROSOPHILA
ttctgatagcgaaaatgcccagttgggaaagtgtagtcaaatcgaagggaaacagcgttttgaagctgggatatttgtgcatatgtcggcacgactgaacccaactaaaccgaactgaatcgctggatgttggcttttgattttcgttgattcccgcccgcggggagggggggtgtggtcgtgagcagcgaagggggcgtggcggctgagcgtcaattcgacttgtcttgtgatttgcgcctcacaattggacaaacgaggcgcaattggaggcaaccagtccgagattatcggatgcttcgatgttttgggtgcttggatgttcaaatgtttggatgtgtttgcatgctttgtgggattttgggggggtggggtttgggaaatgggtgttcaattacataaaattacatacatacactgcagtttgcacttgcagttcgtctgcggaagggggggaatgggtctactctaacatcgcaagctgctcccactggccattacaaattgtcaacagtcgctgatttgttaagtacactgcttatcaccgaaatagcgcgcatatcactaaaaaattcagacgacgacgggcgaaatgcgaacgccaaacaacaacaaagaactgaacaaaaaagcaaagtattggtaagcacgcgcgctacgcggccaccagtgttgcacagcgctggagcagctctgttgtgcacgatcactgttatagttgcagagagtatttttcactattttgtggataaaatcaagtggtatgaaaatgtatccatgcgataatgttccgttatcttcaattgctgaaataaagtcaaataaacagtttcaattactgctaaagttaattaatgaaatgctagttaagtatgtcttaaattataaatatttagctactcatgagaattttttttgtttggcccactgtgcataacccgcgcgtgtagcccattccagtattttaccatcttgtacattagtatttacccgtcttccgctacggtcacactgccatatcgacgcaaaacaaattgcgattttcacaacacaagaaaagcaggaaaaacagcaaatatatccgcaatctagctaacacacaggtccccaaccagtcgcagtcgcgttccatgagtgcgaacctgaagaatatcaaactggcccacttcagtggttcgctcggttccggtggctttggcatctctgcgtcatccggaggagctggaaaactgcccacaaatggcacaggtggcggcaaatccgccccaacgagcaccttcctggactccgaggtgctggccacgcccggcggcgtcgttataccaataattcgcactcgggacgtgcccaaattgctgcccaccattgcagcggcactgcagcgtccggcggatgatcatttggcggccgaggatctggatgcagtgcaactggagctggaacagatgctctccaatgtggcgctgcgcacgcgcgtcctgaaagcggagtatgatagcctcgacaaggatgagaagcgccaggatcgaagaaagctcgaccgtgtgcctggatcgccaccttgtccggctagcatgctcaacggcttgctgggcatcggcagcaactcgtcgacgagtctgggcagcccgctgggcggcggaggcgcctcatcctctagccaatcgaagcgcaagcgggatgagccaacgggcgtgcgcaaaaagcactcttcgatgaccattctcaagcaacagggcgtttccggcggcacctcgaagcaccaggccaagaacagccccttggtcgtgcacaccgacgacagcatggactatctgcccacactggcggccgccaatgcctctggatccgtgctgccgcatcaccagccgctgccgcagctaccgaaaatgacggtgcccaagaacgatacgcccaacaagttctggctatccgtggagccctactgcatgcctctaaccaacgaggatctgcgcctaatcgatgacctgctggagcagtattggggtccactggtgccgccagtgccacctctgggtccccactactccacagtttgggcccaggaggatataaaggcgctgcagccgggcggagctcgaattaaatcgaacaattccagcggaatgctcaaaaaggccgaaggcatggtggatgagagcatcactggtccactcacccagcgtttggtgtccgccttaatggaggagtccctgatgacgctgcccagcgaacaggccgccgtgggcgagcacagcaacagcaccacgagcagcagcaacgagaacacccactcgcactcctcgtcctcggcaaatgctgccgcagcagctgcttccgggaactttcgatctctcgccatgatgaaacacggcgtgggcatcgaacagcgcctgaagaagactctcatcgagaacggactgatcgatgccagtgagtttgcggcccacgaagacgtggacgaggtgctgatggagatcaagcgcgtaacgaccgaaatcagcaccatttcgcagtttaacagcgaggaattgaagcgactgcgtgccgttgccagtgaggaaatcaagcgcattgccatcaaacagaaattggacatggtggaccaggagatactcgagtgctacaagcgaatgctgcagtatcgggccaagcgcaagggccacaccatcgaggagaagcaggagatactgcggctgaccaacgagcagcgcctacttgcggatcagctggagcgtatgcagatgcatctgccctgcatcggcggctccggcaactccctgttagagccaaagatgtaggacaggagcctggcctggggctggtgccagctaatggccatgcatcaggcaaagaggcaggtccgcgacgctagcctcaagctgcagtgcgtctgaaggagctgctcctccttactcgccactcctttcatttcgccagactgtaaattagccacgctattcgacacgtacacgtagcctctagtgtccgcaatccaagttgtggacgttttgggaagatgcgctcatggtggcggaaaatgttttgcataagttttcctcgagttttggcattcgttttccccaaatcgaacgccacttttgagtcgttttcgactagcttccaaacccgtattcttatcttcgtcaccagactgtacattaacaaagatacattagctcatagaatgtagtgttcaagattaaagtgaaattaattatttagataagatcttcaagtggcggagagtagcgtttgcgtattttaaactgttcttttacaaaatcataatttccctttccttgcttagtaacgtattccgtattctgtaagcctacagttttttgccaatttgtttgtaattgcctgaaaattaaatggatatccgtagattttacatgctaaatgctaaatttgattttgtgtacataaaagtggagggtgagattcgcattattcgctaaatgaactgaaaaactttccgctactggaatttcccaaaattttacgagcacgttgttttcctcatgtctttcgcaactataaatattgattcaccctatttaacactcccaaatacatacactttgtatagcttaagttatcgcgcggcaataaagtcgtcactatcgagagtaaagcacagaattttccaccatgggagtgagtttgggaggagagaaaccaccgcgctgggcgaacgctgcgtacgctttgagctcgatctggccgacgaagcgggcaagtgaactccagcggatgtggggaatcctctgccgttgcttcgatcttgtttgccca

SEQ ID NO: 15668 - DNA, 1801 bp, DROSOPHILA
ctacggtcacactgccatatcgacgcaaaacaaattgcgattttcacaacacaagaaaagcaggaaaaacagcaaatatatccgcaatctagctaacacacaggtccccaaccagtcgcagtcgcgttccatgagtgcgaacctgaagaatatcaaactggcccacttcagtggttcgctcggttccggtggctttggcatctctgcgtcatccggaggagctggaaaactgcccacaaatggcacaggtggcggcaaatccgccccaacgagcaccttcctggactccgaggtgctggccacgcccggcggcgtcgttataccaataattcgcactcgggacgtgcccaaattgctgcccaccattgcagcggcactgcagcgtccggcggatgatcatttggcggccgaggatctggatgcagtgcaactggagctggaacagatgctctccaatgtggcgctgcgcacgcgcgtcctgaaagcggagtatgatagcctcgacaaggatgagaagcgccaggatcgaagaaagctcgaccgtgtgcctggatcgccaccttgtccggctagcatgctcaacggcttgctgggcatcggcagcaactcgtcgacgagtctgggcagcccgctgggcggcggaggcgcctcatcctctagccaatcgaagcgcaagcgggatgagccaacgggcgtgcgcaaaaagcactcttcgatgaccattctcaagcaacagggcgtttccggcggcacctcgaagcaccaggccaagaacagccccttggtcgtgcacaccgacgacagcatggactatctgcccacactggcggccgccaatgcctctggatccgtgctgccgcatcaccagccgctgccgcagctaccgaaaatgacggtgcccaagaacgatacgcccaacaagttctggctatccgtggagccctactgcatgcctctaaccaacgaggatctgcgcctaatcgatgacctgctggagcagtattggggtccactggtgccgccagtgccacctctgggtccccactactccacagtttgggcccaggaggatataaaggcgctgcagccgggcggagctcgaattaaatcgaacaattccagcggaatgctcaaaaaggccgaaggcatggtggatgagagcatcactggtccactcacccagcgtttggtgtccgccttaatggaggagtccctgatgacgctgcccagcgaacaggccgccgtgggcgagcacagcaacagcaccacgagcagcagcaacgagaacacccactcgcactcctcgtcctcggcaaatgctgccgcagcagctgcttccgggaactttcgatctctcgccatgatgaaacacggcgtgggcatcgaacagcgcctgaagaagactctcatcgagaacggactgatcgatgccagtgagtttgcggcccacgaagacgtggacgaggtgctgatggagatcaagcgcgtaacgaccgaaatcagcaccatttcgcagtttaacagcgaggaattgaagcgactgcgtgccgttgccagtgaggaaatcaagcgcattgccatcaaacagaaattggacatggtggaccaggagatactcgagtgctacaagcgaatgctgcagtatcgggccaagcgcaagggccacaccatcgaggagaagcaggagatactgcggctgaccaacgagcagcgcctacttgcggatcagctggagcgtatgcagatgcatctgccctgcatcggcggctccggcaactccctgttagagccaaagatgtag

SEQ ID NO: 15669 - protein, 556 aa, DROSOPHILA
MSANLKNIKLAHFSGSLGSGGFGISASSGGAGKLPTNGTGGGKSAPTSTFLDSEVLATPGGVVIPIIRTRDVPKLLPTIAAALQRPADDHLAAEDLDAVQLELEQMLSNVALRTRVLKAEYDSLDKDEKRQDRRKLDRVPGSPPCPASMLNGLLGIGSNSSTSLGSPLGGGGASSSSQSKRKRDEPTGVRKKHSSMTILKQQGVSGGTSKHQAKNSPLVVHTDDSMDYLPTLAAANASGSVLPHHQPLPQLPKMTVPKNDTPNKFWLSVEPYCMPLTNEDLRLIDDLLEQYWGPLVPPVPPLGPHYSTVWAQEDIKALQPGGARIKSNNSSGMLKKAEGMVDESITGPLTQRLVSALMEESLMTLPSEQAAVGEHSNSTTSSSNENTHSHSSSSANAAAAAASGNFRSLAMMKHGVGIEQRLKKTLIENGLIDASEFAAHEDVDEVLMEIKRVTTEISTISQFNSEELKRLRAVASEEIKRIAIKQKLDMVDQEILECYKRMLQYRAKRKGHTIEEKQEILRLTNEQRLLADQLERMQMHLPCIGGSGNSLLEPKM

SEQ ID NO: 15670 - DNA, 7402 bp, DROSOPHILA
accatcccccccacttgtaggcgtttgcagtattgtaaattaattcatattagccaaacaaatgcagacatgtgtgttggccgtgtgtgtcggtgagcagcagctagcttttagcatttcattcggcggatgagatgagacgagaccagatgagctgagatgagatgagatgggatgagttgccgcacaggtttcgtttctgtggtctgaagttcgttgtgggagcatcgcagtcgaagtcgcagcctcgttgaagaaaccggcgcgaatgatttttattacttttttatttgctgctgatgctgatgctgctgcaactgttttgttgttattgtattgaaaatagcaaacatgcaaaatgcgcaacgaaggctgagaaaatcaacagcgaaaatgttaattacactatatctgagcagcttctatctgcccgttcgacggccacttaggtgtatctgatggatgcaaatgtggaaaggccttttcgaaactgcaagctacagttacagatctcaagatataaatctgaatgcatgagtaatatcaattggtttatgactaatgggcaagcctaaaaccaaaaccctgttagcggacacagtaaagatttcccttcgattaggtcgtacatgtttattagtaaagcaacaaagaatatattaaatatattctatacttatagtactaattgtataaataatgtacgatcataatatttgcgatactaaaataaataatttcttatgatgcaaatcaaaagacttagagaacgaacttggcttcaatggggaaaactccactcaacgtgcacggtcttttgagttgagaaacgaagagtttggctcaaagagagaagcccgagtcatagagagacccaaagaagtggctgttctctcagccaatcctctcaatgggcggcttcggctgtggggttactttttggtataaaacataaacaagccaaagaaagtcattcattttgttgttcgagccagacgagtgaaccgttagcagcagcattagatagaagaagagccgagctgccgagcagtgcaacacagtgataaatattaaaaagccaagagacaaacacgcgaacataaagtgattccccccccagtgagtgcagtgtgttatccagagccaaaactgtttggattattgggatacccatcgaagccatcgccccaacatgcagtaagttctatagccacccactgcgcctatgaatcatagtccgaacctggatctgaacctggacttggcctgcctcgcggccacaaattcgtgctgcagtcgctgcaaacgataattaacattttcggtattgtctcggtctccggggttctctcggcccaatttttctgggccgcttggcaaccacgaaatattcttttgggcgatttcaaaacccagcagcgacatacgtaacacagactgcgatagaaaacccaagcccaggccgtagttggtctgacttttccttctatatctttctgttggatttcttgtctgtgtgtgtttttggcgtgggagttttcgcttttgtttgccgacagttcattgaggcagctgccttaaacccaaggggatacttgtacttatttatatgacttgttacacggaaaaaagttaggaccttttactggaaagcttactattagaaggattaaaattaggtatcaaattatcgaggttcttaaatgtattttgaaaaccaacttatcttgaagaacttcactctgttactatattttttaaatattgttattggtaaagaattgggtttcaaaaagaatgatttttgagttctgtttctagaagctacacaaaccactgagattattatatccgaattgtatttcattatctcggcagaaagatttggttttcaagatactttgctcctttgcatattgcccaatatcttaatctcttgacttcaatttatgtttgctttgtggcaatcgaatgtccgagagtagattaatcgattaggactcggaacggtcacgcctgctggacatggggagatccaatctccgtgacagattgcatcacaaagctggtcctttctaaaagtcaagtcgtgtggattactcatgctcggcccattatataagtgactgcgaatatgagcggcaattgtatcaaatgcacgcacagcgacgcatgtggcgtatacgcaatatttcaacgtttggaattacagcgacgcacagatatgcgcaattgcccaagcgtgctgccagccacgcccactgcccccccccccccgggtgtaattgctttcgattttctggtcacttttgatggggtgtatgtacttggagggggcgcaattaataaattgccatcgaattgattttatttctttcacttttgccttggctcgttcgatttcgcccgtcatcgggccaagccaagcaaacacacccacttaagacatcccgagtgaaggtcacagatttgtgaaaattaccgcagcataagtagacacaaaagagaaaaacggtggaacataaaaaccattgccaagccattacaaagtcacattatccagatgcccgaaatcaaccaaacgtaaatatccagcacattaaaaaccaaccgccctaactgcacgcacattaacagctcttaatttgtatcaagcaaaaaaacaaaataatggataaaagtgaaaaaaaaggaaaaaattaaagcagtgcaatgtagtttatttttttgggttttcatgtttcacacagtttaatggcatcgggagttgtgttaacgagccagtgtttaattaagcactcgaataaaccaactacagcaagtgaaaacaaaagacttaggcaacaaactcgaaccgattacacgctaaagagtcgagaaatggaaattgaaattgtaatgaaggaaaaacagcgggcagcccaagcgattgtggcactaagtgggcttagctcttaattctctgccaactcccggggaaaatgcgttcgttatatgagttatacaagaaatttacactctcgttttcccgaaaaaccagcacacttatcgaaatgcaggtggttgccaaatgtcgtaatcttagaccggcgcttatgtcaccccaaaaatgtccgcctaacatgacgcacacccaacatttaaggaaatcaaaagcaaatatagtccgagttccatacgcaagaaaccccagtggcacacagagaaaaaccaactcacagctaactcagctaaaatgtataacgaaaccgacggctcagcctgtcttgtggtttccagaagtgggtccaaatcgggccaggggattggggtcgacgaaaaccatcaacatcaacatcaacgcatcgcctccatggctgctccactgccatatgctatatgctttgtgctctatgctttagctatatatgcatgatgtaactgcagtgcgataacgtctgcatctggaccaaaagcagagacagatcccgacacatgcaaccaattccccatttatggcagacactctggccattgcgactgcgaaagtggtgcttgtgtgccgcaagtggagcactccaggctgcgctggaatgtgcacagctatttgcatgtgttgcaggcgggattgaaattgggattggggtggaggtggcgctggcgctgaagccaattccttggggcagattcccccggattcccatggaggttgcgcaaaaaggttcgctgacagtgacaatgcaacaggcaacagtggcactctcagccagctcctaaagttcaaaggtgcaacttccaacttgcaactagcaactcgcagctgccaagcgactggctgacaaattgccagctggaaatttcgatacttgcataagacgctctccagatttattggcctggcccaaatcaatggagtccaccgcatactcgggttcaaagtcactagcagccggacactcgtttggcgtgaaaagtaaaagtccggaccgacttttgcttttgctattgcttttattacaattctctcgcatatttcaccttgcccaactatttgcaactcttactcgggctttgacgttatggccccaattagatgcaggcacgtaacattggttaattggactggccagcaccaccgccggatcgtaccattggtttccaggccaggaattccaatcccattcgccccgcgacaggggtacatatcatgcgtatgaacagcagttgacattcagccaagtcgagtcagcgagtgggtctcgggtaaatggcgttcaaattgaacccgccgcaagctaagcatcctccttatactcactggtctcggggtatatcagctattagattcaagcagtaagccagtgcttacagagtagagtctatcaaataagttactcacattttctatttcaaatagaaagtcatgcctaaaaatatcttagtgatattctttaacttactctcttaatatgatgattaatgcaatgacttggttctaatgaacaactggagttcattattgtctactagttttggaaattcatggtcaagtgacgttcctagataagacatccgaattgaatttgatcttttcaaaaacacacttcaactttccataccaggccagttttccaagttaacattttattttggttttcggatattggttagctgggataacaagcgtatgccttgatcagtgattcccagcgcccagctttccttgccttcccagccgcagttgcatctccatgcagcgaactccatggcccgtttcgatcttgggggacttgccgtgttgcctataacaagttttctggcctggctggtctggtatggtatggtctctggtctcttgcataactggtcgctgggctgccgatgccgatgccaatgacgatctccgatgatgctgccttctttggctgcaatttggcggcatcttcgcgaaaaggttcgcagaaatattttcccgcgttttttttggttgattgtctggttgccacagagtttcccatatcataaagcagcctgactcatcaaatgatggccattgcatccattgcagcatcccgtcagccgttcttctagtcctggctgtgtccaccggcctgtgggcctgctgcgtggagggtgcatccacaggatcaccctcggccacggccaccaccgccaagcctaagggatttgaggcacgatcgctagacgtcaattccagcggaggcgaggaggagctagatgacttcgagacgcaggcccagacgcatctggcctaccggcagcagccgcagcagcagcgccagctgtacgagtacagcgaggaggatcaggaggaggcaccacgtccggtgtacgccaaccgaaatgccaagcaacaaagcaactacctaaagatccagggacagctgaagaagcccctcagcgaagagagcgaggaggaggaggaagaagtggaggagcccgatcgcctgtccaccctgctgagcaagtcctctttcagctgcacggacagaaactctgggtgggtacaatcgtcataaaagtttcaattacttaacttaacttaagctaatattaaatcacagatactatgccgacgagtcgctgagctgcgaagtgttccactactgccaagagagccagaagcactcgtggatctgtcctgagggtttcaccttccaccagatccatctcatctgcatgccgccctcccacgacaacatctgcaagcagtcctcaaagtaccatattgtaaacgactacctgtataagcccatcaatcttcaggagcaccagagcaagccaaatgtgacgcttcgctactcggagcgttacttcccggagaactactacgaacatgagcgttacgatgacgaggaggagcagttgcccgccgccccaaggccacgcatccagcaacagcatcaccagcagcaacaccaacagccccagcagcaacatcgccaagtgctagcctaccagcagccgcagcagcagccccaagtgagggtacagtaccaacagccacagcagcaccagcaccaccaacagcaggctcagccgcaagcacaagtggtgacgcagatccgccatcagccgcaacctcagccgactaccctggcctaccggaagccacagccagtgaccacagtccagccccagttgcagttgcatcagctgcaccagccccaattgcagctgcaccagcaaaggccacagacgttggcgccgaccgtgacgcccgcgccgtaccgattcttcaccgccgctccccagctgcagcacttacagcagcagcaacagcaggtcttccgcacgcccgaggagatcaacatatcgctgcagcagcgtcggccgcaggtgttcattgccacaacgccgaggtattacgaggatgagtacctctacgagcggaggaagtgaggaggattgcagtggagtgagcagtaaacagtcttgtcgttccctcggatccacctctcgtgtatattccccgtctaagtagctttaagctctcgccccagctctctgtcaggcccgaaaatccttgcgcgagttttgtgtacctatttgtaatatttaatgtcctgctagaagaatccgccttctaactcaattcgttaataaaggaagccacattaagttagccgctcactgtatatctatctccatgaactgatccgcgttggacagatgcactgcctggctgtgagtgccctcctcaactacgtagttgggtccaattatgcagttcttcaggacggatccgctcttcacctgtgctcgatggccaattatgcagttgtcgatgttgcagccctcctccacaatcgcattggacataattaacgaattggccacaatgtttttgggactgatgatgcagttgggtccgaaaacgctgaagttcagtgaagtcttttcggacaacttggcattgtcagccgctatgatctccttcgtttgggttgattttaccacggctccaggagagatcagtggatgcttttcgccacacagattgttccagatgctggctaacttgcgattgatggccaagaagctcaaagtgttgtttacccgcacacctatggcatctctgggcgcctgaatgccatagcaacgcacaatatcgccatgatagggggattgggatagagattggttaaacagtgaagtctgcgtgatcttctggtccagaatggtgtggcctacatactgaaagttaaagacataataggattttatatgatattcaatacgggtatacgggtactaaaggtaacctgttaataccaagtagtaactcacatgcaaaacatgatcctcattcttggtgaccacgcccacttcggatgtggtgtcctgcaccgttttaggaggtcgttttgagtgctgcttctttatcaaatgcggcagaaat

SEQ ID NO: 15671 - DNA, 1488 bp, DROSOPHILA
tgaaccgttagcagcagcattagatagaagaagagccgagctgccgagcagtgcaacacagtgataaatattaaaaagccaagagacaaacacgcgaacataaagtgattccccccccagtgagtgcagtgtgttatccagagccaaaactgtttggattattgggatacccatcgaagccatcgccccaacatgcacatcccgtcagccgttcttctagtcctggctgtgtccaccggcctgtgggcctgctgcgtggagggtgcatccacaggatcaccctcggccacggccaccaccgccaagcctaagggatttgaggcacgatcgctagacgtcaattccagcggaggcgaggaggagctagatgacttcgagacgcaggcccagacgcatctggcctaccggcagcagccgcagcagcagcgccagctgtacgagtacagcgaggaggatcaggaggaggcaccacgtccggtgtacgccaaccgaaatgccaagcaacaaagcaactacctaaagatccagggacagctgaagaagcccctcagcgaagagagcgaggaggaggaggaagaagtggaggagcccgatcgcctgtccaccctgctgagcaagtcctctttcagctgcacggacagaaactctggatactatgccgacgagtcgctgagctgcgaagtgttccactactgccaagagagccagaagcactcgtggatctgtcctgagggtttcaccttccaccagatccatctcatctgcatgccgccctcccacgacaacatctgcaagcagtcctcaaagtaccatattgtaaacgactacctgtataagcccatcaatcttcaggagcaccagagcaagccaaatgtgacgcttcgctactcggagcgttacttcccggagaactactacgaacatgagcgttacgatgacgaggaggagcagttgcccgccgccccaaggccacgcatccagcaacagcatcaccagcagcaacaccaacagccccagcagcaacatcgccaagtgctagcctaccagcagccgcagcagcagccccaagtgagggtacagtaccaacagccacagcagcaccagcaccaccaacagcaggctcagccgcaagcacaagtggtgacgcagatccgccatcagccgcaacctcagccgactaccctggcctaccggaagccacagccagtgaccacagtccagccccagttgcagttgcatcagctgcaccagccccaattgcagctgcaccagcaaaggccacagacgttggcgccgaccgtgacgcccgcgccgtaccgattcttcaccgccgctccccagctgcagcacttacagcagcagcaacagcaggtcttccgcacgcccgaggagatcaacatatcgctgcagcagcgtcggccgcaggtgttcattgccacaacgccgaggtattacgaggatgagtacctctacgagcggaggaagtga

SEQ ID NO: 15672 - protein, 431 aa, DROSOPHILA
MHIPSAVLLVLAVSTGLWACCVEGASTGSPSATATTAKPKGFEARSLDVNSSGGEEELDDFETQAQTHLAYRQQPQQQRQLYEYSEEDQEEAPRPVYANRNAKQQSNYLKIQGQLKKPLSEESEEEEEEVEEPDRLSTLLSKSSFSCTDRNSGYYADESLSCEVFHYCQESQKHSWICPEGFTFHQIHLICMPPSHDNICKQSSKYHIVNDYLYKPINLQEHQSKPNVTLRYSERYFPENYYEHERYDDEEEQLPAAPRPRIQQQHHQQQHQQPQQQHRQVLAYQQPQQQPQVRVQYQQPQQHQHHQQQAQPQAQVVTQIRHQPQPQPTTLAYRKPQPVTTVQPQLQLHQLHQPQLQLHQQRPQTLAPTVTPAPYRFFTAAPQLQHLQQQQQQVFRTPEEINISLQQRRPQVFIATTPRYYEDEYLYERRK

SEQ ID NO: 15673 - DNA, 4628 bp, DROSOPHILA
cgaaaatgcccagttgggaaagtgtagtcaaatcgaagggaaacagcgttttgaagctgggatatttgtgcatatgtcggcacgactgaacccaactaaaccgaactgaatcgctggatgttggcttttgattttcgttgattcccgcccgcggggagggggggtgtggtcgtgagcagcgaagggggcgtggcggctgagcgtcaattcgacttgtcttgtgatttgcgcctcacaattggacaaacgaggcgcaattggaggcaaccagtccgagattatcggatgcttcgatgttttgggtgcttggatgttcaaatgtttggatgtgtttgcatgctttgtgggattttgggggggtggggtttgggaaatgggtgttcaattacataaaattacatacatacactgcagtttgcacttgcagttcgtctgcggaagggggggaatgggtctactctaacatcgcaagctgctcccactggccattacaaattgtcaacagtcgctgatttgttaagtacactgcttatcaccgaaatagcgcgcatatcactaaaaaattcagacgacgacgggcgaaatgcgaacgccaaacaacaacaaagaactgaacaaaaaagcaaagtattggtaagcacgcgcgctacgcggccaccagtgttgcacagcgctggagcagctctgttgtgcacgatcactgttatagttgcagagagtatttttcactattttgtggataaaatcaagtggtatgaaaatgtatccatgcgataatgttccgttatcttcaattgctgaaataaagtcaaataaacagtttcaattactgctaaagttaattaatgaaatgctagttaagtatgtcttaaattataaatatttagctactcatgagaattttttttgtttggcccactgtgcataacccgcgcgtgtagcccattccagtattttaccatcttgtacattagtatttacccgtcttccgctacggtcacactgccatatcgacgcaaaacaaattgcgattttcacaacacaagaaaagcaggaaaaacagcaaatatatccgcaatctagctaacacacaggtccccaaccagtcgcagtcgcgttccatgagtgcgaacctgaagaatatcaaactggcccacttcagtggttcgctcggttccggtggctttggcatctctgcgtcatccggaggagctggaaaactgcccacaaatggcacaggtggcggcaaatccgccccaacgagcaccttcctggactccgaggtgctggccacgcccggcggcgtcgttataccaataattcgcactcgggacgtgcccaaattgctgcccaccattgcagcggcactgcagcgtccggcggatgatcatttggcggccgaggatctggatgcagtgcaactggagctggaacagatgctctccaatgtggcgctgcgcacgcgcgtcctgaaagcggagtatgatagcctcgacaaggatgagaagcgccaggatcgaagaaagctcgaccgtgtgcctggatcgccaccttgtccggctagcatgctcaacggcttgctgggcatcggcagcaactcgtcgacgagtctgggcagcccgctgggcggcggaggcgcctcatcctctagccaatcgaagcgcaagcgggatgagccaacgggcgtgcgcaaaaagcactcttcgatgaccattctcaagcaacagggcgtttccggcggcacctcgaagcaccaggccaagaacagccccttggtcgtgcacaccgacgacagcatggactatctgcccacactggcggccgccaatgcctctggatccgtgctgccgcatcaccagccgctgccgcagctaccgaaaatgacggtgcccaagaacgatacgcccaacaagttctggctatccgtggagccctactgcatgcctctaaccaacgaggatctgcgcctaatcgatgacctgctggagcagtattggggtccactggtgccgccagtgccacctctgggtccccactactccacagtttgggcccaggaggatataaaggcgctgcagccgggcggagctcgaattaaatcgaacaattccagcggaatgctcaaaaaggccgaaggcatggtggatgagagcatcactggtccactcacccagcgtttggtgtccgccttaatggaggagtccctgatgacgctgcccagcgaacaggccgccgtgggcgagcacagcaacagcaccacgagcagcagcaacgagaacacccactcgcactcctcgtcctcggcaaatgctgccgcagcagctgcttccgggaactttcgatctctcgccatgatgaaacacggcgtgggcatcgaacagcgcctgaagaagactctcatcgagaacggactgatcgatgccagtgagtttgcggcccacgaagacgtggacgaggtgctgatggagatcaagcgcgtaacgaccgaaatcagcaccatttcgcagtttaacagcgaggaattgaagcgactgcgtgccgttgccagtgaggaaatcaagcgcattgccatcaaacagaaattggacatggtggaccaggagatactcgagtgctacaagcgaatgctgcagtatcgggccaagcgcaagggccacaccatcgaggagaagcaggagatactgcggctgaccaacgagcagcgcctacttgcggatcagctggagcgtatgcagatgcatctgccctgcatcggcggctccggcaactccctgttagagccaaagatgtaggacaggagcctggcctggggctggtgccagctaatggccatgcatcaggcaaagaggcaggtccgcgacgctagcctcaagctgcagtgcgtctgaaggagctgctcctccttactcgccactcctttcatttcgccagactgtaaattagccacgctattcgacacgtacacgtagcctctagtgtccgcaatccaagttgtggacgttttgggaagatgcgctcatggtggcggaaaatgttttgcataagttttcctcgagttttggcattcgttttccccaaatcgaacgccacttttgagtcgttttcgactagcttccaaacccgtattcttatcttcgtcaccagactgtacattaacaaagatacattagctcatagaatgtagtgttcaagattaaagtgaaattaattatttagataagatcttcaagtggcggagagtagcgtttgcgtattttaaactgttcttttacaaaatcataatttccctttccttgcttagtaacgtattccgtattctgtaagcctacagttttttgccaatttgtttgtaattgcctgaaaattaaatggatatccgtagattttacatgctaaatgctaaatttgattttgtgtacataaaagtggagggtgagattcgcattattcgctaaatgaactgaaaaactttccgctactggaatttcccaaaattttacgagcacgttgttttcctcatgtctttcgcaactataaatattgattcaccctatttaacactcccaaatacatacactttgtatagcttaagttatcgcgcggcaataaagtcgtcactatcgagagtaaagcacagaattttccaccatgggagtgagtttgggaggagagaaaccaccgcgctgggcgaacgctgcgtacgctttgagctcgatctggccgacgaagcgggcaagtgaactccagcggatgtggggaatcctctgccgttgcttcgatcttgtttgcccagccgataaggcgcaatcaaagtcggcaactccagcgtacggctaattaaagccaaacaagcgagccggccatcttcgatcggaggaagcccttccgggccacgcggattggctatctctagaacgctaatcgccaggcaaatatatccagaaacaaactttattatacgtagcaaatggcagtcaaatctgatcttctaatatgtgcaagtttttagtcttgggtgaacacgtcgtcagtggccttcctctgaatgtatgctagatgatgtttgtgggtataaagattcattgtacttcatgtatgccgcggtgcatcttgcttgactggtcgatccctttcgcccgccacccgatcccgtatcacaaacgcagtcacagtctttcgtatactaaatgtaaggtgggagctcggacggcatcgagttaatcgccgaagccagcgaactcatccacataggtggacatcagatcagagcgacaggagacctgaatgttggaggcattggccttgagccgaaggttcgcgtcgttggtgagcaggatcatgtggggaacctgcgcctgcagctgcaggcagcaattcaaaatgctgtcatccgggcagtcgatcttgatcaggtgatccgcctcctccaaagcggattgagctgcaacaaagataatacacataggtaagttccaacgatttacatacacaatccacgacccaccttgtatttgaaagctttcgtcgaacttggtgttcaaaaagcgtattgctcgcatggcaatcacacgctgcaggcagtccgactggtacttgctctttagcttgtccagctctttgattactat

SEQ ID NO: 15674 - DNA, 1082 bp, DROSOPHILA
cactgccatatcgacgcaaaacaaattgcgattttcacaacacaagaaaagcaggagatactcgagtgctacaagcgaatgctgcagtatcgggccaagcgcaagggccacaccatcgaggagaagcaggagatactgcggctgaccaacgagcagcgcctacttgcggatcagctggagcgtatgcagatgcatctgccctgcatcggcggctccggcaactccctgttagagccaaagatgtaggacaggagcctggcctggggctggtgccagctaatggccatgcatcaggcaaagaggcaggtccgcgacgctagcctcaagctgcagtgcgtctgaaggagctgctcctccttactcgccactcctttcatttcgccagactgtaaattagccacgctattcgacacgtacacgtagcctctagtgtccgcaatccaagttgtggacgttttgggaagatgcgctcatggtggcggaaaatgttttgcataagttttcctcgagttttggcattcgttttccccaaatcgaacgccacttttgagtcgttttcgactagcttccaaacccgtattcttatcttcgtcaccagactgtacattaacaaagatacattagctcatagaatgtagtgttcaagattaaagtgaaattaattatttagataagatcttcaagtggcggagagtagcgtttgcgtattttaaactgttcttttacaaaatcataatttccctttccttgcttagtaacgtattccgtattctgtaagcctacagttttttgccaatttgtttgtaattgcctgaaaattaaatggatatccgtagattttacatgctaaatgctaaatttgattttgtgtacataaaagtggagggtgagattcgcattattcgctaaatgaactgaaaaactttccgctactggaatttcccaaaattttacgagcacgttgttttcctcatgtctttcgcaactataaatattgattcaccctatttaacactcccaaatacatacactttgtatagcttaagttatcgcgcggcaataaagtcgtcactatcgagagt

SEQ ID NO: 15675 - protein, 57 aa, DROSOPHILA
MRSWWRKMFCISFPRVLAFVFPKSNATFESFSTSFQTRILIFVTRLYINKDTLAHRM

SEQ ID NO: 15676 - DNA, 16532 bp, DROSOPHILA
ggctcaaattgccggtcttgagttctcgtttttcacgccgatcgatcgcgttcattgactccgctatgatggggaggcgttcttccgagttgaaagtcgctcccttaatgaggcagtggatccttgcatatgcgaaactagaaacctacaggaactacatttttctttttcattttccgttggtagcttttttattcgtctatatatcaatatcaataaaaagtaaaacgcaactgatcaagttgcccacttatgcgacccaacttcagtttttttggaacaaaataggtttcactgtactgaaaatcagcattgcaaaacaggaagtgccacttaaaatgcaattgcaaatggaatggttccactagggaacggttattttccaacagggtcaaaataaattacaggaatatacaacggaagaagccgatatatttccacattaaattaataaatgacaagtcaaacaacaaattaaatctaatatgacgttctataagtaaaacttatgattatttcataaaaaaagtatacattggtttgaaaaaaaatggtccggggaatctgggactcaaagaattcgttcttaaaagataattcaaatgattttaagatcgtggtcagattatttactttagtttgtagtacgctaagtaaacgagttttatttaattttaaaattattaaatattttttaacattctagctggacaatacttctacctttgtatatgttacctttatataatatttgcaataacatcattatatatatattcacttttttaatagatccaaagtttgaaaataacgatattttaaaaagcccttttttcggtctgtgaatggtcacactaaaattcaattttagaacttagcgagttcacccacccaaactagaattaagcacatcgtttttggtatttttagaaaagaaaactgtggtatttcttgggcaccctgcacacggtcacactcatcgatagtcgcaagagcaatcgatgattctgcatcactagtaaaaattgctgagaaaaacgaaaacgcgaaaaatgaaaacgcaatacagaaaatcaaaattgaagtgaaaccaagtgcgaaaacgaaggagctaaaggtgcggtcaaacgataagcatatcccaaatgaaaacaatgcgagtgtgcagccaaaagaggcccccatttgtgttgctcccctcgaaagaaaaagagccataaaaatcgattcttcaaagaagtcgcacactgcgttcgagacttttttgcgcgggcggtggagcctggcgttgcttttcgccaacttttcgtggagctcgtaaagtttttgtatttcgcgtggcttttgagggttaaaaagagctacctgtgcatagtgcatacctgctgatctgtgtgtgtgtgggggtgtagttgtgtgtgaaagtgcgaaaagaatatcaagtctgtatgtacatattcgcatttatttggacagccctgaaaaatcggacaggacactagaatcacattcttaattagctaatttccagtaaatatttgagtgtgtctcgcgtaaataacggaatgccagcacatgacaataaaacgtatccgtgtgcgtgcaagtgtgtgtgtgtgtagtaacaacaaagcaaaaaagcaaaagcaaaacaaagtgaatgacaaacggcgagaacgaaatggaaaaccaccccccgcaccacccacttactgttagacatgtgtgcgcgtgtgtgcgtggcgctaattgaactcacacaatatatataatttattttttttggcgctccacaaaagccacttacttgtgagtcagcttacgacttccacctgccttccagattgcgtgctcataactcccgcgaggacgacaactaccgctaacaactaacggtcataaaagtcaaaagcaacgaagcccgaggagaaggagctagccacgccccccgctgcagcccccgcttagggagccccgcccatccgcatatccactccgcttcatctaaatagagattcaaaaacaacacccgctgcatccacatccgcgatggctagtgataagatcaaagtcgccgtaagggtgcgacccttcaatcgccgaggtaagtgccgatttacatgccccacataatcccctgtactgggagaaaaattcgccaacttatggagtttcaaaatataaatgtttcacaatcgacatgagcacaataataagcaacagatagacataatttctgatttttcattgtacaaaaatgttacattatcgtaaattaaaaaacaaaataattttggagtaaatctgaaaagctacagacttaaagcttaaatattcgccctttaattttgtgttttaatgcgctcatatttatctattgttatgttaaaactttcatcttttttttagtataataaagtagttttacggttggtcgtgagggtggttaagcaatttctataaaattataacatcagatgccaggcactccatttattttgtaagagttgataatatagttcataaggagttgccttgagtggcccgcactttccattttccccactttttcacattgtttcccaacaatggccaacaagcactgcagttgcctgcaatcaataatgcaaacaaccaaccaggcaagcgactgtttttttaggctaacgaaatttacatgggcttcctcgcttcctttgaaatacggtttcgtttttcaactgctgcgccagcggatttttcgcagggcttaactgcagaactacagcgtctacctacgggatggtaatgggatgggatggattgggatggttttgcaaggtccccggtctgctcgtctgacaaacgatttgcgtttccagctaatttcgcgttacccactgccagccacgaagtgtgttgcaagtgcaaaataactaaaaatgaaaaacaagcaacagcgccgtcagcgtttccaatgtcaacactgatcattcatttggctcatccatgactcacactcgcggcggcgtcggcggaagcgaaggatggcagcggaaaaggggctctacgacccaaccatatgcaaaagatacctatgtaaacgcatataagcgtgctgcatgcttgtatttatgtgcctgtgcgtggggcaaggtccacttggatcccctgctgtattgattgaatggcaaactttgattgcacatcttatttatatttacataaggcattgaatcagttacatttattgcattttggtgcaccctctgtttataaattggcataacgtaaagtttgatttcatacacatataaacaaacggcaggcttagaaagtattccatttatatgggtcacgatcctaattgattgaatgacaaacctacaccgatgactccatgtttgtttatatttacatgattgtataatccatcaaaacacatttctgttgttattttgtagcttttcttttcatactcagtttgtcataactcgattagatggactctaacctattaggtctttatctatagcgaagctaatggatgaattaggataattgcaattgcattctggttttagaggtagtcgttgtggagcatagtgcaataattgtgcacttgcaagtatttgcaaatgaaacacaaactagtcttagtagctatgggaccttaaagtgatgaattctgcgatcacagatgctcatttaattacaaataactttgtaattttgacaaatttattaccacgctagtgccagctacttgtgaaactaattaattgtatccgtaacacttgtatatacttgtttattggcaaacaaacaactacttctggttatccatcataatgtgtcacttgtaatattttccggccaagttaggcgtacgcatggacttggtaaccgcgtgtatttttagaagtttgaccgtgtatcgatgttgtactttgtcatgtttttggcttgtttgatccgttgctgttttggtgtctgaagagagtagtagtcgtagtcaccggaaagtctgcgataagcaacgcagaatcgttatcactgggctgataaaggcttgtattttgcgatacccagcgtgttacacacttgcagtgactggcattagtcaacagtgtatttgggccatgtccgtaactggtgacctctccgcgttgagctggccagcagagcgtaaaatgaaaacagaaaaggcaatttcaaacgcaaagacacggcaaaggcagctgaaaagtcaggcggcgaaacaagctcgaaatgaagtcacagctctttacttcttaccaaaaagcttaacctgttttcactatgccagtgtatgcggagtatatgtatgttaatttcagcgctggacaatagcgaagtgaaaaccgtttgaggttatacgaactcgccatcaaatcaactgaccagaactacaaatgagaccatcaaataatttatggcacgccttcgtcacattcgagactttgaacaagacatgtagcccgtagccaccagccggtagggtcagctcgttgctcctgagtcctttgcggctttcatttccatgtcatgtcacgttctcggctttgtaacataaaccggaacggaagttccaaaggccaggcagcacaccaggatacggctgtacatagatatatatatgtatatacctatacttttagcccaaccattccatcccgacttgtgtgtgtgtgtgtgggcccaaatgtgtctgtccgtctgggtttggctttgacgtcgctgtttttcccctgctcgtcatgttttgtgtgctgtatagatatagatatggatatatagtatgcctttgccatttcgccgttctctgccatttggatccgttccgttttgttcgcagtgaatgaagtatgcgaaggacacgaggaggcatcggaactgaaatatttccacgatttattagctggcactctttttaccaaccagccagccaggatgaatggaataatcaacccgataaggtcacctcgcttgctcgtattaaatgctgcatttaaggagtgcacaccgtagataaaaacattatctatattattattaaatctatatatcgtttattttaaatcgttaattgataaaatcaagggcatccaaattcgttttgagaactatctaatcgcccattgttttattgctgctaaaatatttattacatggacacgttgggcaacttagttttctgccttttttcgtttgtttacaatttatttgaaaggttcccttcattgagataatagtggcattggcattttatacccaacatgcacatttatcgccccttgctctctacactcgcactcatgtacgaaaaacccaacacacagcctactgtgtgttatgtgtgcaggctatagcaagtgtataaaataaattgtttttgccactttgaactcgttatcaccccaagcgcggaataaaggcgaaattatctcaatttcacacataacatataaataaatatattccggaacagaggtctaaaagtggattcttttacttacagaaatcgaactagatacgaaatgtatcgtggaaatggaaaaacagcagacgatactgcagaatccgccgccactggaaaaaatagagaggtaagtggccttaaaactcaatattttgatgtgcgttttactgcattatttaattcactgtatgtttcacaatcaatttaattatacagcggcttatagccgcgctgtaatgcctttgtaatgccaaacggtttgcttaatgcctttcaaccttcgttttaatacagaaaacaaccaaagacattcgcattcgatcactgcttttactcattgaaccccgaggacgagaactttgcgtcccaggagacagtgttcgattgcgtgggacgtggaattctggataatgcattccagggctataatgcgtgcatattcgcttacggccagacaggtaagatccatcatgtgtgactcaccatctgtgcgtatttcattaatcttttattcaaattttcaggttctggcaagtcctacacgatgatgggcacccaggagagcaagggcatcattccacgtctgtgtgaccaactcttctcggccatagccaacaaatccacacccgagcttatgtacaaggtggaggtgtcctacatggagatctataacgagaaggtccacgatctgctcgatcccaagccgaacaaacagtcgcttaaggtgcgcgagcacaatgttatgggcccatatgtggacggactgtcgcagctggctgtgacatcctatcaggacatcgataacctcatgaccgaaggcaacaagtcacgaacggtggccgccaccaatatgaatgccgagtcgtcgcgctcccacgccgtcttctcagtggtcctcactcagatactcacggatcaggcgacgggagtgagcggcgagaaggtgtcccgcatgtccctggtggatttggctggctccgagcgggctgtgaaaacgggagctgttggcgatcgtctcaaggaaggctctaacatcaacaagtgagtaatatttagtaaataattatttgtttctaccggtcttccggtatgtaggtcattcaaatcaataacaagcagaaactaacctgttgaatattttaatttaatcttgtgatccagatctctgaccacacttggcctggtcatctccaagttggccgatcaatccaatggcaagaagagcggtaacgacaaattcgttccctaccgcgattccgtgctcacctggctgctgaaagacaatttgggtggcaattccagaactgttatggtagcgacaatctcgccatcggcagataactacgaggagacgctttccacgctgcgttatgcagatcgagccaagcgcattgttaaccacgctgttgtcaacgaagatcccaatgcccgcatcattcgtgagctgcgacacgaggtggagacccttagaagtatgctgaaacacgccactggttcaccagtgggcgatgtccaggataagctggctgagagcgagaacctgatgaaacagatttcgcagacttgggaggagaagctggttaagacagaacgcattcaaaacgaacggcagcaggctctagagaaaatgggcattagtgtacaggccagtggcatcaaggtagagaagaacaagtactacttggtcaatttaaatgctgatccgtcccttaacgagctgctggtctattatctgaaggtaaggcctaactaaaaactcattgattcaaatatattaatacattctactcttaggatcgcacactgattggcggacgcactatcagtggccagcagccggatatacaactttccggtctcggaatccagcccgagcactgtgtgatcactatcgaggatagtggactgtacatggagccagtgcagggagcgcgttgctttgtgaacggatctgctgctgtggaaaagacaccactccagaacggcgaccgtatcctgtggggcaaccaccactttttccgcgtcaactcgccgaagagcaataacactagtatgtgcgcttcggagccccagacgccggcgcaactgattgattacaatttcgcacgcgatgagattatgcagaacgaattgagcaacgatcctatccagacggccattgctcggctggaacgtcagcacgaggaagataagcaggtggcgcttgaaaaacaacggcaggagtacgagcgtcagttccagcagctacgcaatattctgtcgcctagtacaccatatgcaccttatgctccttatgatccactgcgcatgggtaagattaccccaaatactcctacttcgcaaatgcgagtggaaaagtgggcacaggtaagctgtgatcactcagctctcgcaatatacttttgcactatattttctaactcttaggaacgagatgagatgtttcgtcgcagtttgggtcagctgaaaacggatattatgcgtgcgaattccctggtccaggaggccaactttctggctgaggagatggagaagaagaccaagttttcagtcactctgcagattccgccagctaatctaagccctaacagaaggcgtggggcatttgtcagcgaacccgccattctggtgaagcgcacaaactctggtagccagatctggacgatggagaagctggaaaacaagctgatagacatgcgcgagatgtaccaggagcacaaggagcgcgttctgaacggactggtatgttgacatcgatttgattaattttcatctacctgttgccattgtgatgtgtactaaccatttataattgtatcgattcacacacgcattcaattaacccctgactacagccccttatagagccattctcagaagacgagttcgatgacaaggtaattaagataccacacccccaccaccccaaaacatgaacaccacacacgtttaaactatgatgtagctagtattgttttggatctcccaatcaatgttaactaacctcggatttccacaggacgaggataatgccaagccacaggatccgttttacgagtcgcaagagaaccacaatcttattggcgtggccaatatattcttggaggttctgtttcatgacgtcaagctggactaccacacgcccatcattagccagcaaggcgaggtagcgggtcggcttcaggttgagatcgagcggattgccggccagatgccacaggaccgcatgtgcgagtcagtttcagaatcctctggcgattcacgggatgagtacgacgaccctgtggatcccacatcgaatcagattacctgccgtgtgacgatcaagtgcgccagtggactgccattgtcgctctccaactttgtcttttgccagtacactttttggggtcaccaagagatggttgttccggttatcaatgctgaatcaacggcgcacgaccagaacatggtgtttaagtttgaacacacccaggacttcacggttaccataaacgaagagtttttggagcactgcatagaaggagctctgtccattgaggtgtggggccatcgcagtgccggcttctccaagacaaagggctgggaagtcgaacagcagcaagccaaggcccgttccctggtcgatcgctgggcggagttgtcgcggaagatcgagctttgggtggagattcacgagcttaatgacaacggcgagtattcgccagtggaggttaccaatcgcaacgaggtcttgaccggtggcatttaccagttacgtcagggtcagcagcggcgggtgaatgtacgggtgaagccggtgcaaaactctggcaccttgcccattatctgccagtcgattgtgaacgttgccattggcagtgtgacagtgcgatctcggttgcagcgaccactggattcttaccaggaggaagatctcaccgtgctgcgcgagaagtggagcgaagcactgggacgaaggcgtcaataccttgaccaacagatccagatgcttataaagaaagaggagaagaacgaacaggagcgcgagagggagctaagcttggttcatcagtgggtctcgttgacggaggaacgcaacgcggtgttggtgccagctcctggctcgggcattcccggagcacctgcctcatgggagccgccgtccggaatggagccacatgtgcccgtcctcttcctcaacctgaacggtgacgatctgtcggcgcaaaacaccaacgacgagctctccgtcgccggcatcaattccattctctccaaggagcacggacataagttttacacgctgcaaattctgcagcacctagataaggatgtttgctgtgtggccagctgggactcttcgatgcatgacagtcaggccctgaaccgtgtcactgaggccaatgagcgggtctatctcattctgcgcacaacggtacgcctctcgcacccagcacctatggatctcgtgctccgcaagcgactaagcattaacatcaagaagggacagacgctaaccgaccgcctgaagaaattccgtcttgtgcggggagagaacgccatctggcagagcggtgtcacctatgaggtggtctctaacattccaaaagcctccgaggagttggaggaccgcgagtctcttgcacagttggctgccagcggagatgattgctccgcaagtgacggcgaaacctacataggtgagaatgctaatataaatgtgcttagaatcatattaacattcctatcctgtagagaaatacacgcgcggtgtttcggcggtggagagcatactgactctggatagactgcggcagaatgtggcggtcaaggagctggaaacggcacatggacagccgctcagcatgcgcaagaccgtcagcgtgccgaacttctcacaggtaaggacgtgtgctacttggaaaacccatactgctcattccatcgagctgctgctgctgctgcgccgcttccactattcgtcgctgccgccgccgctgctgaattatgtgcttccacttactcacctaacacactcgagcaaaattaaccaaaaacgtctgactaaacgcaaattctttctcttttcacactttttctatgcgcttacaccaaactaaccctcaaaattttgtgtttaaccaccgataaaaacgacaaaattaaccaaatccaaaattcggcgcgcacttcctgcaattttgaatttccctctatatgtgtgtgtgtgtattggtattatcctgtctttatgtttatgctgtgtacgtgtgtgtgttgccccaaaacgcttctcactgcgcacataggcggtcaaagacaccaccaataccgggagtgtaagtaactagtattctcctttctgttttccgtactgtgtttcattgtatcctgtgccgagcactgtacaaacagctttagtagttggagttttcttaagttattccctcttgactattctactactaactatcttatataccgtttttgtgtgcgcccttcagttagccattttttgtaacgtttggaaatttgatgtctgtttttatttgtttttgtttttttaattcaatcatttttgtttcatcctgttgaataacatttgttccttaaaaaaacgtacgcatatcacatttatgacgcaagcaactcataaataaacttacgcagattatgcgcttcgatgcatcgatggagtcgctgctgaatgtgggacgatccgagtcctttgccgatctcaataacagcgctttgggcaacaagtttactccaggtaagctttattttgtattattaatattgattatatttattccccaaatttcaaacagcaggtcatagtccagcaggagcaggcggagtcatccgaagtcgccacagctttggaggcaaaggaagcagcgatgattctcccggaaaagcctttggcattggtgggtatttcgttcgtctacgcgagttcgcaagccaaacatttttctcctatatactcaccattaatatttgagcaacaatattaaaactataatccatataaccgagttattaaacacactatatatttttctaagtaattttgcatatgcttatgcgcaggaaaatttatacacaacctagttgaagccaagctcatgagcaagggatttatctttgtttcaagttttgtttctgttacagaatctaaaaaatttgtagattactttgcgcattacgcaatttgttacttgtagtggtacctaatacagataaattgaaatgatcgtattggcaacaagataaatccttgtttgtttacctatgctttcttcgtgctcaagagcaactccctcaatgacaattgaatccgaatctgtgaactgtcgcattgcttagttaaactttcaaaacccaatttgtttgctttgcttcgatgcaacacctgcagcaaccaagcaattagcaagagtaaccgcattaacttgatctgaggactcgagcgattcttcgtcttaatgcacacgactgttccacattccattgcttatcatataaattgacatgcatccatgaaaacataaccataccgaaccaagtccacatagcttatcgtacttactatatggtttctcacactgtccaactcttttctgtgttttcaacataacgttatctatatgaaattccacggccaacaggctcaatatctctgctgtcaggtaaaggccaaacttatgcccaaatgaaatccgaaggttcattcttgattgctatgcattgattgttagttgagttttattttgtctgtctcacaacccgctcatctatacacccactcatctgcagacgtgtatctttcattaacccatgaccccagatgaatggaattggtttgtgcccaatttagaagtgtttatatgtagttttgtgttagttctgtttgctggtaaaactgtctttaaatcatacccaaaactctctcatctaaaaaagtcatcgcgacatgagttgttcattcatctccaggacattcaatccactccattccagccacccacgcaatccggtgcacaaatctcacacagcagcaaagcacacagcacgagatcttagcacgagccgcgcatctgtagagattattatccctagaatctaaacctttgtttaattttcctttgatgttactatagtgtgttgctggggctgcgagttagtcgcatccctcgctagtttgatcactcatcaaagtctgtaaattgcattgtaacttaacataactcataatcattgtcttccctgcccccaaatgtggaatgcagcgcgtccaacatttttgaatctcaatttgaacttgaacactttgagaattgcgccaacgaaacgtatgtggtttgtctagctattagcttagagttttatttgcaaagaatccattgaccatagcattttgatatttccacagcttcgccagctactagtaagctgctgggcatgcgcatgactacgttgcacgaggagccactgggtggacacagatctctcgacgaagagcctgaggacagctacagcgactcggaatatgctgccgagtacgaacaggagcggcagcagaacaaaagcatggccacgcgatcccgcctcacggcttccaagaccatggactcattcatggacgtcagcagccattcgaaccaaagctacttgagctacacgtccagtgccaacgctaacatgaagcacctgaccggcctggcgactttgagcatgagctcatccaccagcagtggctacggttcccaggctgtctcctgcaataatctgagcaacgaggatattgcttcaatgcgttccatgagcattgatgagacaccaggtgggacattactttatctattcttactataagatatttataaatgtattccttagatttcgatcgcgttaactcgaattcgccaccaaaccggcaggcacgagttaacccctttctcaaggacatgcccaaagctaaaatacaagagcaaccggaacagcaggccaagaagctgcaggaagcatttacgcatccgttggagcagctggagtccagtcaaaacgcacaaagcgacgatgatgaatgcgcgcaactgccaaagaataataacaacaacttggacttggtaaacgagccgaagccactttcaagccaaacggatctggaggaatctatgtcgcaacctaaatcaaaaacggagtttgccacagacaatcagaacggcaacaggtcctctgacgagttaagccacagttccgaggatctgctcgaaggcgatggcatcgtccgggaagagttgcccgctggaaaggtggtgcggcgaaagaagtccaatacccagcccccgagcaatggcaacagcataaataacaataacaacggcacaacccaggcaccgcgcatcaatcatcgggcatcggtggccaaaatggagggtctggctgcatatttggattctagcattatgaccagcagcaccgaagttgatggtaaatatttattacttttatttattgcttccgtctctttatataattaaatttaactaatgttttccagaggagagcaaggatgtggaattggttctgcccgagtggatagtggtgggcgagtcagtgttaatccggccgtataacaccagcggcgtcattcgctttgtgggaaccacggaattccaacccggtgcctggattggcgttgaattggacacaccaacgggcaaaaacgacggcagcgtgaagggcgttcagtatttccagtgcaagcccaagcacggcatgtttgtgcgctccgacaagctgatgctggacaagcgtggcaaggcgatgcgagcctacaaggccgccgagaagagcaacagcatcagcaaaggtgagtggaatgacattggatatggatagcgttcattaactgatatatttaactcgccacagagatgagtacctcgatgactggctcgatgacacgctccaagagccgcggcgattcgctaaacctttcggcgcgtaaatgattgtacccaaagtgttcgcatcagctgcagcgttggactaattgcaggcaatcgacggtagccaccagcagccagccggcgacctgccacagattgcgtgcaaccagcggcgctgcagatgcgaacagtcatggcaagaagtgctatgccaatcgacgctcgacggccttctaaagccgccacccaagatgacaatgtcgagaacgaggtggacgaaggagaagcgactcgacaagcaacgaacaatgcggagcatactcctcatgccaaccatattcaagcttacttaactattctcaccccatgccgcaaatgaaatgccgtacacttatccacacgcttctctaagtagtttaaggcggtgtctacagcagaactaattattaatctagctaaactaaactaaatgaaacgaatcgatactaatctaaactaagccgggtaggcaattgcgtagttgcaatatttcgaacacttgagcgagagcgtaaaatttagcgacccttcgaattatgtatgtatgaaacaatcacttttgattccattgttttgtgttcgtgtagttaattgtcgttttttgcttttcgattttggaatgaagcgttttactgatatattttctaatggttctttgcctttagtttagttaaattgtttttgatatcaatgtgacttgtttaacgatgagcttatatttttacttgttattgactatattcaatatatttgtatatatttataattaagatcttgcaataatttcgtctccatatgacctttcctgagctcattttctttttagcgcatttatatacaattaccaatacaatacgatgttagtaataatgaaagcaacatattctatatagctgcgtctaagcaattgaagcttcctaagattttcgtgtcttggaacttactccccgattatgttgcttcgcaccgtcgcagttaatgtgtaaattgtattattttgatgtgatgtatttataatttccctttatatatgcatatataaatataaataaaatttattttaccgtatacgtagctcattacttatgatttcttttgctttcttaccccgtccgaaaagtgcaatataagtgttaggctctttaagttgtatttatcaatgttgaaggttgtgtgactatgtttgtgaggcgttttaagtaccattaacttagcaccgagccagaagttggtgtaaagtccaaaaacgaaagaaagaaagcaataattgcattaaatattcgattttatgttaagatactttaataatcgtacacaaatatgattgagaatgtgccgaaataacgtgggaaagttaatgatcaaacaaaggcaccggctaaagaacgtttgtacgtaaaaccgtaaacgtatccatccatccatccaaccaaccaacatccaaagcactccaaaactgagtctgagataaattgcaatttaaaacacaataagagcgatttacacttagaaaacccaaaaacgaaactgaaactgaaatccaacagaaaacagttggggacgtgtcaaaggtcaagcccaactggaagatctacaaccattcatccagtgtatacaagcataaatatacaccacttatattatatatatattaggtatatattttcgaactgtttttctacttgcgtaaaagcgaaaagcaactaccaaaatatacttgaaaatacgtccaaaatttaaaatccaaggtcaagatacaactatgatatatatacttacaactgcatggatattcatgaatataaatataaattgcatatttaccaatgataaacctaactgagacagaactaatttaaatattgaatgctccctgggggaatcccgagtattaaatcccaaccaggggcatttgtttgagtatgtatgtgtgtgcattttgtagacgccgcaattcaaattcaaatcggttgagcattacaattcagaattaatttaatcacatgaatgtacatagcgagtgtggcattatgaccggcaaaatcaccatcaaattaacgcatttaact

SEQ ID NO: 15677 - DNA, 7134 bp, DROSOPHILA
gatgattctgcatcactagtaaaaattgctgagaaaaacgaaaacgcgaaaaatgaaaacgcaatacagaaaatcaaaattgaagtgaaaccaagtgcgaaaacgaaggagctaaagattgcgtgctcataactcccgcgaggacgacaactaccgctaacaactaacggtcataaaagtcaaaagcaacgaagcccgaggagaaggagctagccacgccccccgctgcagcccccgcttagggagccccgcccatccgcatatccactccgcttcatctaaatagagattcaaaaacaacacccgctgcatccacatccgcgatggctagtgataagatcaaagtcgccgtaagggtgcgacccttcaatcgccgagaaatcgaactagatacgaaatgtatcgtggaaatggaaaaacagcagacgatactgcagaatccgccgccactggaaaaaatagagagaaaacaaccaaagacattcgcattcgatcactgcttttactcattgaaccccgaggacgagaactttgcgtcccaggagacagtgttcgattgcgtgggacgtggaattctggataatgcattccagggctataatgcgtgcatattcgcttacggccagacaggttctggcaagtcctacacgatgatgggcacccaggagagcaagggcatcattccacgtctgtgtgaccaactcttctcggccatagccaacaaatccacacccgagcttatgtacaaggtggaggtgtcctacatggagatctataacgagaaggtccacgatctgctcgatcccaagccgaacaaacagtcgcttaaggtgcgcgagcacaatgttatgggcccatatgtggacggactgtcgcagctggctgtgacatcctatcaggacatcgataacctcatgaccgaaggcaacaagtcacgaacggtggccgccaccaatatgaatgccgagtcgtcgcgctcccacgccgtcttctcagtggtcctcactcagatactcacggatcaggcgacgggagtgagcggcgagaaggtgtcccgcatgtccctggtggatttggctggctccgagcgggctgtgaaaacgggagctgttggcgatcgtctcaaggaaggctctaacatcaacaaatctctgaccacacttggcctggtcatctccaagttggccgatcaatccaatggcaagaagagcggtaacgacaaattcgttccctaccgcgattccgtgctcacctggctgctgaaagacaatttgggtggcaattccagaactgttatggtagcgacaatctcgccatcggcagataactacgaggagacgctttccacgctgcgttatgcagatcgagccaagcgcattgttaaccacgctgttgtcaacgaagatcccaatgcccgcatcattcgtgagctgcgacacgaggtggagacccttagaagtatgctgaaacacgccactggttcaccagtgggcgatgtccaggataagctggctgagagcgagaacctgatgaaacagatttcgcagacttgggaggagaagctggttaagacagaacgcattcaaaacgaacggcagcaggctctagagaaaatgggcattagtgtacaggccagtggcatcaaggtagagaagaacaagtactacttggtcaatttaaatgctgatccgtcccttaacgagctgctggtctattatctgaaggatcgcacactgattggcggacgcactatcagtggccagcagccggatatacaactttccggtctcggaatccagcccgagcactgtgtgatcactatcgaggatagtggactgtacatggagccagtgcagggagcgcgttgctttgtgaacggatctgctgctgtggaaaagacaccactccagaacggcgaccgtatcctgtggggcaaccaccactttttccgcgtcaactcgccgaagagcaataacactagtatgtgcgcttcggagccccagacgccggcgcaactgattgattacaatttcgcacgcgatgagattatgcagaacgaattgagcaacgatcctatccagacggccattgctcggctggaacgtcagcacgaggaagataagcaggtggcgcttgaaaaacaacggcaggagtacgagcgtcagttccagcagctacgcaatattctgtcgcctagtacaccatatgcaccttatgctccttatgatccactgcgcatgggtaagattaccccaaatactcctacttcgcaaatgcgagtggaaaagtgggcacaggaacgagatgagatgtttcgtcgcagtttgggtcagctgaaaacggatattatgcgtgcgaattccctggtccaggaggccaactttctggctgaggagatggagaagaagaccaagttttcagtcactctgcagattccgccagctaatctaagccctaacagaaggcgtggggcatttgtcagcgaacccgccattctggtgaagcgcacaaactctggtagccagatctggacgatggagaagctggaaaacaagctgatagacatgcgcgagatgtaccaggagcacaaggagcgcgttctgaacggactgccccttatagagccattctcagaagacgagttcgatgacaaggacgaggataatgccaagccacaggatccgttttacgagtcgcaagagaaccacaatcttattggcgtggccaatatattcttggaggttctgtttcatgacgtcaagctggactaccacacgcccatcattagccagcaaggcgaggtagcgggtcggcttcaggttgagatcgagcggattgccggccagatgccacaggaccgcatgtgcgagtcagtttcagaatcctctggcgattcacgggatgagtacgacgaccctgtggatcccacatcgaatcagattacctgccgtgtgacgatcaagtgcgccagtggactgccattgtcgctctccaactttgtcttttgccagtacactttttggggtcaccaagagatggttgttccggttatcaatgctgaatcaacggcgcacgaccagaacatggtgtttaagtttgaacacacccaggacttcacggttaccataaacgaagagtttttggagcactgcatagaaggagctctgtccattgaggtgtggggccatcgcagtgccggcttctccaagacaaagggctgggaagtcgaacagcagcaagccaaggcccgttccctggtcgatcgctgggcggagttgtcgcggaagatcgagctttgggtggagattcacgagcttaatgacaacggcgagtattcgccagtggaggttaccaatcgcaacgaggtcttgaccggtggcatttaccagttacgtcagggtcagcagcggcgggtgaatgtacgggtgaagccggtgcaaaactctggcaccttgcccattatctgccagtcgattgtgaacgttgccattggcagtgtgacagtgcgatctcggttgcagcgaccactggattcttaccaggaggaagatctcaccgtgctgcgcgagaagtggagcgaagcactgggacgaaggcgtcaataccttgaccaacagatccagatgcttataaagaaagaggagaagaacgaacaggagcgcgagagggagctaagcttggttcatcagtgggtctcgttgacggaggaacgcaacgcggtgttggtgccagctcctggctcgggcattcccggagcacctgcctcatgggagccgccgtccggaatggagccacatgtgcccgtcctcttcctcaacctgaacggtgacgatctgtcggcgcaaaacaccaacgacgagctctccgtcgccggcatcaattccattctctccaaggagcacggacataagttttacacgctgcaaattctgcagcacctagataaggatgtttgctgtgtggccagctgggactcttcgatgcatgacagtcaggccctgaaccgtgtcactgaggccaatgagcgggtctatctcattctgcgcacaacggtacgcctctcgcacccagcacctatggatctcgtgctccgcaagcgactaagcattaacatcaagaagggacagacgctaaccgaccgcctgaagaaattccgtcttgtgcggggagagaacgccatctggcagagcggtgtcacctatgaggtggtctctaacattccaaaagcctccgaggagttggaggaccgcgagtctcttgcacagttggctgccagcggagatgattgctccgcaagtgacggcgaaacctacatagagaaatacacgcgcggtgtttcggcggtggagagcatactgactctggatagactgcggcagaatgtggcggtcaaggagctggaaacggcacatggacagccgctcagcatgcgcaagaccgtcagcgtgccgaacttctcacagcaactcataaataaacttacgcagattatgcgcttcgatgcatcgatggagtcgctgctgaatgtgggacgatccgagtcctttgccgatctcaataacagcgctttgggcaacaagtttactccagcaggtcatagtccagcaggagcaggcggagtcatccgaagtcgccacagctttggaggcaaaggaagcagcgatgattctcccggaaaagcctttggcattgcttcgccagctactagtaagctgctgggcatgcgcatgactacgttgcacgaggagccactgggtggacacagatctctcgacgaagagcctgaggacagctacagcgactcggaatatgctgccgagtacgaacaggagcggcagcagaacaaaagcatggccacgcgatcccgcctcacggcttccaagaccatggactcattcatggacgtcagcagccattcgaaccaaagctacttgagctacacgtccagtgccaacgctaacatgaagcacctgaccggcctggcgactttgagcatgagctcatccaccagcagtggctacggttcccaggctgtctcctgcaataatctgagcaacgaggatattgcttcaatgcgttccatgagcattgatgagacaccagatttcgatcgcgttaactcgaattcgccaccaaaccggcaggcacgagttaacccctttctcaaggacatgcccaaagctaaaatacaagagcaaccggaacagcaggccaagaagctgcaggaagcatttacgcatccgttggagcagctggagtccagtcaaaacgcacaaagcgacgatgatgaatgcgcgcaactgccaaagaataataacaacaacttggacttggtaaacgagccgaagccactttcaagccaaacggatctggaggaatctatgtcgcaacctaaatcaaaaacggagtttgccacagacaatcagaacggcaacaggtcctctgacgagttaagccacagttccgaggatctgctcgaaggcgatggcatcgtccgggaagagttgcccgctggaaaggtggtgcggcgaaagaagtccaatacccagcccccgagcaatggcaacagcataaataacaataacaacggcacaacccaggcaccgcgcatcaatcatcgggcatcggtggccaaaatggagggtctggctgcatatttggattctagcattatgaccagcagcaccgaagttgatgaggagagcaaggatgtggaattggttctgcccgagtggatagtggtgggcgagtcagtgttaatccggccgtataacaccagcggcgtcattcgctttgtgggaaccacggaattccaacccggtgcctggattggcgttgaattggacacaccaacgggcaaaaacgacggcagcgtgaagggcgttcagtatttccagtgcaagcccaagcacggcatgtttgtgcgctccgacaagctgatgctggacaagcgtggcaaggcgatgcgagcctacaaggccgccgagaagagcaacagcatcagcaaagagatgagtacctcgatgactggctcgatgacacgctccaagagccgcggcgattcgctaaacctttcggcgcgtaaatgattgtacccaaagtgttcgcatcagctgcagcgttggactaattgcaggcaatcgacggtagccaccagcagccagccggcgacctgccacagattgcgtgcaaccagcggcgctgcagatgcgaacagtcatggcaagaagtgctatgccaatcgacgctcgacggccttctaaagccgccacccaagatgacaatgtcgagaacgaggtggacgaaggagaagcgactcgacaagcaacgaacaatgcggagcatactcctcatgccaaccatattcaagcttacttaactattctcaccccatgccgcaaatgaaatgccgtacacttatccacacgcttctctaagtagtttaaggcggtgtctacagcagaactaattattaatctagctaaactaaactaaatgaaacgaatcgatactaatctaaactaagccgggtaggcaattgcgtagttgcaatatttcgaacacttgagcgagagcgtaaaatttagcgacccttcgaattatgtatgtatgaaacaatcacttttgattccattgttttgtgttcgtgtagttaattgtcgttttttgcttttcgattttggaatgaagcgttttactgatatattttctaatggttctttgcctttagtttagttaaattgtttttgatatcaatgtgacttgtttaacgatgagcttatatttttacttgttattgactatattcaatatatttgtatatatttataattaagatcttgcaataatttcgtctccatatgacctttcctgagctcattttctttttagcgcatttatatacaattaccaatacaatacgatgttagtaataatgaaagcaacatattctatatagctgcgtctaagcaattgaagcttcctaagattttcgtgtcttggaacttactccccgattatgttgcttcgcaccgtcgcagttaatgtgtaaattgtattattttgatgtgatgtatttataatttccctttatatatgcatatataaatataaataaaatttattttaccgtat

SEQ ID NO: 15678 - protein, 1921 aa, DROSOPHILA
MASDKIKVAVRVRPFNRREIELDTKCIVEMEKQQTILQNPPPLEKIERKQPKTFAFDHCFYSLNPEDENFASQETVFDCVGRGILDNAFQGYNACIFAYGQTGSGKSYTMMGTQESKGIIPRLCDQLFSAIANKSTPELMYKVEVSYMEIYNEKVHDLLDPKPNKQSLKVREHNVMGPYVDGLSQLAVTSYQDIDNLMTEGNKSRTVAATNMNAESSRSHAVFSVVLTQILTDQATGVSGEKVSRMSLVDLAGSERAVKTGAVGDRLKEGSNINKSLTTLGLVISKLADQSNGKKSGNDKFVPYRDSVLTWLLKDNLGGNSRTVMVATISPSADNYEETLSTLRYADRAKRIVNHAVVNEDPNARIIRELRHEVETLRSMLKHATGSPVGDVQDKLAESENLMKQISQTWEEKLVKTERIQNERQQALEKMGISVQASGIKVEKNKYYLVNLNADPSLNELLVYYLKDRTLIGGRTISGQQPDIQLSGLGIQPEHCVITIEDSGLYMEPVQGARCFVNGSAAVEKTPLQNGDRILWGNHHFFRVNSPKSNNTSMCASEPQTPAQLIDYNFARDEIMQNELSNDPIQTAIARLERQHEEDKQVALEKQRQEYERQFQQLRNILSPSTPYAPYAPYDPLRMGKITPNTPTSQMRVEKWAQERDEMFRRSLGQLKTDIMRANSLVQEANFLAEEMEKKTKFSVTLQIPPANLSPNRRRGAFVSEPAILVKRTNSGSQIWTMEKLENKLIDMREMYQEHKERVLNGLPLIEPFSEDEFDDKDEDNAKPQDPFYESQENHNLIGVANIFLEVLFHDVKLDYHTPIISQQGEVAGRLQVEIERIAGQMPQDRMCESVSESSGDSRDEYDDPVDPTSNQITCRVTIKCASGLPLSLSNFVFCQYTFWGHQEMVVPVINAESTAHDQNMVFKFEHTQDFTVTINEEFLEHCIEGALSIEVWGHRSAGFSKTKGWEVEQQQAKARSLVDRWAELSRKIELWVEIHELNDNGEYSPVEVTNRNEVLTGGIYQLRQGQQRRVNVRVKPVQNSGTLPIICQSIVNVAIGSVTVRSRLQRPLDSYQEEDLTVLREKWSEALGRRRQYLDQQIQMLIKKEEKNEQERERELSLVHQWVSLTEERNAVLVPAPGSGIPGAPASWEPPSGMEPHVPVLFLNLNGDDLSAQNTNDELSVAGINSILSKEHGHKFYTLQILQHLDKDVCCVASWDSSMHDSQALNRVTEANERVYLILRTTVRLSHPAPMDLVLRKRLSINIKKGQTLTDRLKKFRLVRGENAIWQSGVTYEVVSNIPKASEELEDRESLAQLAASGDDCSASDGETYIEKYTRGVSAVESILTLDRLRQNVAVKELETAHGQPLSMRKTVSVPNFSQQLINKLTQIMRFDASMESLLNVGRSESFADLNNSALGNKFTPAGHSPAGAGGVIRSRHSFGGKGSSDDSPGKAFGIASPATSKLLGMRMTTLHEEPLGGHRSLDEEPEDSYSDSEYAAEYEQERQQNKSMATRSRLTASKTMDSFMDVSSHSNQSYLSYTSSANANMKHLTGLATLSMSSSTSSGYGSQAVSCNNLSNEDIASMRSMSIDETPDFDRVNSNSPPNRQARVNPFLKDMPKAKIQEQPEQQAKKLQEAFTHPLEQLESSQNAQSDDDECAQLPKNNNNNLDLVNEPKPLSSQTDLEESMSQPKSKTEFATDNQNGNRSSDELSHSSEDLLEGDGIVREELPAGKVVRRKKSNTQPPSNGNSINNNNNGTTQAPRINHRASVAKMEGLAAYLDSSIMTSSTEVDEESKDVELVLPEWIVVGESVLIRPYNTSGVIRFVGTTEFQPGAWIGVELDTPTGKNDGSVKGVQYFQCKPKHGMFVRSDKLMLDKRGKAMRAYKAAEKSNSISKEMSTSMTGSMTRSKSRGDSLNLSARK

SEQ ID NO: 15679 - DNA, 4664 bp, DROSOPHILA
tgctctatcaacttgtttgtttaacttaaaagtaggattaaacttaatgtaattacattggtttccagcgggcgatgcccactgtcataagaaccagctgcctgtgtgaccaaagaaaaacctttcctaaattttgtttcgaaagcctcgctttgaatattgttttgggtttaaatgtcttgcagagcttacgagataaaaataataacttaattaggttaagcagtaagtggtaaaaaacacgcacaaatttgtcgttgaataatatacaaaaatttaattttttttaaagctttggtttcatttataatttctgcaagcaacgttgaaagttttttttttttttgaaatggagaagcctatataaattagtatttgtcctttttgtttttaaaagtgagatcaattcaagctgtttaaaggcgttttaaaatgtttcttaaaatttttgaatagattttgcataagggtaaaaagttttccaaagaaagttattaaaattccctggttattaggtgtcggttttacaaatttaaatttgtataaagcaagcttttaaattgtttttcacaaaagcaacaggactcacggaatagatgaggagcattacgaatcttgaaaaaaaatttaataaaaaaaatgtcaactgaaatgtagcttttaaaacagtttgctttgaatgcccatatttaaataagcaaattattaatatacatatgctttgaagtttacagtgccgctcctttacattgaactaatgattgaacaatttataagcaactttttgccacctagatttcattcctttctggctatgaagcattttactttcactaaaatacccctataatgaaaaacatgtgcgttcaggctttgtgcttgaatatcggctgcactttctcctacaaaagaaatgggattttaactaagttctaactgttctgtcgtgtgtgtgtgtgtgaaagagcttttctttgagaggttttcggggcttctatctctaggctatttcctttttgatttgtaactcgcagttcgttgttgctgatgcagtggtggttgcggctgcagtgggtggtgctggtggtgtctgcttcttgctagccttggtggccatcggaggatgtgctggcgctggatggtgtccagcgacggatggtccactgagcacattttggggtgccacccgctggcgctgctgctgctgtcgctgctgcaatggcatttcgtcgtcatcggagtcctcctcttctggatcctcctccgcctcatcctcttgactttcctcggcgagcctctgattgttctcgtcgctgccaacattgctactcattttttccagtgcatggcaggcggacatctgggccttcttcatcgaggactcgtcgctgctattactactatcgaacaactgtccggcagttgccgccgagtccggcgagaggggcgttgtggccgtggggggcgtggctagtgcactactgtggggagcctccacttgaacctcttcgtcctcatcctcctcgtcttcgtcttcatcatcctcctccatttcatcgtcgctggaaatttgactgggctggggacttttgggattattagttgggtctgttttatcgtcatttttttcaagtttttccagatcgtgcgactccgtgccattggaaggactttcctcattctctacctgcttgtcctcagctttctccccaacctgcagctttattctcttgctttcaggctcatctggcttctcgcaatcccccccttcactcgcacaacaatttggcggcgtgacactccgccgcagaccattggctggagcctttataaggggagatagctcctgttgattattgttattagccctatcctccatttcatcttcctccagctcctcgtcctcttccgcctctcctcgacccgcttcgaccacgttctccagtcgtgtttggtgcttgaatggcatcttccgaagatctactttacagacctgctcttcgaattgcctgcgatagcgttggagttgctccgtaagatcggctatgtgggcatcctgtttgtggagcagttcactcaattgaatgttgttatagcgatattgatcgttctcctgcagtagtctctgcagtatcagaaggactctctcccggtccttgggtcgagtttctctgagggactccacagcctgctcccagggtggtaacatggcactcgagtcgggctccccattcagactatccgtatcatccgtatccgtagataactcgaattcactgcccaaatggggcttaccattttgcaagccatggttcccagatcctaccgagctgtgatgggtcttgggttgagtcgcatgatgcggcgaactgaccacgttcgatgagtgggtactcaggttcaagccagcactggaggattgagtgggtgatgaggcctggcttttgtagtacccatggctaaagtgatgcatgtgcgtggggtgatgctggtggtgatgtggggtcatgccgctcaccgcgaccaccggctgttgactcatcaggttcttgttgatccgtatccgactcggttcgttgtttgtggcggctagcgatgagctgccattaccgtttggcagggaactggagctgggcaaaagtttggcatgctgattaacggtggctataatgtgctgcgacggtggtggagcacctgccgttggctgcaccacctggtggtgcgacgactgctggtggtggggtgaggtggaggaggtaatctcattgctgccacccgctgaaaactcctccgggctgcgcatgttccgaaggttagttggtgtgggcggtgcaccacctgcattgggtggtgcggtggctggtgctgcgggcaggtgggcgggtagtggtgagttgctgccactcgaggaggggtgtggcggttcgacgacatccagtggcagcaccaccccatcgggcggtgatgctgtaggtggtgtgggtgtctgcgatcgctcctgcttgatgtgcaccacctggtgatccgtctccttctccctcaacctctgacgttccatcacctcccgttccattcgctccctatccttgtccctctccttggagagtatactctttctgggtgccaaggccacattgggttggtaagtcctctccgcatatcgcttgtccgtactccgcaccacccgctccggattctgtagctctggtggttcctggcaggcatagggtagtgatgacaacgtggcgccataggcgtgcagaaaagctttggtcgtatctggcccccaaggtcggaaggccgacgaggagttcagcgtgggtggtgtcggatattgcggcaaatgtggatagggtgtggtggccaccaaaacggctcgatgctgacggggcaggggatgcgagtggggcaggtgctctcgctccctctcccgctccttctgcacacagtgcgcatacatgacctggtactgatattccagagcggaagcggccaccgtcgcccccttcagctgctgcagctgcttcttgccactgggaatgtccatttgtggctgcttcattggcggtggcggcggcggagccaaggcgcccaccagcccatgtggatgtcccgccaatccaagaacaggacccgagccgagcataccgtcatccatgagcatttccgcctgcaaataaatgtttgagtcattagaaaattgatcaatcactttacaagtatacaagaagaaaaagtgtataaattatattactttttaagttgggtgtctaagagttattgtttcataaaccaaatcaccttgctcatagttctcatatttaattaaactaattgatgatcaatttcggtcaaagttttccccagtgcaagctttaaggttgttagaaaattgatcgactataaaaatagcagtggaagcctggcaaaaccagtagccatcatcaatttgaattgcagtcggcggcgagcgagtgggctaattataaacaaacaaccgaactacccagggagcgatcctcgaaagccagacaccaagccccaaacgcaccccgcggctatggcgccaactgtcattgagaccaaaccagaatccggcgaaggagtagcaggtgaaggaagaggatggaacgttggaacgttggaactccactggcggcggcttcctcctggtcctgtaactgcataccgctttgaagtggctgccagcagttgtctcattctacatactaccactcattataccctgtacttttcgaaacagaggcgtatttttctattgtcttacgttcaactgaataggaaatctatattatcttgaagaagaagtaattagtacttttcaataggactgcttactttgtagcggtaaatttaaaaaccattttaaaaatacgaggcatttaaaatttgaaaccaaatggctcccacatatttgcattatcagcacggttaaaggaagaagcgaattgagcaggggaaaatgaagaggagcaatcccagccggttccgcggtttgcgtgtttgtgtagctgttaaaatgattggcactgcgtccaattatggacaaggcaacctcggctgcattcgcagcagccataaagtgatttttgaatggaggcggcgccattatccattacccattgccatcgccatcgccagct

SEQ ID NO: 15680 - DNA, 2664 bp, DROSOPHILA
atgctcatggatgacggtatgctcggctcgggtcctgttcttggattggcgggacatccacatgggctggtgggcgccttggctccgccgccgccaccgccaatgaagcagccacaaatggacattcccagtggcaagaagcagctgcagcagctgaagggggcgacggtggccgcttccgctctggaatatcagtaccaggtcatgtatgcgcactgtgtgcagaaggagcgggagagggagcgagagcacctgccccactcgcatcccctgccccgtcagcatcgagccgttttggtggccaccacaccctatccacatttgccgcaatatccgacaccacccacgctgaactcctcgtcggccttccgaccttgggggccagatacgaccaaagcttttctgcacgcctatggcgccacgttgtcatcactaccctatgcctgccaggaaccaccagagctacagaatccggagcgggtggtgcggagtacggacaagcgatatgcggagaggacttaccaacccaatgtggccttggcacccagaaagagtatactctccaaggagagggacaaggatagggagcgaatggaacgggaggtgatggaacgtcagaggttgagggagaaggagacggatcaccaggtggtgcacatcaagcaggagcgatcgcagacacccacaccacctacagcatcaccgcccgatggggtggtgctgccactggatgtcgtcgaaccgccacacccctcctcgagtggcagcaactcaccactacccgcccacctgcccgcagcaccagccaccgcaccacccaatgcaggtggtgcaccgcccacaccaactaaccttcggaacatgcgcagcccggaggagttttcagcgggtggcagcaatgagattacctcctccacctcaccccaccaccagcagtcgtcgcaccaccaggtggtgcagccaacggcaggtgctccaccaccgtcgcagcacattatagccaccgttaatcagcatgccaaacttttgcccagctccagttccctgccaaacggtaatggcagctcatcgctagccgccacaaacaacgaaccgagtcggatacggatcaacaagaacctgatgagtcaacagccggtggtcgcggtgagcggcatgaccccacatcaccaccagcatcaccccacgcacatgcatcactttagccatgggtactacaaaagccaggcctcatcacccactcaatcctccagtgctggcttgaacctgagtacccactcatcgaacgtggtcagttcgccgcatcatgcgactcaacccaagacccatcacagctcggtaggatctgggaaccatggcttgcaaaatggtaagccccatttgggcagtgaattcgagttatctacggatacggatgatacggatagtctgaatggggagcccgactcgagtgccatgttaccaccctgggagcaggctgtggagtccctcagagaaactcgacccaaggaccgggagagagtccttctgatactgcagagactactgcaggagaacgatcaatatcgctataacaacattcaattgagtgaactgctccacaaacaggatgcccacatagccgatcttacggagcaactccaacgctatcgcaggcaattcgaagagcaggtctgtaaagtagatcttcggaagatgccattcaagcaccaaacacgactggagaacgtggtcgaagcgggtcgaggagaggcggaagaggacgaggagctggaggaagatgaaatggaggatagggctaataacaataatcaacaggagctatctccccttataaaggctccagccaatggtctgcggcggagtgtcacgccgccaaattgttgtgcgagtgaagggggggattgcgagaagccagatgagcctgaaagcaagagaataaagctgcaggttggggagaaagctgaggacaagcaggtagagaatgaggaaagtccttccaatggcacggagtcgcacgatctggaaaaacttgaaaaaaatgacgataaaacagacccaactaataatcccaaaagtccccagcccagtcaaatttccagcgacgatgaaatggaggaggatgatgaagacgaagacgaggaggatgaggacgaagaggttcaagtggaggctccccacagtagtgcactagccacgccccccacggccacaacgcccctctcgccggactcggcggcaactgccggacagttgttcgatagtagtaatagcagcgacgagtcctcgatgaagaaggcccagatgtccgcctgccatgcactggaaaaaatgagtagcaatgttggcagcgacgagaacaatcagaggctcgccgaggaaagtcaagaggatgaggcggaggaggatccagaagaggaggactccgatgacgacgaaatgccattgcagcagcgacagcagcagcagcgccagcgggtggcaccccaaaatgtgctcagtggaccatccgtcgctggacaccatccagcgccagcacatcctccgatggccaccaaggctagcaagaagcagacaccaccagcaccacccactgcagccgcaaccaccactgcatcagcaacaacgaactgcgagttacaaatcaaaaaggaaatagcctag

SEQ ID NO: 15681 - protein, 881 aa, DROSOPHILA
MLGSGPVLGLAGHPHGLVGALAPPPPPPMKQPQMDIPSGKKQLQQLKGATVAASALEYQYQVMYAHCVQKEREREREHLPHSHPLPRQHRAVLVATTPYPHLPQYPTPPTLNSSSAFRPWGPDTTKAFLHAYGATLSSLPYACQEPPELQNPERVVRSTDKRYAERTYQPNVALAPRKSILSKERDKDRERMEREVMERQRLREKETDHQVVHIKQERSQTPTPPTASPPDGVVLPLDVVEPPHPSSSGSNSPLPAHLPAAPATAPPNAGGAPPTPTNLRNMRSPEEFSAGGSNEITSSTSPHHQQSSHHQVVQPTAGAPPPSQHIIATVNQHAKLLPSSSSLPNGNGSSSLAATNNEPSRIRINKNLMSQQPVVAVSGMTPHHHQHHPTHMHHFSHGYYKSQASSPTQSSSAGLNLSTHSSNVVSSPHHATQPKTHHSSVGSGNHGLQNGKPHLGSEFELSTDTDDTDSLNGEPDSSAMLPPWEQAVESLRETRPKDRERVLLILQRLLQENDQYRYNNIQLSELLHKQDAHIADLTEQLQRYRRQFEEQVCKVDLRKMPFKHQTRLENVVEAGRGEAEEDEELEEDEMEDRANNNNQQELSPLIKAPANGLRRSVTPPNCCASEGGDCEKPDEPESKRIKLQVGEKAEDKQVENEESPSNGTESHDLEKLEKNDDKTDPTNNPKSPQPSQISSDDEMEEDDEDEDEEDEDEEVQVEAPHSSALATPPTATTPLSPDSAATAGQLFDSSNSSDESSMKKAQMSACHALEKMSSNVGSDENNQRLAEESQEDEAEEDPEEEDSDDDEMPLQQRQQQQRQRVAPQNVLSGPSVAGHHPAPAHPPMATKASKKQTPPAPPTAAATTTASATTNCELQIKKEIA

SEQ ID NO: 15682 - DNA, 4425 bp, DROSOPHILA
cctaaactagataggaatattaacatgttatgaataggacctttctttcaataatatagtttaaacttaaggctgaagtaccggttatactaagggcattgcggtgaagttagacaacaagtaagtttacaaaagagtttaatgtcgcccattcccccaaaagatgcaaactcaagttaacaaatatatatctttatcaaatatctttagttgcctagtagcttggacaaatagttggatcacatagatcgtttcttttcgaaactgtatctcaatgatgggcagaagaggcgacaagtcgagggaaacagaaggcaagtaactcaaaggtctggggcacagatcgaacgatgaacaaataaagttgtggataggagaaaactagcattacgtttaggggtttggaaagagtttagttagtacaagtggtaagtagtaagcgtttcgcaaaaccaatcaataaacatgtcttacggaagtgcctgcaaactactttcgcgattcccgtatgccgcatatatcccaatatccatgatcgccatgtggcgctgtggcatatcgcctcgataaattgaatcgctactgcagtgcgtgtgtgatgtaaattgtatggcatatatatgatataatcaattgttagagtatcaattgttgttcaattgttcggggggtttcaggtttcaggtttcgggtatcgggtatcgggtatcgggtttcgggtttcggttttcggttttcggatttcaggttctttgttgttttcgttctaaaggtctcgtgcgcatcgtgaaaaagttagtagtatatagtagtatatatgttgaatgtaaaccaaaagctttgtcgccaaaaatcaaaacgatgtctttgcttagcttggctctttcaggcaaatcaaacattgcgaaaaatcagaaaaattagctcttagctgaatatcgatcgtatcgattattgaactgactcactcagcacctctccattcggtcgagatctttacttacctgaaggggatttcgctgagattactctgggaatgagagtgcggtaccttggagccggcatccttgttcacaccgatcacggctagctcgtgggcggagcccgtcaggctgcgatcgctgccacgacgacgggcaagatttccggggggtggagcctgcatcatggaactgccggcggatgtgccgctgggtcctttggccgcatcgcccagatttggctggctactcagcgcggctgtcattttcttcttggcaccgcttacgccgccaaagttgaaaaagcgcttcttgtacgacggctgtatgccggtgtccagcaggcgtttgtagtgctccgaccgtatgaatctcgggtagcaatctttcttcagcaacagcatgtatatgtgctccgatgccgagtcaaaagtgaaccgcgatggattcttcaggcccttgagcacgctctccatggtcttgccatcaatattaatctcgcacggtgcgccgggcttcaaaaactccctagaaacaaaataaaaaaaaaaagattacacacacatataaaggtgatcaagtggggggttcatcatacgcactcgtatatttcgttgacctttcgcgccacttgcgagtgagcggaacggcgcaatcgattgactgctatccagaagcgaatattctcgtgcgagtactccttctccaggaagccggtaaactcctgcaggccagtgggatcggagacgagctcctcaatggagatggcccaccgcttgacgcgcttctctgtgggaatgtccacaaaggtgttgttcagctgccaaaaggcaatatcctccgtcacccatggattggagggcagtgccggctgcagaaagaaatcgtattcggagaatgtctccgagtagcaaacgagcgactcgcaggcctgcgacatcttcatccgcgtccgattcagcgacttgcccaagtagtcaacgtcgcgctgcatgtcatcgacagtcttttttttattgggcttgaggccctgacgatcgcgcgaaggcactggacagggctccaacggagtgaactggccaggtggtggacggtgaactctccagtaagctcgttcctgcgagtctcccacgatcttgtcacctttcttgcgctccttggccagacgcacctgctcttcggcctgcatcgatatgaagtcccacttgcccttcagattcttgtgcagcgaggccagcgcctccgcctcgtagtcctccagtgcgtggcgctgcttgttgcgcagcgatcgcttggccaaatagatggcgtactccacgttatccggcgccttgtgctgccagggccaatagtagggcgtttggaaacgatacagcgacgagtcgtccttcacggtcagcgtctttgagtcgttgaccggaaagaagtagccgtgcagacacagttgattagcaatgttgagggcctccgactcctcgatttgcaggcgatccattagccattcaattagatcgtatcctaaaagtggccaacatgcaatcagcaatcattatttaaatggttataaatccttataagctaaatgcaagttaaaacgaaattgtgacgattggatgatgtaacggaccacttacccataaacgcatatggtatggaagtcaggaacatcttctgctgtcgcacaggcacgccatgttcctgatcctgcatctcacgcaccagcatttccatctaaagaaatgccaaatatattgaagtaattcaattaggatatgccaggtcatccaggtcacccaccttatcgaaagccatgggtcgtgatagcttctcgatggcctgctgttggttgccactgccgccgctggagcctagtagtccaccgcctgacccactgacggatatggagccgtgatggtggctttgtgtcgctgaactcggcgcacctgccggatgcggttgctggagctggtgctgcggctgtggctgttgtgactgtgactgctgtggggcatgcggatgcgtatgctggtggtggtgctgcaggtggtggtgacccaccgagctgccgctgaaagcagtggctgcctgcgtggtggccgatatggccgtggcggtggaggctagggcgggactgctgccgctgttcgcgttcccgctgctgctgctcgtggctgtggcggcggtgctactggcattgttgttgccacccgccgacggcgacaactgttgcatggcttggagcacggcatgcggctgaagactcagactggttggcttgctgggcaccagcgataactgggcctgtgccgatgactgcgggttgggtgtggttgcacccggtcccgtggctggtgcggatacgaccacgggcacaagggccgccgactgattacggagcaccagctgccgatccctgtccggcggcacaccgccgggtggttccatgaccgctctgcccgctggcgcggcggcgatttggctgccgtcactggcccgtcggcctcgtccgcctcctcctcgtcctcctgttcgtcctggttcttagtgatccgctggtaacagttcggtttggttgatatatatcaaagttgcttcgttcggaagtgtgctttcatttacgcgttccggatgtatccgttcgcttcatgatctttagcgcgatttattatccgctgaatgaagtattcggtgaatgtgtcctacttctaattgtgtgcgtttgctctcggttttagttacccgaattccatcatgtccttgtgtatggaaatatttgctgaaaataggttcactaatagttcaataaaataacagaagagatatgtacatatgtatctcaggatgtcttcaatgtcatccataagagtgtcgaaaagtacgctacaatattttaacgaggggtatcatgatgattctattttcgttgcatacttttaaacacccacaatgtgcatcagggatggtaaacaattctgattaaatcccatcgaaggaaagcaccttacaatatatgtatgtacatacgcatcgctggaaaacttgtcgattgactaacgagcaaacttacaatgtttcatggttcggtcgggttggcttctccttttctttccgttaaaagtgacgcccccagtatcgcctatcgccggcgaagcccttgtggagtgccctcttctcggccagcttgctgtagcaaccaccgcaagatgctgaactggtgtttaaattgattgggactccttttacttattcgatccataaatagtccgctttcatggcctccaaatggcgggtattcagtgtcaggaccttaaaggcggtgtgtgcaggtgaaaacctacaaaagacgtacagaaaatacatcaatttatatgcagctactgtttgtacatacatacaagccaactaacttgatcatttcaagcattcattcaaatacgacgtcatt

SEQ ID NO: 15683 - DNA, 2169 bp, DROSOPHILA
atggaaccacccggcggtgtgccgccggacagggatcggcagctggtgctccgtaatcagtcggcggcccttgtgcccgtggtcgtatccgcaccagccacgggaccgggtgcaaccacacccaacccgcagtcatcggcacaggcccagttatcgctggtgcccagcaagccaaccagtctgagtcttcagccgcatgccgtgctccaagccatgcaacagttgtcgccgtcggcgggtggcaacaacaatgccagtagcaccgccgccacagccacgagcagcagcagcgggaacgcgaacagcggcagcagtcccgccctagcctccaccgccacggccatatcggccaccacgcaggcagccactgctttcagcggcagctcggtgggtcaccaccacctgcagcaccaccaccagcatacgcatccgcatgccccacagcagtcacagtcacaacagccacagccgcagcaccagctccagcaaccgcatccggcaggtgcgccgagttcagcgacacaaagccaccatcacggctccatatccgtcagtgggtcaggcggtggactactaggctccagcggcggcagtggcaaccaacagcaggccatcgagaagctatcacgacccatggctttcgataagatggaaatgctggtgcgtgagatgcaggatcaggaacatggcgtgcctgtgcgacagcagaagatgttcctgacttccataccatatgcgtttatgggatacgatctaattgaatggctaatggatcgcctgcaaatcgaggagtcggaggccctcaacattgctaatcaactgtgtctgcacggctacttctttccggtcaacgactcaaagacgctgaccgtgaaggacgactcgtcgctgtatcgtttccaaacgccctactattggccctggcagcacaaggcgccggataacgtggagtacgccatctatttggccaagcgatcgctgcgcaacaagcagcgccacgcactggaggactacgaggcggaggcgctggcctcgctgcacaagaatctgaagggcaagtgggacttcatatcgatgcaggccgaagagcaggtgcgtctggccaaggagcgcaagaaaggtgacaagatcgtgggagactcgcaggaacgagcttactggagagttcaccgtccaccacctggccagttcactccgttggagccctgtccagtgccttcgcgcgatcgtcagggcctcaagcccaataaaaaaaagactgtcgatgacatgcagcgcgacgttgactacttgggcaagtcgctgaatcggacgcggatgaagatgtcgcaggcctgcgagtcgctcgtttgctactcggagacattctccgaatacgatttctttctgcagccggcactgccctccaatccatgggtgacggaggatattgccttttggcagctgaacaacacctttgtggacattcccacagagaagcgcgtcaagcggtgggccatctccattgaggagctcgtctccgatcccactggcctgcaggagtttaccggcttcctggagaaggagtactcgcacgagaatattcgcttctggatagcagtcaatcgattgcgccgttccgctcactcgcaagtggcgcgaaaggtcaacgaaatatacgaggagtttttgaagcccggcgcaccgtgcgagattaatattgatggcaagaccatggagagcgtgctcaagggcctgaagaatccatcgcggttcacttttgactcggcatcggagcacatatacatgctgttgctgaagaaagattgctacccgagattcatacggtcggagcactacaaacgcctgctggacaccggcatacagccgtcgtacaagaagcgctttttcaactttggcggcgtaagcggtgccaagaagaaaatgacagccgcgctgagtagccagccaaatctgggcgatgcggccaaaggacccagcggcacatccgccggcagttccatgatgcaggctccaccccccggaaatcttgcccgtcgtcgtggcagcgatcgcagcctgacgggctccgcccacgagctagccgtgatcggtgtgaacaaggatgccggctccaaggtaccgcactctcattcccagagtaatctcagcgaaatccccttcaggtaa

SEQ ID NO: 15684 - protein, 722 aa, DROSOPHILA
MEPPGGVPPDRDRQLVLRNQSAALVPVVVSAPATGPGATTPNPQSSAQAQLSLVPSKPTSLSLQPHAVLQAMQQLSPSAGGNNNASSTAATATSSSSGNANSGSSPALASTATAISATTQAATAFSGSSVGHHHLQHHHQHTHPHAPQQSQSQQPQPQHQLQQPHPAGAPSSATQSHHHGSISVSGSGGGLLGSSGGSGNQQQAIEKLSRPMAFDKMEMLVREMQDQEHGVPVRQQKMFLTSIPYAFMGYDLIEWLMDRLQIEESEALNIANQLCLHGYFFPVNDSKTLTVKDDSSLYRFQTPYYWPWQHKAPDNVEYAIYLAKRSLRNKQRHALEDYEAEALASLHKNLKGKWDFISMQAEEQVRLAKERKKGDKIVGDSQERAYWRVHRPPPGQFTPLEPCPVPSRDRQGLKPNKKKTVDDMQRDVDYLGKSLNRTRMKMSQACESLVCYSETFSEYDFFLQPALPSNPWVTEDIAFWQLNNTFVDIPTEKRVKRWAISIEELVSDPTGLQEFTGFLEKEYSHENIRFWIAVNRLRRSAHSQVARKVNEIYEEFLKPGAPCEINIDGKTMESVLKGLKNPSRFTFDSASEHIYMLLLKKDCYPRFIRSEHYKRLLDTGIQPSYKKRFFNFGGVSGAKKKMTAALSSQPNLGDAAKGPSGTSAGSSMMQAPPPGNLARRRGSDRSLTGSAHELAVIGVNKDAGSKVPHSHSQSNLSEIPFR

SEQ ID NO: 15685 - DNA, 4740 bp, DROSOPHILA
ccgaaaaaggcaaccgtaggcaattatcttattccacagagaaaaattatacagttattggcatttataagattttaaggtatcaccaaaatttattaatctcttaagtatttgtttgaaaaaacaatttaacttaccgagccattagcattaatctatgggcatatatgcgctcatctctgccacaaatgaataccacatctgcactatcctgatcctcggaaaggcgctgcagatcctcgatcaactggggcagactcatgattgatttttattattaagtgcggtattcttgggctcaaaaaattgcaatcattcgtgcagaagtgcacgtgttgccttgtccctctgcaagcactgggttttgttattattttgcgattgggtttgtttatgttttcaacttggaaactctctttatttctctcttttaatcgctggattcgtgggagcgcagaaaccggttcctggctgaaaattcttggccgacaccaagccacaatcgatttggcaaacaatatggcctgggaaacaattgcaacaagattaaatggtataacttttctacaaatattattgtaatagtaatattgtgcactatttattttacacagctgcaaactaagcgttttttcaaacaatttcgacctttcctccgcgaaatctgattttctttgaccgctggtcgttcttctcgcgatcacgatttgctaaagactgaagaagagacttgggacaggttgctcttttggatctttctcagtgtttctcccaagcaggtaaacgggattagtttttgttttgcttttctccattccgctctctctcagtgttatcttttttgagagactttttatagcgaatgctatagaaattttcatttatgaatgaaactaattaaggacgagacgaatttttctttattgtattcgcaaaaattcactttgcgcaatagataaaatggtgtagagtttctcgactattagatacccgttacattctatatggttatacggtcaatgggattgctcttcttcaaaggatcaacgactcggccacggaaatatatgttgtcatcatcgcgaatcatgaagacaaagggactattgactgtaaaagtaaccacactagtcgcataatctgaaaaataccacaggcaatcaagcaggaacatgatacaaatgtgccataatttaccagataatcctcgaatggggctcgcagaagcggatcctgcggacccgccttcttcgtcaatctctataaaggctttgtgtacgacttggctgattctagtgccagactggttcagtaggacgctgatatccgacgaactattgaagagatcctgtattcccatctgcaaatttagaaacatgtagtatattaaataaggtgagcagaatctactaacgcttttaagagtttcgacgagctccatgcggaaatcgattttaaatttaggaagctgcacatgtacatccatttcagtgagaactatctgagggtaactttcgattgtggcttctgcctgagttagggacccattgtccttgggcagaacgattaccattgaaaggtttgagtatgcaaatggaagctcaataatttggtctatggtcgaagtacgcatcttaaatcgacccacttgcgacatcatattgacatttacttggtaacttttggatacatagaataccttgggcttggtgttcatcttatcgaatcgcgtcttccagtagcccttgaagaaagctgcgttgatcatgaccgcactttcatcgggcgtcaagtcactgggtattataatgtctttcacattatctagtgtctggtcgagcacccaatcgtttatagcccaggctgccttcaatcgatcggccagcttaatggcttctgcctcggccctaaagtgcttattgactagtttattgtagcgcttgttaacaccaattgtttcgttgacaaacaagcgattcgccaagtggagaatggctaccttcttgcccctttcgagtttagtcaaaagcttatcatatatagtagctacattctttttatcctctggcagattcagagccgtcctcagttcattggctgtatttccatccgctcccatgaggatcatgctcattccaatctcgacgcaaagaggcgaggcaatgatgttatattgtttattatcctgcaaaaagcttcggtaaagttgcttggtgaattgacctagcactgacgtggtcactaagatccaacctttggaaaaggaaaagagtcaaaggtgagcgattagaaaaaatggcgctactcacacaagtacttcatgctatactctctgcaagtaaggtcattggaaactaaaagtaaaagcctcatgatttaaggttttcgagagcactgatttgttatagaacattaaatccattatctacgctgttaaacaatattttcaagtaaaaaaacagtttctctacaaaaatggaattttcataccatttttaagatatgttcagtaagagaagcaatgggtttaattattttttaacttcgttgtttcaagtgactagaaaacaaaacattgccttaaagatgtaattcgttaggcagtcgaacgacgcgtccgcggaagtagacggtatgcttgtcgcgaatcaagaagacaaaaggacgattgactttaaaggacgtcgatgctcttgttttttctggcaaagaaaaaagatgaaatcagtggatgaggtgatctataaaaaaaattagtcataatgtactttggatagactctgcgtggtctgacgcttctcctgtcgatgctcccctttcgttgatctcaataaaggatttgtgtaccacatggttaattttggcacctgtaccgttggtcagaaggccgctgagatccgaggtattgctgaagataaggtgtatgcccaactgaaacttaaaacattgtaaaaatgatagcattttcaacaggtcctacccactttttttagggattcaactagttccgtctgatatttgattttaaactttggcagttccacatgaacattgttttctactaggctctctgagagtgttctaagtattttttcaatagagcttagatatgtgttatgcaatggcagaccgattatcattgacaggtctgagttatcaaacggcatctcaatgatttgtccataagagtgatcagcaatcctaaatctgcccacatgggacatcatcctgacataaacttttttattatgatctccatggaatacttttagcttggtgtcctttttactaaacctagttttccaagcgccgctatagtagacggtgttaactaacactgcactttcattaatttgcaggttatgatcattagaaatagtgcgcatgcccttgtgactcttccgatgaatcgaaaagctgatactgttgctagcctttctttgacttaacgggtctttgccctctgccatgaaggtgctcttcattaacgtgttgtaatcctgccttacttcatatgtctcattgacataaagccaatttgtaaaacgaagcccattatgtttttggaaattagacataatcctttcgtatttcttggccatttctgtcacatccactggtaggtcaagaacgcttcttagttcctcggcggttgttcctttagctcccattaagatcatgcttattccaatttcgatgcatagaggcgaagcaataaaattactttctgccttatccattacaagttcgagaagatttagcttgaatttacccaacactgaagtggcaattaaaagcagaactttgacaagagcattgaatcaattaggtttagagttagaagagtgctttcatttatatttgaactcacctaaatattttattttattatttccctgcatgattgctaaaaactgcaagaaatccgacagcctctatttatatacctgcaaaagtgaatttcgattcatcatagactcgtgaaaaatccattatgaatggatctaaaatgcattcagacgttaacttaaggaatatggcctaaatgatctttcttcattttactttgaaattcttcacaactgtggtgcgacacctagtgttcattcacagaacatggtaatttgacatgtgcccacttttctgtacatcatgtaaaattacattcgttgttgcattctagagttagttgaatttggtattcctactttgttgaagaattgaagagaaaattacagtttcttttcaaatttggttaacacataaaaaacatacaaaaatgttaatatatactctactacaaagaattaccccacaatacttactttcattttattacttccagcaacttttaagtagcaaagaaaatttcattgatatattttgcataatatttatcgcttttttatttgttgtttttgttttcattacataagtaataatttatttttgttttcctttgtgtttatttgtttctgcactacttaaatatgaaacgttgaattcaaatttgttttttcattaactgtttaatttgattaaactttatttgcttgtggtgcatttcattttatattttcgctcatgctcctttatctcccaaattctcactacattttctatttgctccacaatttgtacattttatttctgcattctgaatcgtcagacatataataatatatatgttgtagtttgacaagacgcggatttgttgctgcatgcttaaataattaaaat

SEQ ID NO: 15686 - DNA, 2013 bp, DROSOPHILA
atggataaggcagaaagtaattttattgcttcgcctctatgcatcgaaattggaataagcatgatcttaatgggagctaaaggaacaaccgccgaggaactaagaagcgttcttgacctaccagtggatgtgacagaaatggccaagaaatacgaaaggattatgtctaatttccaaaaacataatgggcttcgttttacaaattggctttatgtcaatgagacatatgaagtaaggcaggattacaacacgttaatgaagagcaccttcatggcagagggcaaagacccgttaagtcaaagaaaggctagcaacagtatcagcttttcgattcatcggaagagtcacaagggcatgcgcactatttctaatgatcataacctgcaaattaatgaaagtgcagtgttagttaacaccgtctactatagcggcgcttggaaaactaggtttagtaaaaaggacaccaagctaaaagtattccatggagatcataataaaaaagtttatgtcaggatgatgtcccatgtgggcagatttaggattgctgatcactcttatggacaaatcattgagatgccgtttgataactcagacctgtcaatgataatcggtctgccattgcataacacatatctaagctctattgaaaaaatacttagaacactctcagagagcctagtagaaaacaatgttcatgtggaactgccaaagtttaaaatcaaatatcagacggaactagttgaatccctaaaaaaagtgggttggatcttagtgaccacgtcagtgctaggtcaattcaccaagcaactttaccgaagctttttgcaggataataaacaatataacatcattgcctcgcctctttgcgtcgagattggaatgagcatgatcctcatgggagcggatggaaatacagccaatgaactgaggacggctctgaatctgccagaggataaaaagaatgtagctactatatatgataagcttttgactaaactcgaaaggggcaagaaggtagccattctccacttggcgaatcgcttgtttgtcaacgaaacaattggtgttaacaagcgctacaataaactagtcaataagcactttagggccgaggcagaagccattaagctggccgatcgattgaaggcagcctgggctataaacgattgggtgctcgaccagacactagataatgtgaaagacattataatacccagtgacttgacgcccgatgaaagtgcggtcatgatcaacgcagctttcttcaagggctactggaagacgcgattcgataagatgaacaccaagcccaaggtattctatgtatccaaaagttaccaagtaaatgtcaatatgatgtcgcaagtgggtcgatttaagatgcgtacttcgaccatagaccaaattattgagcttccatttgcatactcaaacctttcaatggtaatcgttctgcccaaggacaatgggtccctaactcaggcagaagccacaatcgaaagttaccctcagatagttctcactgaaatggatgtacatgtgcagcttcctaaatttaaaatcgatttccgcatggagctcgtcgaaactcttaaaagcgttagtagattctgctcaccttatttaatatactacatgtttctaaatttgcagatgggaatacaggatctcttcaatagttcgtcggatatcagcgtcctactgaaccagtctggcactagaatcagccaagtcgtacacaaagcctttatagagattgacgaagaaggcgggtccgcaggatccgcttctgcgagccccattcgaggattatctggtaaattatggcacatttgtatcatgttcctgcttgattgcctgtggtatttttcagattatgcgactagtgtggttacttttacagtcaatagtccctttgtcttcatgattcgcgatgatgacaacatatatttccgtggccgagtcgttgatcctttgaagaagagcaatcccattgaccgtataaccatatag

SEQ ID NO: 15687 - protein, 670 aa, DROSOPHILA
MDKAESNFIASPLCIEIGISMILMGAKGTTAEELRSVLDLPVDVTEMAKKYERIMSNFQKHNGLRFTNWLYVNETYEVRQDYNTLMKSTFMAEGKDPLSQRKASNSISFSIHRKSHKGMRTISNDHNLQINESAVLVNTVYYSGAWKTRFSKKDTKLKVFHGDHNKKVYVRMMSHVGRFRIADHSYGQIIEMPFDNSDLSMIIGLPLHNTYLSSIEKILRTLSESLVENNVHVELPKFKIKYQTELVESLKKVGWILVTTSVLGQFTKQLYRSFLQDNKQYNIIASPLCVEIGMSMILMGADGNTANELRTALNLPEDKKNVATIYDKLLTKLERGKKVAILHLANRLFVNETIGVNKRYNKLVNKHFRAEAEAIKLADRLKAAWAINDWVLDQTLDNVKDIIIPSDLTPDESAVMINAAFFKGYWKTRFDKMNTKPKVFYVSKSYQVNVNMMSQVGRFKMRTSTIDQIIELPFAYSNLSMVIVLPKDNGSLTQAEATIESYPQIVLTEMDVHVQLPKFKIDFRMELVETLKSVSRFCSPYLIYYMFLNLQMGIQDLFNSSSDISVLLNQSGTRISQVVHKAFIEIDEEGGSAGSASASPIRGLSGKLWHICIMFLLDCLWYFSDYATSVVTFTVNSPFVFMIRDDDNIYFRGRVVDPLKKSNPIDRITI

SEQ ID NO: 15688 - DNA, 12229 bp, DROSOPHILA
gagaaaaaacgcagaaaaaaaaacaagggggaccgcaatatagcacacggccacaacaacacagactaaggcaaaaacatgcaaatgcaaaaatccgtttgacgccataagctcccatgagtcagagcagagcggcagcattgttgcactgattgctcatggctgatggtgctgttgtttttgttgtaggtggcagatgaaggagaacctcttcccttcctacccttcctcaaccaccagctcttcctcctcctcctccttcacgatttctcttttgacttcttccttggctcgtgtctttctgttcgctttgttagttaaattgcagacttacagttgtttacaagcttcgcacagtaagaaaaagtgggtggctcaaggattgtatgcagttcaggagatcctattgccactacaatcgcctatgatcataaaaattacagcatttgatcaaagtaatggtaacaaaatgtaataagattatgaacaaacgattttcaacgcttccaatgtagcaaaagaaatgaaaaatgaacttatattaactttgaatttttttacaaatacaaaatataactaagtgttaaatttccattgataaatatttcgtcctatcatacaataattttaatcgtatatttagccacgttttacaacatacatctattttttcctaacaagccaataaattttatttccctattgcgtattagtcacctgagatttattgatttttaattaattaaattaaattaattattgaaaaattaatcattcgacatgtcggatgttagggtgttttaatgttgtggtctaaacatatatcatttgactataagtacatattttcttttagtggacttgtcactatttcaagtcgagctctccacaaagagagtaaatctgggcttccgcgcttgggtctctctgagactggcggcggcagcgacgtcgacgtcgccgttggagtctagagctgcgatcagttcattttgatcggtcgtcgcagcaggttcgcgagttcgagcagcggcgcaaagcgagacaaaagagcagcgttccaagtcttcggcccccagtcgctgaagccgagggcggcgcagaaaacttggctccttgtttttcaagaaaccccaaaaaaagggcgcgcgagtgagattccgctataaacggattccgctatcttgatcctaagcgaactagttttagattgcgcaatttcaatcgacaatatcgcaaaaagcaactgtttaagtgcccgccgccgagtgaaattggatagtaaaggcaaaacgcaaagccaaacgacgatcggcggctctgagaagccgttttaaaacacaaatacgaaaaaatatactgaaaaactgctataaacaacaaaaacaacagagcaacatggcgaccgccgcctgcgtccgctgcgcccaacaacaacaacagaagcaacaacaacatgcggcgcatgcgcagcagcagcagcgacgcaacagcccgcggattctgcacatttactgcgcgtgggcgttgatcactctgttggccgccagtgccgccatggtccaaagtgcagcggtattcggttagttgcgaaaaaaagaatggataaaaatatgcctgggaaatttaagtggtggggggacttaatcaggcgccactgcgctgcattgtgtgcaaacggtgtgaagaaaagaagaagaaatggtgaaagggtgggaggattaaagatgataggataggctttataatgagtggattggaggatggggaaaaaccgggtacttgaggcaacccaattgtttgtcgctttgataattaccggattcgacgaatcggtgcacagtatcgagtcacaagacatgaccaagaatggtacttccccacgctcacgagactttacgactttgatttcacttcttgctatacagtcgaacgtctaaagtcgtaactttccttaaattaacggtaatttcgagaaagtaaattggtattctataagaagtaaatggacataatcggatttcctagaaattatggattatagcatggactgggacattattaccttaattttattaaggtaatattagcaattgaattgatatattttattcttttctcaatttacagctagaaatggcgtattctctaaatctactgtagttacaagaatcgaacttgaaaaataaccactttttaaggtgttcaaaacctgaagtttggctatcgacacgatatgctaagagagcacataagtaaacggcttatgagtatgagttttggatgtcacactagccaaaaagctcacagccgctgactgtagtttgcgttctcgagtattgactgtagttaaccactgcctttctaatctctgccattatggccacttttttagtcacccatcccatatccgcggctatagaataaacgcgttgtgaaccactgtcatttgttgtgtgtgcttttaattttatcagcgattatttgtgctgtttctgtttgggaaaccggttgtcaattcccccactcactcgatcttaaccgcatttgaccgatctcgccgtgcacatggcttcgaaaatgatttggctttaattttagccgaaaggccaatttcgattgctagtcaccaaagcctactgataagcgtgaagtttcgtgaatcattttcggcacggattgcaataataaaaaaaaaagaaacgcgtctagaaggcgtacatatatcacgcggaagttttacggcatgaaattaaaagttaaaaaacaatgtaatgcaaataaaagaaaatacaatttatttttagtgaaacttgaaacagaaacagaaaactgaaaaaaaacacaatgcagagaacggaaaataagaaaacgcaacccaaccgccagacgacctcattgtcattgaaatacagttaaggctcgaacaaagaggcagattggcaaactacaagtctggatcgtcggcgttgcaacaaggggttaacttaaatgttaatggttgatgattctcacagagaacccagccagggccagtgttccattgacctcttcaactggaaagtttgcatcagtgcgaaactggatcagctgaaatgggatctaagatcaaacatataaacatacataatttagagcgagatagaaaccaaaaattaagcacagtaattccatatcgtagccaacttgaccataatcgaacgttcagtgtttacatacatattaatatccttcccttttatattatgtttaaatgcgacaaaagcctaaacatgttctcacttaccaattcatgagaatcatgggcgacattatttttgtgcagtgcccagacacgagtttctccccagaatctaaatcgaaatctaacaccgaatcttgatctggagtagtgtttactctattcgaactttttttggctagcacaacaagccgccgagcgttatttatccagtcataaacattcatatgtatatttagccatgtacatgtttgcaaactggtttccagttctgttttgccgttgctgttgtgaatatcaagtagaattaacatatgttgccagcagccatctgtggattgaatttgagaagttctcccaagtctgggcttatatggctgctgtggatagaagctgcctgctgcgcgactcgaaaaagtcatctgggttcaattaggtggcactgcgccacgaccacccacccacccattttacaattccaattcacactttttgccagagcggcagcgataaagcatctgccatcgcttaattaaaatgcaaattgttcataaaaaaaaaaacacaaaaaacagagtgataggaaaaatagctggcactcagctagagtagcaatggcaatttcgggcgtttgtgcattttttctttcaacattttcaatactgttttatctgccaagtactgaaaatggggctttgatttatgtatgtggccattagaagtcatgttcaactggcttccgcctcgacccgccgccattccgctgactgcttggccagttaagcagcaacagttgccgttaggtctgccaatgtgttgcacgcaacagcagcagcagcagaagcagcagcaacatgcagcagctgcagcaacaaatgaccagttccttggccatttgagttgccagagttcttgtttattgtacaatttatttattttgtcgttctttagctgtgcaaacagacaaattacaacgacaacaacgatagtggccaagagcagcggcagcagcagcaacagcaacatgatgacacattcgcttgacctattaggaaaattggccaacgggaaatgtagcgcgctgtccaaagtcggccgcactttggtggggatgagaagtgggggaggtggtgccgtgaaaagcgggagaagaaagctggagaacgggaaagcagcaaggccagatagagaggcacagaaacgaaaagagatagcgttagagacagcgacagagacagagataaaggagggacaagcacttaacccttgccattctgactttgatagttgaaccaatttcagctgtttcacaaaaaaaaaaagaaaatagaggaaacggaatgatgagcgacaatagcagaaaatctaatgctctatataagaaggaaatggtccgtcgataaaatgttaatattatttaatgagaagaggaaaagtgcggtgtggagaaaaatttaaacactttgctattagttagatacataaatacatttcatgtatattttagtcataattaattgataaatgaaatattgttcattaactactcgcactcttttgaagacaaggactgtgcatgacttgggaaaccttaaaggaactatagaatatataaatcattccgcttgccttgcagataacttatcgattccgtaattcgattgtgaaacttaacaagttcgatgaagggcttgtgggtttatggcagccccctgtggagaagagtgtaacaaactgcacttgcagactgtttttgtttgtttctgtttgtgcctcgagtggcgctcactccgcatgtgtatatgtatgtgtgcctgccgtttgtgtgcgcgagtgttgtgtaatttttaacaacaactttttttcgagtgtctctccatcgtgcgcttttactgttccgctcggcccctttcttccccgcctccttccgcaggcagccgggcgtaattatgacgagtgagctgagcccagaacccaacatccatccatccatccagcatgcaacacgcgtccgcatcgcgtggcagccacagaatttattatgcccagtcgccactcgagaaacagaactcatacctcaaaaaaagatgaaaaaaataacatgaaacccgctaaccgcttgacaatctctgcacgagcagttgcagtttgctcttggccaagttccgtttttgtctaaatctgaatctgaatctgagtccaaacaacggcaacaacaactcgaaactggcccactcgacataggggactgtatgtagcactataacttgtggatcggcattgacaacgcattttaatgtgcccttttcaaattcaagtggctgctgctgcttgacctacacacagatacaaacgcacactaagagctaaagataaacatcgcgagatattggcagatatatagaagtacactgaaagagcgacactacttattacaatgacttctgaaatagtagttgtagaatattaataaaaaatatatcttttaagaagtttagcattttcctgacacatttcattttctttttccgaaagaagtgggttggaagcttacaattttcctcagtgctcaacagttgactgctaagtgttttccatgtttgtctgtgagtttgctggctggtttgttagctgtttgtcttgatgtttatctgtgtaatcgagtcacttaacctgaccttgcccaaaacgaaaatgttggaaccatttgggcagtaggtacaagcttaacggactgttttggatagccgccttacttacctgaactcgactttccctgggaaagcgaattgctttcccaaaaaatcagtaaaactcggttctgctctgaaaacgtagacaaattattaacggcatatttggtgaaaaaattgggtggaactgccggccctttctttctttgcccgcttggctggttgcccagatcgtaaacccatttctctatgagctccccgcattaaccccaaataaaccgaacataacttgtggactcatatgtttatttggctgggagtgcttgtgcgcttttaacccaattagcaatgacgctgtggctttagatcattcggttggccatcaagggggccttaatcattacttaactgtatggaattcattgtattacagtgctaatggcttttcattctgtaacaattgcgcctaattgaagatattgtgtgtgaaagctgaataagtattacttgttcgactttccctaaaacaatatctgaatcgattactcaaatcaatcataattgaaacataaagctgacgaaagcctgtcattagcccagttctaatgggtgcatttgccaaaatgatgattgaaagtctagcacgtgtggacagctcggaccgcttggctattaatgtcaagttcgaaatggaaattagccgctaaattgcactcgcacagactcacacgagcaatcgtactcagacttgggtgcatggagcaaatgcaaattgtttaataaaatgtttaatagttcgcaaaagctgtgtggcaattgcccagtggaaaaaagagcgagggcggctgcaaaaacacaaacaatatatcggttgctgcaacagctcgggtaataatataataataatgatgggtatatacacacgcgtatgtggtgcagtcagtgacccagaatatggatgtgtatggctacctctcagcacaatgcaaaagtagttttcctacacgccagtggttccacaaccatacgcttgtgtatttgtattttattaattgaagtacttaatagtgcttgtgtgaatctttaacctttgcgccgcaaagttcgagatcgagtgcaaaataattgaacataggcgctctcgcgctgtgtttttaggtaaacgtagtcattcaattattaattgaattttcaaactgtgtttggtttggtttcatcacccgaaattgaaggcccatccatttccctgccaattcacacaaaatttctatttttagagttgtcacaccgtaggtttgggtttctttttgttttatttatgtgagttatttattgattgacagctcgcgaatctcctctgcatgcaatgcgcttagttgggatgatggattccgcatacaaacgaccgcaaagcgctgaccatccatcagacaggcccatttgatgtagaaattaacagtcccatgtcaatttgagcccaaggcatctgctccataaactgatccgatacgaaactctcccttttcaggcgatctgctgtcccatcccactttcaagccactatgcagcgctcagcacgagcatttcatcgagagcgatggcaaagaatctagtctcatcatcgaactgaagccgggactctatggggcggagcacgcctcctgttcccgcatcctgagtgccccgcccaactatggattcatagtgcgcctcatcctgccaaagctgccgcacggtcagccgttggatgcggccaccaccagaagtccccccacgaacatcatggctgccgcagccggaggcaacaactcgtccaaactccggcgcactggcaagtccggcgaaatgacaactgactcctcggagccactcaacacgacgagggccatcgtctcatcggcgcctacgcggttgttgggacgcacctgccctctgaacatagtaagtgaactcaccttagtggccatttgtggcctcagattaagcacacttgaaaaaaattgtagatggtccggcttatatcttagaatgtttcggtattgtaatgtagattataattgtaattctttcttaaatttattttcccaagtgtactctttttcactgattagtgtgagctcgccattttctgcaccttccgcacgaattatttgccagtttctttgatcgcattcatctgctttaaaaatataccacttgagtggtatgagaatgtaagaaatgacttgataactattatgacttcatcggtaattactttatgtcacttctatatttgctcaaatttattccacaaaacatagaatagaatatcacgatttttttttttttaaattgctgccaattcccattgtcaaatagattaagtttggcaggctgcattacaagtggttctcataagcggacttatcgagcgtatacgtttaagttctcgattgacattgttacttttttgtggctttccgatgagacagtttgacatctcaaattgtctccaattaccggcaggtctcatgcgaagccaagcgtaattcgtcagctgatcgttgacattgtcaaggtgttctgtgctcgattaaataagaaactttccattaaggcgttgttcattgacattgaactccagctggctgggaatgtttcactttctgcggcgccaaaactccacgccgaaaccagaaaagttttggtatttgcataagcgcgccaatttctaccatattgctgggccttttttgtagctctatttttggttgtttggtcttttaggtatttgaaacacgtttgcagcttttggccagggaagcagcagcaacagcaacagcaatagcagcaacagcaatagcaaccgcagtcccagagcaacactttcggttaactgatgcgtcgcgtcgccataaatccgtcgacttggactgactgaatgacggactgagtgactgacagttggcgtcgccataaaagcaaactatgctactgaaaaccaatggatatgggttggggactcgagggagtggacgcatgtccacatttgcatgtccagaatagagcgtttctttgttccgtcatcgtagaataggtgagatgtgcaaatggttggggcgcataattaccgcagaatcgtcttcctaatgagccgactggaaaatctagtaatctagtatttatcacttggaaaactggtttaaccgttctcaatgcggacactcctctggctaattgttgtttactacgagtgtacttacaatgggcactaccaaccagcaaaagtcgtcgcagttattgaacctgagagtacaaagcggactgaacccgtatccatttactatactatctgtatatttatacatatatatgtatatatgcacatgtagatggcatatcaacgctctgcacgtgaaatggcgccgatattaatggatttatttttataaaccccacgattctcatacgaagcgtagttatcgtttctggcgtggctttcacagctttttgtttttcgtattttttcagcgtaaatatttaattttgcattatatatgtttgcattcgcagttttgatcgttgatttttgatcgttctgttgaacttggccattcaagtcacgtcaacgagtcgtgggcgtggtcagggggggtagaatttaagcgattagcatttcgatcgtgtaaactgtttgctcgcacgtttcgcggcaaatattcaatacgcacttaggccacgcttttagccagccccccataattaaaaggttctatttgccttcaccccaacagtttagctcgctcgatccgcacacggcacagtggcgagtggatccctgccagctggaggacactgcctccgagatggaggatccggtgcggctctttcatggccgcgtcaagatcgtctgggaacatggccagcacgccctccgatccaaactgatggtcacggtgctgggcaagggcgagcagtgcaaggatggcagcaagcaccagtgcttgaagatcgggtgagtcggattacacatgtctattcctaactagccttaaatagaaaaatacaaaaatagattgaagagcattgctaaaacaagtttgtactaaagctaatttaataagatttgcattccggctattattgtctttcagtgatgagcccattctgtgcatctccaaggagctgtcttgcgacgggatccgccattgtccgtacagcaacgagtacgacagcgatgaggactacgagctgtgctcgaagcagcgtcgcccgggagccggtaagctggccgccggcctggagtcggatctattcgagcagtttgccctggaagtgtttcgcaatctgttcgccaacgatgctccaacggcaccggaggatctgcctcgcaacgggagcgatggaggcgaaggtttgggcaattcaacggccacctcgacgaccacgctgcgcaaagtgcaaaccaaagatatgaagaaagccggtggcgatgggtcaccgatctcaattgaccccaaactgctcacggaaggggatcagcagaggccggataacgatacgactgaaatgggagtgggcactggagctggcagcggcttcacccgcaggaactcaacgcgctccggtctgcactcggacctatcgaagtacggcccgtggggctacctgatgctcggcatgctcctgtgcggtggggcactgctcatctgcggcctttggggtacgttaaattgcaccatagtctagtcaaagtaagacactgtcattttgcgatgtatttatgcgagtttccccattgttctcttccccgcacatcaaaaaccgaatctacgactcacgtgctgtgctatgactgtgtctaactcttccgcaatccaaatccaactaattccaaaatgaacccaatccccagttctgtgttgtcgcttgagctctcacattgaatccatccgttcccttgcagcctccgcatcgcagcatgcggtcaacaacgagcgggaggcggcgctggccgctgccaatggaggaggaaatggtggcggggaccacctgggagccacctcgccgcccaactatgaagagctggatccgccgccggcctactcggtgctctttcccaaccaaaaggccgccagtagcaccacactgaacctggatgccacggcggccagcacaacagcagctgctgcagcagcggcggccgcagcagcaacagccgcagcagccactgcagcagcaactgcgctggcaggagcaacacccagcgattccgcgcagcaacatcagcaacaggaacagccaacgaactagcccgtaagcctgacaagaaggtgtcgcacctggaaaacgtagatcttaaggtcccaacatctctctgactgactctgatgcaattagcttttaaccaatttagtgatagttttaagtgtgactttatgttaaatgtttgactatgtatgtgaatgctaacgatttacgagataccatccccagccgtcctgtcaacgccgctgacgcctttgccagacggcagaaccaattagctaccgatgattgaaaatgtaataacaatgatgattgtaaagaaaaaactgcagttgcagcagcattaactgacgaatcgactaacttttgtaattctgttaatttaaaatttaatgtgatataaatttaaaactgaataaaaagcaatgtgtgtaagtatcggctgtgaagcgtgtatttggtgaaatatggggatactacagcggaatcctttataaatatagtaaaatatagaaaaaattgcatttatatattattattcctcaaaatgaaatttagtatttctatcaagaaaacttcgattgagctgcatggttttaattgaatatcttaaaagttgaaataaatctcgtgttaatcctctatttttcttcagtgcacttcggttgtgctgtaaagtttgctgcctactttcggggcggagtgaataaataaaccaacccataccaaaacacacagaacacagttgttgttttttcacatcgaattgaacatctttttatttgcaattcaggtaaattaatggggacgcgtcggagaagcgggggctgggatgaggggattgtgttgtttttcacattcaaattgcaggtagtagtgctaaatgagtggagttctgtttgcctctgttattttaactgatatattacgttgcactgatattatattgttccattttctagttactgttgtttacatgcatgtatgtatgttattcgctagctacctgcaggtgcgccaggtgtatcgtcatgctggtcaccta

SEQ ID NO: 15689 - DNA, 2132 bp, DROSOPHILA
tcgtcgcagcaggttcgcgagttcgagcagcggcgcaaagcgagacaaaagagcagcgttccaagtcttcggcccccagtcgctgaagccgagggcggcgcagaaaacttggctccttgtttttcaagaaaccccaaaaaaagggcgcgcgagtgagattccgctataaacggattccgctatcttgatcctaagcgaactagttttagattgcgcaatttcaatcgacaatatcgcaaaaagcaactgtttaagtgcccgccgccgagtgaaattggatagtaaaggcaaaacgcaaagccaaacgacgatcggcggctctgagaagccgttttaaaacacaaatacgaaaaaatatactgaaaaactgctataaacaacaaaaacaacagagcaacatggcgaccgccgcctgcgtccgctgcgcccaacaacaacaacagaagcaacaacaacatgcggcgcatgcgcagcagcagcagcgacgcaacagcccgcggattctgcacatttactgcgcgtgggcgttgatcactctgttggccgccagtgccgccatggtccaaagtgcagcggtattcggcgatctgctgtcccatcccactttcaagccactatgcagcgctcagcacgagcatttcatcgagagcgatggcaaagaatctagtctcatcatcgaactgaagccgggactctatggggcggagcacgcctcctgttcccgcatcctgagtgccccgcccaactatggattcatagtgcgcctcatcctgccaaagctgccgcacggtcagccgttggatgcggccaccaccagaagtccccccacgaacatcatggctgccgcagccggaggcaacaactcgtccaaactccggcgcactggcaagtccggcgaaatgacaactgactcctcggagccactcaacacgacgagggccatcgtctcatcggcgcctacgcggttgttgggacgcacctgccctctgaacatatttagctcgctcgatccgcacacggcacagtggcgagtggatccctgccagctggaggacactgcctccgagatggaggatccggtgcggctctttcatggccgcgtcaagatcgtctgggaacatggccagcacgccctccgatccaaactgatggtcacggtgctgggcaagggcgagcagtgcaaggatggcagcaagcaccagtgcttgaagatcggtgatgagcccattctgtgcatctccaaggagctgtcttgcgacgggatccgccattgtccgtacagcaacgagtacgacagcgatgaggactacgagctgtgctcgaagcagcgtcgcccgggagccggtaagctggccgccggcctggagtcggatctattcgagcagtttgccctggaagtgtttcgcaatctgttcgccaacgatgctccaacggcaccggaggatctgcctcgcaacgggagcgatggaggcgaaggtttgggcaattcaacggccacctcgacgaccacgctgcgcaaagtgcaaaccaaagatatgaagaaagccggtggcgatgggtcaccgatctcaattgaccccaaactgctcacggaaggggatcagcagaggccggataacgatacgactgaaatgggagtgggcactggagctggcagcggcttcacccgcaggaactcaacgcgctccggtctgcactcggacctatcgaagtacggcccgtggggctacctgatgctcggcatgctcctgtgcggtggggcactgctcatctgcggcctttgggcctccgcatcgcagcatgcggtcaacaacgagcgggaggcggcgctggccgctgccaatggaggaggaaatggtggcggggaccacctgggagccacctcgccgcccaactatgaagagctggatccgccgccggcctactcggtgctctttcccaaccaaaaggccgccagtagcaccacactgaacctggatgccacggcggccagcacaacagcagctgctgcagcagcggcggccgcagcagcaacagccgcagcagccactgcagcagcaactgcgctggcaggagcaacacccagcgattccgcgcagcaacatcagcaacaggaacagccaacgaactag

SEQ ID NO: 15690 - protein, 577 aa, DROSOPHILA
MATAACVRCAQQQQQKQQQHAAHAQQQQRRNSPRILHIYCAWALITLLAASAAMVQSAAVFGDLLSHPTFKPLCSAQHEHFIESDGKESSLIIELKPGLYGAEHASCSRILSAPPNYGFIVRLILPKLPHGQPLDAATTRSPPTNIMAAAAGGNNSSKLRRTGKSGEMTTDSSEPLNTTRAIVSSAPTRLLGRTCPLNIFSSLDPHTAQWRVDPCQLEDTASEMEDPVRLFHGRVKIVWEHGQHALRSKLMVTVLGKGEQCKDGSKHQCLKIGDEPILCISKELSCDGIRHCPYSNEYDSDEDYELCSKQRRPGAGKLAAGLESDLFEQFALEVFRNLFANDAPTAPEDLPRNGSDGGEGLGNSTATSTTTLRKVQTKDMKKAGGDGSPISIDPKLLTEGDQQRPDNDTTEMGVGTGAGSGFTRRNSTRSGLHSDLSKYGPWGYLMLGMLLCGGALLICGLWASASQHAVNNEREAALAAANGGGNGGGDHLGATSPPNYEELDPPPAYSVLFPNQKAASSTTLNLDATAASTTAAAAAAAAAAATAAAATAAATALAGATPSDSAQQHQQQEQPTN

SEQ ID NO: 15691 - DNA, 91507 bp, DROSOPHILA
agttagttttgggtttatgtatatggaggattttatttgtttttatttcaatgtattttttctctgtagttgaaatgacttaatattattttaggttttgctaccaatttgatttggtttaatattgttgtatctgtgtgtttctttgtatacgtgctaaaactaataatatatacaatgtaaaatacttttccattttttcatcattaatatatatcatttgttttcttttgaagtattcattttaattatatcaattgcgctaagttcatctaaaggtaatttttcgttttcttatttttttttttactttttcttttactcttttgcttgattcgcttttatgaagttttagcataggttttctgctttagaatattttttaggagtactttcttcctggaatttggccaggttttgccgattgtggtttactttaattgaatcatacacaatgtgacaaattgcgaaacgcccgtgggttgcagttaaaaatttcgtaatgctttatatgttaatatatatatatgtatatatatgtttcgtgtttttaatgtatgtatatacttgttatgatggaacgaaaacagtctttgggtattcctttatataagttttaattctgtttaatcgtaatccttaaaaagtaatgcgaaataaaaattgtttaacttaacgtatccataaattaaaggcgttgagaattgttctggcttaaccactaaatgactctcacatgcgtcacaaacttataaacataaaatgcctaaaataataattacaacttaaaataatatgcacaataaatcggtttgagaattaaagttataaattcataagcgctcctaaactaaactttggtatgctctctcctacatcatacaaatctctatcctcaatttttagttttatttcgttcataacttgccccgcaaaaaatgctggaaaaagtgcgaccgtaaccgttttcggtttaccggttgccctaacaactaaatctcattatcgtaattgtttaaatttaaatgctgatgaaatatttttacaaatgtcattttacgtgtcataatatgtgtttgatttcacttccacttcccttcccctattttagttttctagttcttagtttccatttacgtagagagttctgccaacttcagcattgagatgcttctttggttgcgctttctttgtgtgtgtgtgagtttccctcgggagtggggcttcatttcgttttaaatgcaactttgtatctactaacagtttttagtttgttcatctaggtatccgcatcggatttggattcggtctctcccttctccccactctattcctcatcactgctcgctccaccagcttacaattctagttcggtattgtggggattgggcgcctcgggtccatacatgttggccagcttgtcgaagcgcggcccccaggctccgaggtagtcatactcctgctgctcgtcatcagttcctgcaaaaattacgaatattcacacacacaaaaatccatgtttagtctaagcattctagcaaatgttgcagattattgttttttaacattcttaacatttctctaagaccatggcaagtattattgtttaggactttggatattaaaaaaaaaaaaatttaactcaattaagtattcttttccacagtgtagtcaaaatcgaagagtgaacagccatttttggtttcatatttctcctagatctacacccaatattcagctgtatctgagaaacgctggcctggaaatgtcaaaaagttgatgagtaaacaacgaaccgagcgctctagctttcagctgctcgtttgagtgcttttctacttattagtagcctactttttggggcttctcaggcttttcggttctagtttcgtgactaaacggctgcataatgggtgcaaaaactagtcttaaagtaaaatatttttgcaggcctacctgaagccaacgagctgagcgatccagctgtgctgccgccgccctcgtacgcgtagttcctcaagtcgtcgaaaggtggcgcatttggatcaccatcggcgcgctttttatgctcctcgatgaacatgcccacattgggctcctgacctggcattaaggtcatgacgggatctgaaaaaaggaggcgttaaaaataaaaccattattcaacttaatattcgaaatttttaaatgctcttaaaaattttttaattgtaatttaaagtgtggaggggaaaccattcacgtaaacttacacataattggcattttcatgggcgccagctcaggtggcattggccctccaattggtatctgcagaggtgtgatatcaaaggccgtcatatcatcctcgccgcctccctcgtcgtcatagttgatgatattctcgcgcacatcgtcatcgggacccggatatttgatatgcgcttcacggcgacgattgtatacgacgaacaccaagacgagtactgcgaatagttaaaattcaacaatattaaaatgcaatttcccctcaaatagtgccctccttctgtatgcaacaacaactccttcggtttacaaggtgcatcatacaacgcttaatttaacatgcagaacaatttcagttatacttctcttcgacggcggaaaagcgggtccaagcattttcgtgcgctatcagctggcagaaaaattcttaattaaattgtataaccagagcggaatagagcagaaacacggaaaaaaagaatagggaaaacgaaacgaaaagaaacctaaaacaatattgccaacattgtcccagttttctggtcaacagcaaatcaagctgcagacgacttgaatccgctgtcttctatagtatttctaatttggccagcgcgcttttcagcatattgcgaaacgcagacagcatctgttgcacgggaaaaccctgggaaaacaaaaagtttttgggcatttcgagtcgtagaaactgccgccacaacttgaagttgacgttaagtaatttgctgcggcttcttcgttcctagaaagttggattttttctgtttttcttgcctttcgccagctggccagcatgtaattgcaattattgcgttagtcaaatacgcattcgcaatgccgaaatattattcttttccaacaatgtttaatttatacttggattcttttgcagtcacgccccaatcgatatgcaaaaatatttcgctgaccatccaataaactttaattgaaagaaggacttttgttgtgttatttaatttacggaaatgacttttgacatgtttgcttgctgggatccgtcgtttccggtcattgcagattgctgattgtaagacttaattaattttatggcttacgcgcaatgccatcaatatttaaaggacagatacacgtctgatcaaacttttaattggcacaagaaaaccaaagaaatcgaatgagctaaagtgcaatattaatgtaaatactgccttggatacgtgttatataataaataaaatattaggtaattatttcatgcaattgatatattgaatagttattcggtagtttaagttttaccactctcttgagctattcaagccttaaaagttcgatttaattcagcaattcgttggttccacacctcttttttagttcctcagtatgtacttacgtatcagagtgcccaggcagagcgccagggcgacaataaaatcacgggatggcgtcaatacaccggaggccaataactccagttcgcaatgcatgccggtgaagcccatggggcaatggcactcgtacttctttggaggatgatgatcgcgacagcgacccccgttgcggcaggggaacagtaggcactcgttgtcgttgacacaggtgctgcccgagcttttgtagcccgccggacagctgcaggacgagccccgaaaaagttacgtatacgagtggttggttggtcggttgttttggtggatgtggggtgtacaggatgtgtgggtgtgtcgagtgtgttgaaaaaataaaagaaattatttaaaatttgtttccatcatgctggagtgtgatgtgtgggtgtgtcttggataaagttcctccatattgtcacactgagaaaaataaacgtcctagaatcaggaattaaagctaaaataattttcaaagctcccaataattactgctactcttacatttccaactttttgatgcaagtaatacaaaaattttaggggtttttcatacaatctatggaacattattcctgattttagatgttaatattttctcagtgcttacttgttttcttgttcgtttcaatagttttgagaaaagtgtgaaaaactgtcaaaaagtctttttaaacgttcgttgcaactttaccatttttcctattttttcgtagtagctattattttacgctttgtgagtttttagttcagtttttggtcgtgttacaaactttttgcatttgcatttcgcatggcccttcatcgagttccccatcctaacacgcattttaagtgctgttttttacaatttttgtttccctttatgattattatgtaacagattttgtttccctggttggaattgaataaagttttactctagctgcattcttggcataagttgaatttcattttattttgtctcacattttgttgttgttttttttttttatctcagtccttaagtttgttttgattagttttgggaaacgcactcacactcgatcttccagaagcagagggataaaaactttgcagtgtcacttgtttttgtgaattgaggtgtgaaattgccaagggagatttctaggactcaaggctgcagtaattgagatgcatgggaaattttctatgttttgtttcgcaaaaattctaaatctctgaccctaaaaaatgggtcttgtacaatttcagctaaataaagatcaccgtaatttaactaaattcttagttttgctacttgtttaaaactcccatctatcaatctgcaatggacattttacttcgatcagaatagaaaggaatcgaaaatttgtttacacttcggtttcttttcttcacagctcctataaaattcatggctattgggcgacttttttgcaagcaccattgaatacttttcaaatacagactgtagtcacttttgatatattgattattggcaaacgccattgcttaaccattgaatgctgcacagcgggacagcagaaaaaaaggagcaaacaagttaaaaggcgaggatagagtaaatacctcaaaagcagcaagaaactttcacactaaatcaacgccagttgaaaagttaagtcagggatagttttttccaactcttggctgctcctcgtagccttcgattgctcccaagtgcacagtttaagcccatcagtagtgagtaaggtacttgataatttctacgaaattttcgtctatgaagtttgccatattttacgtcatttagtttcagctgatgttggaacgggcacgaaataatttccgcggttgcttgcttttgaaacgttaagcaaagttggcatataaatggagctgagctataagcctgaaactggcatttttctggctgtttacacacgtagccggcatttaacgtaagaagtcgagaagtagggggcgaaataaagcaaatgcaaacgtagtaaatcctcgcgaggcattgccgaaatggaactggcagcttcttagtgccactttccaacctgctcctttgagctgtctgatcatcctgtcctcccaagtctgtatttatctgttttttttttttttttgtatatagactcgtataaggtgggcggatttcgagcatcgtgatttctcgaaatgccaaagctaacaactgcaattgctcttgctcggttttgggtggcttgcccttgtctcctcatggacaacttgtatctctgactgcacatttgttaacttacctgaagggcatttcaggtcttgttcattctcttggctgagtgcattttgaaaagtgtgtggggcgaatagttggcagagtgtagcgcaaaaactaaatggacagtgtactttatagagacggcgtccaaatgaaatactcgtgcttggcaagaagtaagtcacaaattcattaaatattcggtacatacataccttcatttagttacataaaatatttacacacacaaacagagggaataatactaggcatattgagtggaaggctgaacggaaaacgtgccaaaaacaaatattcagaatggtatggaaatgaaatcatagtttgatgaatatggaaatgcctttttgaatgggttaaatgtgagcggatatattgaaagccatgtgccaaatatataaattttcattaaaggtaaattcggtgatccgtgattttgatgccgaatgattggatttataaatgatagagcatgagatgatcaaataaaaccaaagtgcataggggcctttgaaatgtcgaattgatggtaaaatgaaatggaatttgcatgaaattgactgcgactagctaattaactttgaaaaacgtaacaacatagacactaaaacgctaagcattcgctaaagcactaattgcttgattataactaaaagttgttgtcgcatatttcgagtatatatttcgattttgtggaggaaatttttttttctatggttcgatgctcactcagtatgatcaaaaggcagaccaaaatcgccgccagggcgcccatgctgagttttaaggtctgaccctcctgcaccagttcgcaattctcgccccaaaatccatctggacatatgcaacgatatcggagtcggggctcgagattgatgcatgtggcaccgttcatgcagggcatatcgaggcattcgttgcgatccatacagcccttggaatcgggtgacataatgcgtccttcgccgcaactagttcgattcgagttttaattaccattattttaaaattatttattcgaaattgagttattcggataaatgggaaaagaaattgggcaaccgaaaattcaagtatcgaatggatgttccaattgagtgatggataattaacacatttgagacaggtccacgttatgtcagataattatgcgcaatgtttacctaataatatttatttatgttttttttttttgcaccgcaaatgcttatgaaatatcaaaaacgacagattcgatccttaatgtgtaatagagctctccggaaagagaacaaacttcctacagtatactgttgaccacttaaaaaagtaattttaaaatccctagtgacttctctgacttctcccaacgggcgtgtttttccctatttaacactgattgatttgccctgaccaaaagcttgaagccaacaagtatgaagtgtgttgtgtgtgtgtttaagaaagataagcaaagtagttgtacctgtgctaagcatgttgctgttgctctgtgtgtgtaggaaaacaaaagcgtgaatatgtacatacaaggaccattgcaagccggacaaatgctctttgctcccggatctggattctcgaaccgactttaactcgaagtcaaagcgaaatcggaaacgtaagcctaagccgattgatttgtcacgcaacgtttagtgccaatcactaactgacttttgtgccatgtgtgtggtgttcaacgggtgtggtggtgttcaactgaatctccggcacgaggtcctttgacgagcagtttcagcaagcttttttccggactctgctcctcctaccgtgtattctcctattttttgtgcaccccctttaattgattaagcctatcaaatgtaagccctgcgcttgcttatcaaaagctggcgatttgttttcctttttgcaacttttttgtggtattggttttggggtttttcttatcgccattttggcttacgggaaatttgaggttctacccttttttgttggtttgtaaatgttatgtgaaagtacagtccgaacggtcaatttatttaaatggtatgaatttttctttttttgattgatgagaaacgaaaagcagtgggtggatttcataagatgaaatggtaagctgataagaaacttacgtgcactcgtagacattccacaggtctacgcactcgaacggatcggggcaaatcacgttggagcatggtttattcgaaggacaacccttctccagattcctggccatggtagcctgtccccactgagtaccattcatcgccggtggcaatggcaggtgtttgccttcgagactgtaaatagataatagtaaggtggaagaagcaattaattaggaatcaatttacttttctgattaataaggacactcaccgtatatcatcgagacagctcttttggtaatcggcgtacacttcaaaggttctcactccggtgtattcagctttgccgcccgcatagacaccctcttgcttgtccaccaacagccactgatgtcccacgaactcaaaggtctcgttataacgacgaccctctccaccatccaattccagggtagcagctgagccatatcgatttaccttcaccacatgccattggccatcgtttactactatggcatttagccagagatccttttcttcagtgcgcagagagttcagattgtaacggaagtgcagatgaccatccttgatctcaaggattccgtattcccgattgtgctgatcgctaactcggaaaagttcgccgtactcctctcttgtccggaatcttagctggacttgcgtgctgaatcgatcgggctcgaaactcagagcatatttaacataactctgggccttgaaggtagtgggtattgtagggatattacaggccggacctgtccatcctggtcgacaatggcaacgagcttcggacaaggatccaacacaatttccgtgctcccagcagcgagctgtggtttcagtttgagcacaaacttcctcggtttgaggacaacccgcgacgctatttctcgacaatccaggatgggccagatcatagagttttgagttatgcaccaaatttctgatgcagccatcaaatcccttggccgtgggcatatagtgccagaagtacagactctgatcgaactgttcccgatataggccacccacttgcagaggagcattaacgttgaggtactcattaaatggcggaatttgtcctctcgcctggcaggacatgtcatcgaattccggcggagtgccatcctccatttcggcaatctctgctgatttgcaaaagtcgacaaccatacgaatgctttcggtatcccaaaacagatcgattctatgccattcaccgtcgtccaaagtcttcttcgtcttcaccctcagctccaaagttcccgaaccaaagtcgataagcagtctaggataacctcgctccaattccagggcaatgaaatctgagatgagcgtctcatctcgttctggaggaacaattggaccgttgtagatgattaagccgtcgggttttcgggtaataaactccagacttaaatgcgattcatcgcacatttccaagggaggataccaggcccaaccgtttccacggaaactgcgagtggtttgctgacacctgggtcccgtgtatcccacaggacacgagcagtgaggaccaaatctggtgtccacacagcgaccaccattatgacagggtgtggttcgacaggattctggtttggtgaaattgcgagcaccacaagtacagtcagcaatggtatccacacgaacaccgaccaaggcagttttgttggcgttaaccatatagggcagaggactgatttccagcgagtttgtgcaactgccctcgcacatttggttctcatacagacactcatcgatgcccaccatggtgatattaatgcccacatccttttcgatctcctcgcggtgcatcagtacaattccatttagcctaactggtttatagtaaggagatccatgtgcggaaaacctaacgtccgttagaggcggatgtttcctcttcaattgcacactgaatatatccacattttccctttcagtgtttagcaagtcagccagcttatccctaaaacgatccatcttcgagcggctcatgctttgggttctgtagttccagactcgaataaagtcctcatccgaaatgcctgatagacgtacggatcccgagtttacaacagcttcatggggaatttctctcactgtaaccgtaacattggctggtatatcggtttgagtgtgcttcctatcgtagaccttgaacctgagatgatagcgtccttcacgagttcctgctcgcatcgttaccatgccggaatcttcatccaacttgaatcttggatgctccatggcctcccaatagaacttcttgtcgggcagatcccaatcatccaaatcgtagacatagacccgtccaatcggagtgtctggcgattgtccttggtagttgtaaacgaagatgtccttagatcctggctgcattttgttgtcgttcacgtcgccaattatgacggtcagagtactagttccagtcattgccggggaaccatggtctttgattacaataggaatcatatattccttttgctgctcgcgatcgaaggatcttagggacgatatcacagccatgccatcaccgttggcaccctctgtaaattgcaagtaaatttataatggattagaatagatatccttaagtcctcctttctgcattgaaaggctccaaggaaagaccttcctaaaaaagtgtatctacaggtgaataaactaccaattctcggtcatataagtgcctaaggcccagtccaaatccagttgatattcaggacttcaaaggcatttgccagttagccgtgagctctgacaactaaccaacccaaaaactaagctcttttattagccagcacgttttcccttccacctgattgcagatgcaacttgtgcaatagcccatttgttgtaattacgcctttgagccaacaagtgttaggtctggacgtccggaggaaagtaaactattgccccggaggggaaaaaccccaagagaaccggcggagaacgcacagttgaaatgtatttttaaagacactccatggtgtgtttttaggcaaattgtatgcaaataggagtctggaaaagccttctgctcccctggccaaccaacgtttgcataaagtcacagaatcgtagttgtccggactccacgaaagccccaaacatgcctgccccttccacttcccagctgaggcttccgaattggattgccacccacacaaattgtgaatgctgggccactttttttgctcttcacttcttggctttgcgaagggagctgcgatgcatacatatggagtttggattttacggcagactctgcatggtgtaatttcattgaaaacttgtgcatttgccattttatttggcgcccaggtgggtgaatcttctgcgtttgccttgcttatattatttaaattttcatgtgcgatgcggtttacggtttccgttctatggccaaagattcctggctattcatttcggacttcctctacgaggtaattgcatttgtatgccattgttagctttcagtgacaccgaccacaaccctcttccgttccgctcaatacttggcaagaaaaattcaatacaggcacacacaaaaaatacaaaaataactaagagtgttacgctggtgcattgtttatgctttgacccaaatgtttggctaactttttcattgaggatgggaaagttttggtctgtaactatttttaggtccctaccacctcttcatgttgagtatgtgccgcaatttacatgtaattggttgcaatttggaagtcagatagaagcgaagtattatttcggctaaaagagcacattaatttgaatgaatttattacttaggttatgaaaacttcattgcccattggtaagctaaagtgtcctgataagatttgctttaagtaattgtatatataagaaatactcactttgatcctgttccaccttgaaggaagctcggatgatgtcatctgcactggggtccaaacggaactggaatggcgggccattgctcttggagcgatcgtcatcatcggtggccaggatttcaaccactttacgtggaggaacatgctcgggcagaaccggcctgtaatccttgaggaatttgggagcattgtcgttgatatcctggacgatgactgttagtgtggcagtggcggttttcggcggagaaccatcgtcgatggccaggatcttaacttggtgacgaggaactacttcgcggtccagcgaacgttgaatggtaactgaaccattctggttaatggcaaactggcgctgacggtccgaagatcgatcgatcgaataggataccttactcttgccaccctgatccggatcggttgccttgaacttttcgagttcggtgccaactttcgtgtcctcgaatacagaaacctccacattggcccgttcgaaatgcggcttattgtcgttgatgtccctcagttttaccacaacccaggagtaggccacgtggtatttgtcattgtcgttgtcctcgcccttatcgttcacttggatgcggaaacggaagccattgctctgcagctgatcctcgtagtccaggggctgtacgattttcagcgaaccagtaccgtcgttattccgcaccatggtgaacttatcggcgccatagccactgttgtcgataactttgtactggaacttgttcgtctcgtcttcatcgtgtacggtaacggttaaaatgggcatttccggcaaggccgtaccatccgtttcgtccacttccgtaaaccattcgtccttcgtaaactgcggcggcatatcgttgatgtccttaacccgtatagaggccgtccccgtcccctttaaccccccgccatccatcgccacaacttgtatagaataatccggagttctctcgcgatccaaacagcaaacggcggtctttatcacacccgtatcgggttcgatttcaaaaatgggggagcccgtctcctcctcaatcacgttcttttcgatggagtacaccagccgcgcattggaaccctcattgggatcgtcatagtccacggctgtcatggtcatcacaaccatgccggcggttccgttctcagtcacgttgccaaagtatacgccctgtgggaaaatgggggcattatcgttgatatccttcagattgacctggacatccgcatatcccacgagtccttcgccgccctcgtcctgggcgaatacagtgaaacgccattgggggcgtccattgggttgatcgcgatccagaggctataaaggcatcgaaataaaagtgtgagctaaagtgtaaagcgctgttatgggttaaaatacgcagggggctttgcgtaattttagctgtcataaacgcaagaccgattaacatcgggcggggcgagcataacattgttgtgggttaagagttacaccatctttaacccatgaaattatccctttacacaatgttggggaagccacaaaaaagggatgggaagcctgtacctgtccctgatgttgattgtgactttgatatgcattcacagcagcctgagtgatgggtttcggtcccacctgggtcccatcctaagcccccacaacgcccatcctaccctcacatacgtatgcaaataataaaatgcgcaagcgattttaatcagtactttgtatctgttggctgcaggcaacccttggatattgccccaaactcttgttagcaaatcgcagccccacgaccccttaaaactccaacatcgttaacccccgacgacatgtgacaggcacagcggaccgacaacaagaggagtctttcatggtgctgacattggatttgtcgtaaaaaaaaaaatttgtgtacgaggcgccaacaacaaaaaacggtgtgtataaataattgtgttgatggattacaccgtaggatactctggagaaatatgctaaagcctatgtggaacaggataagagataaaagtgcattcaccataaggttacctactcaaatgcgatgaaggacacgttttcatatttttatttattttatttggttaccaaaacgctttcaggtttgactaaaatccagagcaacctaaaattctccgaaaataccccttaagtgcggaataaaagaaaaatatgtacacataatccctgcgtagtcatcgctttaatttgcatgacaaatttgccaacattgttatgacatattcaatttaagggattagttgtgagtgggtcacatcctgtggactccgatccgcaccccagcaaaaaaaaaaaaatgcggtacagctgtttggtatcccttatcaagttctcctcccgccacttttataaaattgtattcacgtcgagagagatagtccttggactaaaatggccgaattcgtgcggcacgaatgttattcgtttaattttatttttagctggacgcatgggaatttcatttaatttgactttggcgtttttgggactacactagagttaagtgaaattttccaactcgcatgtggcgagggattttcaattgtgatttggtaattagtttccattttctttcaattggtgcggcttttagtgggccatttcaagagcagcagcacctggacgcagagtaaattgttcagtgccttttcatttcaaatgaattatttatttcgttttaaaatctgcgagaccttcagggtcatcagtcaattcctccgcctcgaggaatccatttaagcaatttatttaatagtgcaatgagactccctgccttcgtccactaactgcaacttaaatgtgaaataatgagcacgtagacagattcgaacgtttgcattttgtgggaattgcgattgattcgaaagcgggcttaagtgcacattgatggggcttaatcagcgagagcatatttcggaatttcaccattattttccgtttcagaccagctgcggccttggccaacatggatttttaaataccgcattttatttatatatttattatgcatgcgagcattttttcacagcggccattggcaatttgttaatgcttaaattaagagccaagcactgcggcattgttttcgctgatgacttacctttagtacgaatatttcgccggtggtgcggttgatgtcgaatttgctattggctggattatccggatcaatgccctggcccgtgaggaagtacacgatgttctggggacgatccttgtcgccatctgtggccgtaacctgttcattcagcgcggcaaataaatacacatattaattattgattgttggtaaagtggagaaaaaaaattgaaaaacgttaagtaaacaagcaaaaagaccgaattaagtagtacagaaataagataaacatgccatgcaaaaactacttaaaaacaaaactatttatgctttggttagtttagatgagtgtgatttgtaagtgcgtttatttttcccacttttcagccgtagttttcaatggtatttatttactttaattaccattctgacttttttagccgcttttcaatggattatgatttgtttgcatagtgctttcaggtattaagtttggtcagtgaaaaatattgttgttagaagtgagtgagcgagcacaaaatcaatggtaaataaaatattaaaatattatttgcgtatggttagtaaaatgtaaatacaaacaaagaaagaaaagtgctgactgattgattttaattccctttgttggctctaagcgccaactatgtccattttaattaaattagttgggcgccagctagccacaagtgaaacgtggtaaaaccacaacagaaaatctgagcgggtcaagcttaatcgtgcaaatgtgtggcattaatacttaaagagcatattgaatttaattagcagcttttggtagcaaacagaaatggctaatggaaagcacatatgtgcgataaataaaatacgaaaagtttgcgccatatttacgaatgctattaaagaccgcagggaatattttagtaacagaatcaatttttcgttaaagtccaccccacccactactaattgttctgcttgcatttcaaatgccaggctatgcacctttaatggtgcacctcaatgcccagtggaattcccgtttcaatttatacaattaccgctgaatgggttttaataaattcgaatactacaccttgctcgcggagattattcattatgtttacgtattattatggctggtttacacaaagtttacatggcaaatgagactgaatgagatttcgggttgttgggttaaattaattgttacgtggtggaggagcggctttgtttgtttgccttatgctatatatttcgtgttcggtatgattttatgtacaggactcggaaatggtaaataatatagcgacctgcataatggtaaagggcgtgttggtcattccctcgtcgagagttcgctcataggatgtctgcgggaattgcggtggaagatcgttgacgtcgcgcacatttatgacgattgttgtttgattttcattcaaactgtccgaggcaaccaatttcagttcgtactttatgcaaacattaaataaaatatatggccaacggaaaattggtgcagggaagagaacaaaaacaaaaaatggtaaaaacaacgaaattaaacaataaatataaaatgcacataaattacgaagagaacataaaagtattgattaaaatcatatgaaagctcgctgttcaatttacaagtgggcaagatgaatccagcgaatatcttgtaagcgggtttccactcttgacttgatggcttatttgcatatttcacgttcaatggctcgcttgcttactcattaaatggcgataaattaattgactttttcaattatgcattaaaaagtgcatagcagtttgaaggtgtgtatgttaatcgacacgtttccaagtcatcttcaattttaaacataatttatcgtagcccgcttaatgataaatcaatagtattaccatactttttctgcaaaccgcaatttaaatgttttatgtgtgcgcacttggtaaataaattttatacgttttttataggccacattttacaggccatgtccacttgaaaatggacagcattttttaattgttcaattacttttcgtcatattttttcaccggccctaaatcaatcgaaaaagcggggaatggaacaacatgcaaatggcttcaaatatgtggcattcttttgaacttaaaaaatatattggtttgtcaatgtaaaaacttttaaaatgaaccaacataaatttgagttcattaatattgcaaagcagtaaatgcctttaacatgtcaacaatttgttgtgtaaaaagaggtgaaaatggtttttaggcttttcacatcattaaaataaatattggcaggaataattactaggaactaggaaatattttggcccaaaagcacttcactctaacattctatgtgtatcttttgtgcaataaagtgtggatcaggcagttttcgggacggggaacaacttgaaaacgaaaactcaacacatgcaataaaatctagctgaataaaaactctactgaacaaaacaaaagttgtgagctagtttcgtattcattttgtttcattcattgacctgcaagacgcgtttgggcaaattacgatcgtcctcttcggtaatctgggtgcgataagtgggtcgctcaaaaacggggggattatcgttaacatccttgacgtggattatcacggtggtgtagttctccttcaaattgtcggaggcggccaaacggagttcatactgaacgcacagagaaaaacgtattatttatactcatcgaatggaatttcaatacctaagatattagatctttttaacgagtgtttcagctctttcaaggctgtgcacctaactcttatgaattgtatatttaagtatgtcactatttattattttatgcattttctacttaatattaaacttcattctttaaataaatggaaatatttgcatgcttcgttggagaaagtttccctagtcgcgtttcaattaaagacacgaaaattgaatggctgactgagtttgcacttggccaattgttcgaattgcaattcaattaatggttggccatccactttcttgcctttggtatttgtcttttcgacagcagctcgtgtaacaaaacttgtttgaacttttaaatatttaagcagcctcgcggtgtgcgaagcgtgtaaattgaaattcaaagggagagcgagtttcttaatgaattttatagttggtccagattagaatggccttaatgctcggttggccagtgaaatggagttctcttgtgggttttctagggatctttcttctactttcttcatggacacttcaattgactctttaatctttttcctctttttctgtttttaagtaaaatctacccttgaagtttaagaaaaaaatttttgtacttcgggaatgttatattgtaatccctgcttggccctatgtattctctcagctttccaatgacataaacaaatctcacagttgactaagcccgcaacgcttatgtcgtaaatatatctgagctgcgaaagaacgtttgtcgattacagaggagtcctctacgggcttccactttgcatttttcattttttgtaaacgcgcggtttctgtgtttccatttttttcttgctttttttttctttttttttggttttttacttacccggcgtcgagtttcgtaatctaaagcgccagctacataaatggcacccgtcatatttttaaccgcaaaagcgccgccaatgttgccgcttgtaatttcatagcggatacgtgaggctgtgggcgaaggacgaaggacgaattcgggaaaagaaggagaatagggacagagaaaaatgtgtgtgtaagataataattgcggaatttttggaagcatttttttttttttttttttttttgagcatccagaggggccctctacttacactcgtcgtgatccttggccgttacagtgagcactgtgtgttgaatgtcctcgttctcgtccacttcggcctcgtacagcgatttgtcgaaataaggcgggttatcgtttttatcggcgatgccaatgcgtatgaatttggtgactgttaatgggcaaaggggcggaaaaaacaccatttcgctcggttaaatttctcgttttcaatttgacactcaagaccggttggtacttcgcaattatcacgtactagacacaatgaggaaaacttttcctctgccagacagggcaacaatttgacgcctctcattggggcgacgaacaatttgtttgtcttttatttaaggctatattccctattttccttgcttcttatgcgtgggagattcaaacgcgtttcgcatactaagcagctggggatattttgaacttccgatttttatttgcatgtgcgatgatgtaatttatttgatattcatggattttactgttgatcacagaattgagtaagcagtaatgcggtcgcaaatgaattcaagcgaaattttatattcagcccatttaagcctcttgtcttgagtactcaatcgcataattaactattattacctctggtaatgttagacaacacctattgtagctgctaaaattgctacgaattcacccaaattaaattcaaattgccccaaaaagacctctcattctgctcgagttgagtccaagtattcaggtgattgaatatgccatggcgggtaaatagaacaaggaaaactccaagtggagtacaatatttgtgggcggagggatggacaaacaaagccagtgacaatgagacatatcagtgagcagagatgtcaggcaggcagtaaattacatatatcatttataattgcagcaataacaatgctgaacagagccagtgcgttttaattaaataaatgcaaagaccattggaccaaaggaaaacctgaagagtacacacaaatctatggcaacagatgcgaccaaactttgccgcttaacagcccatttagaacttgagaactgcacagtgggaatttgggataacatttaaattcaattatgattccacagggaatattaaattttaatattaatatgcatacatttttatatctgcagatataatctttaaagtgtgtctatgacgatttcgatgaaatgtttaatcaaacttttaatcaaacttttaatcaaactttgtgatattttctctcagttcaatggcagctcgacacaaatgtttctgtttatcaatttacttagcaatcctgagaaggacaacagtggaaaactttctcttgtgcctgcgttgtttgtgtttcggtttataatttagctgccttgactgggcactatctgtgtgcaagaattatgcacatttgctggcgctgcaggttgacaactcccattgcagtcgggctcacatggcgtatgtgtgataagttccttgccctgcatgcaatccaaccgtggcgcttaaattagcaaatgtttgtgaccaattttgaattaaatttattgcaaaacattgctaattgccaactcggctgtggcttgctttctatgtgacgacattttaattaaaacttggcaaaatcctgttgctaggctggcattaaatgcaaataatatccagcgtatttatcaacatttatgcttttgtcaaagaccttgcatttgccagatgaaaatttttgtattcccatttttgtgtgttctgaaaactcaaaggggttttgttatacccacgctggattttactaattaaccaagatgcgttattaaaaataatgacattcaaagcgatattgtataataatgcttcgaaaccagaaattgagtttttttgtccccaattgtggcactttcatataattaataagtggtatgttattagcaggacatctaaaagtttagtttgtaaaaatccttcaaattttacaaagactttcctcgcagtaatttctgactgactttataacgccaaaaatcaatttacctgtatgcagatgaggtgagtttccgctgaacaataatatacacaataaatatataaaaatttcacattgcctcatatatatttttgacgcagattttttccgcatgccatccacttctttgagttcttcgtgcacggataaatgaaattttatgagtttttattaagcacattgccgggatgtgtggaatttaaagcgcaatataagcgaaatataatgtacggggttaaacattttacaataaagaaaatacccggggcaaagtcaaaagttaacccaatttggaaagcttttatcctttcgcctttatcggcttacgaggcgaagcccagcccttgaaatactttatctatttatctaacaccaattttattgcattcttcaacccgaccgcactcccataaactaactcgaaatcaaatagaagatatcccattgagctttccagctttctgacacacattcgcccactgacacacaacgaatttgatggtgaattgtgtgtgcaatgtttggacagctgttggggattcccctttgggctgtggagaggttgcgggctcctttttctccaggatctcgagtcctttgtgcagccttgcgagttgacattgaagcaatttgggttaactgcagccgagtggcgaaatcaaagtcatctttatcacatatttaactcgagcaaaatgtgtcacattcgctttctctttaccgaataaatagtgttcaataaatacggatatttcttctccttttttttgcgcccgaaaagctgccacgcttagctgcacaaatgccacatgccacgcccccctccaattcgagtgtcataaatttatgcgctattttcgcttgttcaggcattccgccatccaaacatatttatatatgtatatgcactacgtgatgtggcacaatgtcaaaatcaaagacgccatatttttccccagctttccttaacagttttcctttgcatcccattccattttttcgctctgctcttctttggcgaggcaaagtttatcgacgagtttcgcacttgaatgaattttaacgatattaaacagcgaaaagaaaaaaagaaaataaacaattacaggagtcgggaaaaatactcgtatgaggattccctcagcatcgggactttaagttgtcttgccggtttaagatatagttcaattttaatcaaactcacgaaaaatgaggctattttggtttcaatttcacttttactgtatcactttcattgcttacttaaggtaaaaactaattggccgatgcagttttctcttgcccatttcattttatgatcgccgccgttgcaagtgcaacacaatgtacgatataaaaggaaatcactgaccatccgcatccgcttgtgtggtatgggccattaatggcgcttaatgtggccaggctataaagagaagctaactgcatgtccgaagctaatgccagcgaaggggaaactgtggcatctaaattgttgcaaaaatattttattgcaattcttaagccccagctcgtaaaaacttgttcaactgcattttgtcgcttggctgctggtggttctgttgatttttttatgattgtggtctgtctgtcagttttcctgtctgccccactgactggcagctgttccctgctgttcgtccttcgtccttggattcaaaaaagatgtataaatataaatgcaccacatgcgaggtcttcaacaatgtttctgcggttcagtcggatatttgtgggcctgcctgtgtcatgtgtatatgattgtcctgtttgtggttattgaggtttttctttcgcacatcaccgaattttgtgtgttcacactttttccaattatcgactaatttgcgccaccgaaaagattccagtgggcactttttaattagtttaaatgccagtcaggcacagccgcaaaaaagccattaaaatcaattgacagggaaggccgggaaacacctactccggtacccgaaaagtcaacaagaaaatgctgtcacgtactaacagcaaatttatgaacccaaaatttggcaggacattaattgataaagaataataagaagtgtatatattgggcccaggtggatgataaattgtcccgttaaaaatccccttcacattttctttaagaaattgaaacacgaaactgaatacaaaatagcaatgggcgatcaaaataacattttggacagcccaacgatgctggcgacaagaggcaaacgagttttcctgggggcttgttgcggtttttgtggccagcagaaggaaagtgagaataagaaacatttctccctttgctgatgacagttggcccaaagatggggccagaatcgtgtacccgcctccggaacagttgtcattgcagttgtatctgctgcatacgattgtacaattaccaaatggccataattctgttctgaccaaaaactagtgaccctgttcttgcacttgacttgtttatgctggtctcagtctccagcgaatttatgcggacaacagtagcagcttttgcataatgaatgaccaaaatgggttggccatttgggggaccagtatggggccctcacaattgccagttgtcgccactcgagcgggattcgttttcagtttcgacatcgcaaattgactgccagaaaacttcgcccagctgtcaatagagtttaagaaaaatcagctagaacttttcaacactctggcgaaatgttattaaatataaaaaccttttaggatcgttattattaacgatagatatattttcataaaggcggggttagaattaaacatctttaaatccaaaataaaaaatatttttaaatcccaaattcacttttagaaaacccatatcaatgttaaagtgtaacatattccttaggtatttttcttatttaaggctaaaaacggttcttctttaaaagtaatattcccagtgttctggcaaagcagctctcaagtgtcgctaaactacgtcaagtggacaaagtgctatatcaccggaaacttgccattgcacctgctgcctttttgggccaagggacgactaatcatcctgaaaggacagcggcggaaagttgcggccctcttgtcatagtttaaattatgtgcgcaactttggccaaacttttaatagcatccacagcttgccaatcgaacggtgtaaacatgtcgagcattttagcccgttccctccattacggcatatgctcaataattggctacactatccctcaaaaacgggtacggaaaagcgaatagttggccgaaatgcgtgcctcgcattcggaagtctctttccgaggtaaatgagttttccaccgcatcgcagtgaagcattaaattgtatctctcgagcgaaactttcaacgcaactgtccaagaatattccagagttttcatcaagtattccaagtaaaagcgacaggtggacgcggccagacgaaataaaccaatttaagtttctggccacgatgaatactttaaaggctgtcaattcccagacaatgaacccagagctctagagcgggcgagatggggaaaagtggccaacaaattaggagctcattaataaaaattactggcctggctctttgtcaagccaatgttgcagctcttcagcattctctcgagactcaatggcgaatgtctgtcggcaatgacagacaccaataacatcagtagcatctcagacggcatggtattgtatacacaaatggagataattatcctgctcgaacggccattagggatcgagtggctggcaatgctaaggacggcattcagcgtttgataaactcaaattaattacattgatttatgcaattccaggcatgcgagaccagagtcacgcgtgacttatcgacacttgtcgctggagtgacacgtagcttggaatttttgcagaaataaggcaggacgaaggacgcaggactccggcatcaatcaattttttgcagcaatttatcaaactatttcgctgcgatacgatttaaattgttgcctagttttgcggcggcacgtccgcaaattgcttattttactctagacgttttctctgtatttatgtgacccgagtgcgctgctattgtcctgaatgcatacactcgtcaaaaataattgcatttattgttattgaagctagatctttagttggattttttgataaattcatttcaactgtgtgtgattgtattataatatttgctgaacacaaataatgaattttatacataactactgtttttcagtatacaatttgataatcttcaactttcttcaagtgcacgcttatatttacttcactttttgcgaaaaatcacatcaacaatgtcgtgcgcatgttttgtcaataatattttccatttgattgatgttcttgccataaaaaccattgaaatgtgcttcacatggagatcgaatatggcaggggtgaagccatcgatggggaaacatcggtgtacatatataaaggatatcctatgcgggatgttggatgcaggatgtgtgcggagtgttcataaaacgtctccagactttggtcctgtctgtgcggcactgttactttccactagcagctggtgctgcgaatgaacaatgttttggcttttatggtcgcaaattcattgttgttgcgacgaaggcttcgcctgtatctacatcggccaactataaatattgtttatgtcccttgcggtcggagccgaattacacaatgtttgttgcgtctacaatttctggtgtttatgttagttcgccacctaagcataaaattgtactaaaggttgggcttacgtgcagttatccaaaaagctgatatcaaaaaaaatttcaaacaaatcgaactgcaaaagagcttaaaagctatgcatggcacctgtttaacctttatttgagctatcgaacattagacataagggttctccgtgtgagtcaactgtttttttgccactcaaatccaaaatcaaatatgcaatccccaaatagaagaatattcatttcgtatgaatatggcaaacaattccaatgacacgccaaaattcctttgcaacggaagcatggcttatctggggcacacggatttatagatattatatttctctattcatctacctattcccattcctattcccatttctattttgtttcaaatatgtgcaatgaacttatttgtgtaacagaaacaatggggcacatagagctaaaatgctagttagtcggctccaaaatatttgtttttcatatttgatctcacttgctcttgttgggcttatatatttcattggcagttttggtcgcggaaatggaaatgtaagatatgtatgtagaactatgttcagatttccatttccatccgttgaccgttcagttttgcgtaaaaattaaagtgtcagcatcgggtagtgtaccacctggcgtatgcgcaatgttttccgaattcggtccttactgtgtgtgttatattttccttttggccagaacacaaatatacttgctatctttgtgtgtgagtgtggaccacaacagtcatgcatattttttttaggaattctgtattccttgcaactatcggtagttcgtttccattgtgttttattgaccctagcacatgaaagtttccggctttccttcacttccctttacattccttgttttctttataagcagcttaaagttgaaggggattgcacataaagttaacttccccgaactttagcgtcaaagtaattaaagtttctgctcgatgcggtcaaacgaagtaccaaccttaccttagtgcggtttttatagaggagttgcgatgggaagtgcttttagtttacctgcaatcaaacgtaagaacgggaaattagattcagttacagatcaaatagtaagaatagaatcaatagcttacgattataattgatgttctctttaaataactaaaatctaagccaggcaaggctaaggataaagatatcaacatctgcatctgcatatttgcatattgggatattcatatttcctcagcctatttcaattacgtgcaacatcttatataagcttatatataattttaatttttatatataatatttcccttccttgggatttctatccaaaaactaagtacagacgaagctgtgttaattcaggacctttacattgggtgtaattacaggtcaacttgtataaaatgcactttagtgaaatgaatttccattacgtgcctatgaataacataaaacatttttgttcaacatcaggaagtctgcgcttgacattagacactctttgtggtgttagattgttcgcttttgtatcgtaaattaaattttccgcaacataaaagctgtcccaaatcaggttttttattcacacatttgtttcaattatcaggtactggttttctttcctatttcgttttccaactcgtcatgttaagtaaatcagaagcaaagctgagattattccagagttgcataatctgagcttgacgtgagcgacaatgccaacaatggtaacaaaagtgacaatgaaaagcaggaaagcgggaaattccactgccaggataagacaggatggaaaaaagtgctgcgtaatcagattaaaagtgcgaaaaaggaaaagagctttggctttgtaagaacgatttctgattcaccttttccaccgcttaagtctgggtttgtttgttatgtgacccaattagttcggactgaggaattgggttttcactaacgtctatgtttgctgcaagttgcgcggcaacatttatggtgtgcctggggaccatttgccattttcaactgtatttcattaacttttatttgttttaattatcgcctcaaaaataaatagaaaacaacgctcattttcatttaaccggaatggccaacagaagatagcgagagtagcgtgaacgagacggacgtctactgtgtcgctaagccagcttcatcctaagcaacaacaaaaaagggcaaaaaaatataaagctagcgaaatagcataaaatattgtagaacagcgctctctgttgcattttaattacatttgcataagatgcagcttatctgccccttgccatgcttcgttgcagttttcagtttgcgcaaggcgggagcactaaaaccattcgatatatataaagtctgtttcctctgactatttaatgtcctttaaactaaagcgtggaaaattaggataacagattttttgtacaaattttaggcaacattaggaatgctatatataagagtgtctaggagtatgacattaaaatattttgttgcatgcttttacgaacttttaatataattacactttgtttacgtatttctacatttaaaattgtaatctacttagtgctgaatatttttcttcaaatgagcaaaaatatgttctcccactcacttaattacgtccaaaaaatgccaaaagtgcccaatgtgttttctgccccttcaaaagtgaccaatcccaacactcaaaacaacgagtgccatcctctcatgccatcatcatcagcagccgcattgtcatttggtgacagtttgttcaaacaatttgcgcaaaaaactctgagcatttagcaaatacccaggcagtgaagagaaacaaaaaaaaaatatcaaaatagttgctgcattgtgggaatgtggctgcacaaaattctcggaaaaacaactggcaacaaaaaattatataaataaaagcgagtcaacaatctcgcaacacgctgcaagtggcagtgcacatttttatcaacatttcgcacgcacatgaatgtgggcggggcacgtctcactgattaattgcagtttggttttaagaattgttactggttagctctatagaaataatattccttgtaaatttgctctaaggttttaataaacacttatgtcttaagctgaaattaaatctccaaaacatcttttctatgtggcctttgctttgtgccttgtgcactgttcagtttagtggattaaagtctgaattaagaccaaggcccatccatccctcaattctttcattcatgccactcgctatttaccttacgtgttcacatttagttcatttgtttgtgcagcttccactcaatatgttcgagaagccgttactgttgtggcttatttcattatcccagcccccagccccacaggacccagtccaaacaggccatgggtttttcctgctgatagtgcacaaggactataggagagaaaagaaagccatcgaaggaaggtggattgtggacggtggctcgggccaagtcagctcgacttgatttggcttttgggtgcgtgtttgctgaagctgacctcaatgtcctgacttcggccaactgtgttcgtgtagcaatcagtgaacggctggagaatttactgcccaatgtgctggtaaaatcacaggcggttcaataaaatatacacgtgaatgtgcctgccgggcttttcatacccaatcctttgctttgcttgtccttggcaaaagctttttgctaatttgttgccagttggccaggtttttaaagcagctggccaactgctgataataattttctcaccccagcccagcgctaaattggctaaaataaaggaagctcaattttcgtacacagcaaactcaattagctcttcagctattttgattgcaaacttttatgagttatgggactcaattgtgggtcacaaaaacaagtagaaatagaagtaagacttggaagacaggacaaaggctgcatggaggtcaaaagttaaacgagagtcgaggacgtgtccgtgggtgtgcgataaaacgaagatgatgctgctcccaacaattgcactcttggcattgtgactgccaggaagtcgggaagccaaggacaataagcactcctaccattatagtggtaataatagagaaaagtaagcaatgctgcttggcaaatggagcttgtgtttgctttcagacaaaaggaaacggaattagagccagggcagtcttattcgagttaatcaataaaaggaaagaatacatttgaccaaatgtgtactgtattaaatttaggcattttgtaaatttaagaaattattgtaataataaaaagctttcgtatagcttaaactagtgctgattgaagcatttaagcactagttctaaaccaatgaactgcaaaacaagaaatgcttcgggcctcgccacgtatgcgttatatgaatttcagagacacgtgcttgggcttatctaagaaaacttttggcacagctttttttattgtctgcctcgcaacaagagctccctggcttcccacgttttctcccttgccgtggtcgcaggacattcagcaggacatttatacttgttatgaggccggtgctaaggggactccaatccaagtggcaacacttgagctcaattgtctgaacgctgacaatgcgaactagctggagtcgcggggaggggcacacacaaaaggataacggcagggaacatttttgtttagcttttgctaaacactttaaggacttcttccatcacctgcactctcaattaaatcatcatctagaagtcaaagttttttttgaggaaaatcaaactcgacaggaatcaaaggcctcgggacagagttcaactttggttgaggccataaaattttgcagccacacaagttttgcagtatctggcattttatggcatttgtggcaaaagtttttgtttttcctttgctttgcaattggtatttggttgcttgtatcagcatttatggtatttcaatttgttttgttagtgattttattagtttgtttttttcgtattcattttatgattatttttatatttttcaataagaggtaggagttttaatttttttttgagcgaaaacaatttagcatttttttaattaaagttcttcaatgtttgtagataaaagatatatttttagttggatttttagcccgcttatttagtttaaaaaaaaaaagttatctgagctcgtgaaataaattacttttcaccgagcgagactgttgaaaaagtcaacttttgctcgttttaattagtttgcatatacgcaactattcttagtcaacattcgtcctcgacacacgcagcgtatgcgcaatgcgaaatccacaattgcataatgacttaattaaagttttcccactaactaacaccgacgcagccacgctcagataattaatgcaaaatctttaacacgcattaacaattccaagtttgtcggcgcataataatcaactcaagttgtggaaaaactttgccgtttattatcatcatcgccaggtaaaagcatattgcacacacagattgcaatgcatcttaatgagcgctgagcaggtaagttggccaaaaaaaaaacaaacaagaagatggggagatgccttaaaggtagccaagatgaggaagtacatgccctcaagtccactgaaccagaaagattccctctgaacttctcagttcgtttctcgattcttgattctcagttcacttctaagcggctttaagttggcgtgaaaattgttgaggcaagtttcgagaagttttcttttctccgtttttggagcagttgctttgatcaattaggggaagcgagagggcgagaaagggtctgtctatataaaataaaatttgtgggtgaaaggtgggctagatattttggtctctggcaagtgtttccctcaccgctgggataacgagattttttcgcctatttttcttgtattttcctgcgcctgttttaatgtgataaaggtcgccatgtgacagctggtcgagctaataaagtttcgcacagattgcgttctcaaaaaatgtgaagaattgttagagtagtaagtgagtgaaatgggagatacccttggcatatggtcatgataattaatgcggacattttacagaactgataagttgtatagtaatccactgttttctcaatgttcaacaagaatattgtcctattatatctaacttaagtttttgaatttgtattaataactcttttaggtttgtgcaattgagcacagggtaaacaggttgccagataaaataatatgcgacgcaaaagttcaatacacgctacagcttatctcttcacctttctatcaagaccctcgttggtccaccctgcagttgacattacctttttttacctgtcacaaacaaaaaactttatagagggtgataattgtcaaattatcgcacaaaacacccaacaaggagcagaatcatgcgttgaatgagtggagaaagccatctctgtcggggcaatctagtagcgtcgactaattgtaatgcatttttcaattttaccaacctcccaagcacacacatggcgaaaagctcgagttttcaccaggctctgatggatgatgcacactcgccgttgtcattcatcacagaagtcggaaatggaaacgcgttttctgcggtcaaagttggacttttccacatgtctcccaaacaagattttgaggatgagttgtgtgtgaattgacatcaacgcgatggaaaatttaaaaggggcaaatgctataatgactgttttgaagtccttgtgtttctcaatcagtcgaaaatgttcaaattaggccattggagtgaattgagtgacctttaatgttggacaacctgattcatctgatagcatagctttgcccatttaaattaatagcattgtgctttttgatgttgggccacagctatttacatattgtttttcacatcctagtcaaaaactaaatctaattacagctgccgcatttgagaaaggtaccccattctgtgggtgattgctattccgtccagagcggtggtaattgatgcttagtgtgtgggtcaagggttaaaggttgtttgctgattgcaaatgtttcaaatggaaaatagcttcaatagaaactgtgtttgtaacttgtgcacaaaacttacatttgatgattttaccttacattttgatagacatttaatttcggtaattttgattattccgaaagaaaaaattgaaagactacttttattttcaattcgcaaatcgacctcttaagcatccatattctagactgcctttgtatttccctttactgttcagtggcatttgcgtaccacttttactgccccattttattctgcaatattcagcattctgctgctacttctcgctgtctgcatatagttttccaattaggcgaaacagtacaaaaaatggcaactgggaggttaaattgtcatttttttccagcttgtcatcttttcgggcaaaaacaaaacaataattgagatgacagtggggaggaaattggagaaagggaacttggagtatccatggcctgcttaagatattcaaggcgcactcatttgcacatttccgttccgcttttttcgtttagcggaagtgccgcatacgccatgttgccaaacacagactgcgacggcaataagtgcactgcaagaaattagtggctcgtgaaaatatttaaaacccggaacatatttatttttcattgctattgccgatgggtttctaccatttattgccaattgaataagtatttcttgttgtgtatttgtcctccccgtttgataaagtgcaacgctgacaattttgcgctttaagtgaacgaggtattgcagcccaaaactcattgcacattgcgccaacttgtcgccggatgcgaatttatgcgtattcagctaaggaaaggcaccaaaaaagtacagaggaatacagcaaagagatcgtcttgcaattgcattttgtacgctttacttttttcatgctttcagctgatttctgtccgcctttttgcagcaaattaattgcgtagacagcagacaggaaactgagaaactactggaagaaatctgcaagacactttttcatttggcatctaaattattgtttgcgtttcttaattgaaaattaagaaaagtttcccaaaggtgtggagcatctgtttgtttccccagcgaaaataaactttactttccccatataaagtatagtttttctgctaactattaaactgctttaaaagttatgcacctccccggagagaatgtctcacgctcgaattctttccgccgaaagcaatttatcctatttgaaatggaatgtcataatatatatatatatactcaaatgtcctgtgggaatgcttgacagctgcccagacagcaaatacagcagcacaagaaaacccttgatttattgtcaacggaaagagttcaacaataagttattcaataggaccttaccccacagaaacataaatcaaacaattttataatgcgcataataataaatcgcacgaaatgtataaaatgtaattaataactggccacttccgctccttaaagccgattggggttaaaatggcaacccctgcgattaaagtaggggttttaactcgccctctggggcttaaattctgattgacggcgattgattgaactaaacaccaaaactgcattatggccagtttgaaaaaattattatttaatatttaattacaatctatgagtactctcttcaataaataccaatggatgctttgcattttattgcacctccaattgaatgataaattatgggtcctattaaaatgttaggcaaataggcaagcaatttggtcacaatatcgaatattatttcaaaaatattttactggcagtgtgcacaaattttcaaaattcgattggcaagctgataaatcgtcagcagtcttcgtgtacagttctgttacattttcactgaaatgaaaactcaattgactgcattatcgagggggctttgccccgcacacctgtgaagatcaagcgatttcccattgtgcaggtgcatatgttttttctttcaaatcgcacacagtcattcaattgtgattccgcattcagatttcagttaggttactgattcccattctgattgcccagcaaaggcaaataaatttacgtgccgactcaaaggctcaaatgccaattgaaaattgactgacaaatgtgtgcttgtgtatttgttgttcggctgccatcagggtcttaagcgatttgtttggcaaatagtaacgggtaagggcactccagctggcagccacccaacatcagcaattcctttggagtccgaccttgcgccttcctccataaaatggtactttaaatcagtctgtcacctaattcactttgttacttgtttaagtcaatatgtaagactgtgctaatgattatttaaatcgttcataattcaccctaattagctaccgctgccggtggcaagagtgaaaaagccaacatagaactcgatccatcataagctcagagctttaattgtgatatagcgaattgttggaatcaaagtggttaagtaattaaaagtgcttcgctaaccaaagacgactgtgttaggaacgaagatgaagaagatgtgctcttaatcaagagtcttctcttttgcaacgccattaaaaagtcataaaactgttatacaaattttatagggaagctaagtgccttaaagtcgaaaggagtcgaaagtctgaaacaaaattgggatattttcctacaacaatttgtgctttcaaggcactttttacgtatacatactgtatacataaggtctaaaaaaatcctttaaacataacctggaaagcaaaaggatttttttctataatgaatattatatatttgtccgaaagtccttatagtataagacaagcttgtgtggtacaagaacgaagttgaaaacgaaagctaaaagctttttaggtacacaagtggcttttctagaaatatggtacttcgatatatgtataagatgaaacttaaagcattattatagtaatgcatccataattttctataaatatgaagggaaaggtgaacacaaacattatacaaatgcaatataagtcctgaaagctttcaggagagctttcatcttaacttatacgtataagtttgcttaacgaaagagttggtttttgttgtggttttatagcacaagctgatttttaaaacggctgtgtagagattttcttaagttgtgtttaaaatctctagaccaaaagagaagtaaaaattggtttagtttggattttagtttaaatttatttagtttagaattgtatttaatttgttattttaaaagtaaatattgaaattgtatgtcccatttgaaatcccctcataattattttcaggtaaacgacacttaagtacatagctctgaccagctgctaatttgaaataatttcttcggtgatatactttataaacctaagcccacgtggaaactttgcctcgctttggccaaactttattgctaccaagtaagtaggaaatattcgagttcgttcagctcattacgctggccagcatacttcggaaattgagcttcagctgttgccaaaaacgcgtatttccttacattgttagatgcaaagaatctgctttgcttttatacgcacatattttaaagttttataaccaaagcgaagcacttaaatgcagccatcaaaggcacaggaccctgtggctgccccgcatcctgatagagatattttggctgctttgacctctgctgatgatgatattgatggcaaaattggcaagttagatgagcacgagaagttcgccataaacactcgagctgtcaaatgtttatatgcatgataaaatcataaaaagatgtgacgctgcttattaaatgcacaccgcaaaaactgctgatcatctgccaagcaaaggcgggatttttgagtatgtattttgtgtattcggaaaaatccctaatgaaattgagcgcgaaactatttggacgggcaaagttcatttatgatgaatgaagaaatctagtttagttagaaggagaagggcgtcagctaagctttctcgaaggactttaaaaagttaataaaccccctaaggactaaattgatataaagcgaaactgagtaattacagcatgatttctttttattgcttttgaatattaattaaccattgctgctttttcgattatgtcgattatgtcctattcttgtaagaccctaaccaattatttgagaacccttgataatgtcacattttcgctccgaaattggcccaatttcaagtacccgatttaattcaatttgttgtttggggtggccgggatcgggagggcgtgtttgaatcgccaaaaactttttgacattcgcataatttatgtagcacaatttgttccgaagctggtccgctacatgcgatcgcattgtttgccagggcaacatattgcagcaaaaagtgcccggccataaacaatggccaacaacccacacacacacgcatggccacggccataagctgacccctaaatgcagacaacggaatacacttgaaatcataaataaccgtcagtgctgtgctgttgctacggtcgcccgcataagttaaaaccactcatacgccccgttggtcccggacacctgccaaaaacaaaatttaaataaattcacttgtcaaatatatcgtacataatttcgagtgcattttaaatcaatcgcatgtgttactctgcgccacgcccaccaaacgcccactcgcctgtctgccagatactgtgcgcgtataaatgtgtgtgtggtcgcataaaaataaagtcggggcaaaaaaaggggatctgagtggcaaccacttgcttgttcgatatttatgacaaatgtggccattatagcagagcaaaaaaatatggcttaaaaggtgttacagaaatgactaataactgtagaggtgcttaaaaaagcttactttttgacatatttaccagaaattttaaagccctacttatatcagtcgaacatatttatttaattttatttgcctcagtgtaaagggcacgggggcgtttgagggaaggcgtggtcttgtgcgagagtcgccacgactgtttgagattaatggcgcgtttaaatgcttcacgtgtgaaaaaaaatctataaaacttgcataccaagggacaaccttcggtggcttctgcacaggtgagggcacaaccgaccctccccactccccgtattctggcttgtgccggcccctattttccacccaccagcccccttcatcggtgtgtttgtgtgcgcgtgtttttgacactttaactgcgcttccacttggagcataacttgcgtcacgcttgttattgctgttggtcttgttgttgtcgcgacggctggcatagtactattgttgctggttttgttgttgctgctactgcagcttgttggctgtcattttgcgtttatttcagccaggttgtaaatggcaggaatgtcattgttcaggcgcatgccacctgtccccctttcatcgggtgattgtatgcatttagttttagcaaaaggcgttaagtgcgtaaaacaagacgattgccttggaaatcaatcactttacgtgtctatacctaagccggatatccaaattctgtgaatattttacgattttgctttaaaattaatatgttttaagtacttacaacataattgaatgcactttgccaaggctaagcgttacatacctgaaagaatgaattcacaattcgatcgccgacgtgtgaagacgtttttatcgtgctccgcacaaaatcggttgttttgagtgaagtgaacgccaaataaaataaactaaataaaaaaatctgaaagcgaaagagacgctccatgcgatgcaagatcgcttaaatacatagtgaattgttatcttaaataataaaactatgagtcagaatgacactcgcgcccagcgtcagctgcgagcatgacgaacgccgactctcaattcagcgcaacaacgcgtacttctcctacgtctcaccgacaatcccaaacgcagacatcgagcggtcaataacccatagcccaggaaaccttcttctaccaacaaatcaagaaagagcgcgctcctgctctcccgctctattggctccaacagaagccccgctacctccaacaacaacagctggagagggaccggcagcccgctctgcctcgtcatcggctgcacccgctcacggtctgactaagtcagcgaaagcaaaaccgctagcaataaacggtactgctgcactgccagcaaaacaaaacgaaaacgtaaacaaaaaagctgggtcgacctggcagactggaatggaccgctacattacaataaagcgaaagctcagcccggaaaattcagatttgggaaacaagccgaaaaatacaccgcgaacaactctaccttgatcaaaaatgtagcccctgcaaatccaacagatttgccttgctggtagataccgctgaggaccgtgccgctgggatccgttgatatcgaaccgaagaaaacaaagcctcccgcccaatatacatccgcgagaagagcacaagccgtcttgtaaatactttgattggccttattgggaaagatagctttatataactcccctcgtaagaggtactatcaacgaaatcaaacttcagacgaaaacggaggacgactacagaaaagtcacaaactattttaccgcacaaaaaataggcttctacacctaccagcttaaaagcagcaagggcctgcaagtagtcctgaagggcattgagtctgatgttacgcccgaagagataactgaggcgctaaaggaaaagggattttacgccaaaaacgtgttcaatatcaaaaacagaaacaggcagccccaaccactcttcaagattgagcttgaaccagaaaacaagcctcctagaaaaaacgaggttcacccaatttacaaactccagctccttttgcaccgtaggatcacggtagaagagcctgcacaaacgcaacgctcctgtacaatgtacaaactgccaagagtatggccacacgaggtcatattgtacacttcgcccggtgtgcgtagtctggggagatctccacgactccaaacagtgtcaaattaacaaagaaaatgcatgcgagaaaaaatgtaataacctgcgggggcaatcacacagcaaactacagaggctgtccaatctacaaagagctgaaaatccgtcttcacaaaagaatgaacaccggcgcgggcacaccaaggatcaagctccctgataccatcagagacaaatcctgaagtaattttctcgaaagcagctagtttcgctccctggcctacattcaacactaacaagacaacatttgctaacgttttaaaatcaggtatgacgccttcaacccaaaactcccgaactccacatgaagtgcacacaaaattagacacacaacaaaactatcaccccagctgcgcagcaggaaacaaaaactgaagctatgatgcaagccttacaacagagcatgatggaatttatgacatttatgaagaccaccattcaagacatgatgcgtaatcaaaaccttttgatacaaatgcttgtagcccaacaatcaaataaataatggctaccttacgcatagctacgtggaacgccaatgggcgtctcacagcgcaaacttgagctagctcaattcctacatgagaagcatattcgacggtaatgcttctttcggaaactcatctcacaagcaaatacaattttcaaataagagactccatttctacggtacaaatcatcccgcggaaaagcacacggtggaccgcccatactcataaggaaccgatgaagcaccactttacaaagaatttgcggaaaatcatcttcaggcccatctatcaacattcagctggatgacaacactctccttacactagcggccgtatactgcccccccccgtttacagtattagaagctcaattcctggatttcttccaagcactagggccacacttcattgcagcaggcgactacaacgctaacatactcacttggggatcgcgacttgtgaacccaaaaggaaaacagctttataagacgataataaaagccactaataaacttgaccatgtttcccccgggagtcctacatactgggccatcagacctcaataagctgccagacctgatcgacttcgcagttaccgaaaaatatttcccgcagtttggttaaagctgaatgtctgccggatctctcatctgatcactcgcctgtactaattcacctccgccgatacgcagaaaacgtgaaaccaccaaccagattgacctctagcaaaacaaactggctaggtataaaaaatatataagttcacatattgagctaagcccaaaactcaatactgaatctgatatagagagctgcaccgtgtgcattgcaatccatccttactgcagcagctcttactgcaacacccaaaataacaaataatacaattaattcaaaaaagaccaacgtacaaatcgagcaactcggtccacgtaaaacgtcgcttcgcagagaatggaatcttccagatccccaactgcaaacaaaagctaaaagtagcccacggaaactggccaacggctctgaaacaagaagaggacgacgatcagcgccgatacatagagcaactcacaccaacaggcacaaaacaaaagtcactgtggcgagcccactcaactcttcgcccaccgactgaaacccgttttgccgataaggaattcatcaggggctgggcccgtagtgatgaagacagagccaacacatttgccggctcacctacaaaatgtgttcacggccaaaccaggctactagcacattcgcgctaccgtcctatcccgtaaaccgccatcagcaacacaccccaatttgtgtttcgtcctaaagaaataactaaaataatcaaagacaatctcaacccgaaaaaatcccccggctacgaccttatacaccggaaatgatcatccaggctgccacattctgcagttcgctacataaccaagctctttaatgccatcaccaaacttggtacttccacaacgatggaagatgatgaagatcataatgattccaaagcctggtaagaaccacacagtcgcttcatcttacagaccaataagtctactctcatgcatttcgaaactatttcgaaaaatgcctgctgatccgacttaatcaacatctgatataccacaatataatcccagcccaccaatttggatttcgcgaaagccacggaaccattgaacaggtgaatcgtattacaacggaaataagaactgcatttgaatatcgcgaatactgtacagcagtatttttagacggtatcccaagcattcgacaaagtctggctcgacggcctaatgtttaaaattaaaacatccctacccgaaagcacacacaaacttctaaagtcttacctctatgacagaaagtttgcagtgcgggtgcaacactgccacttccactgttcatacaattgaggctggagtccccaaggcagcagttcttgggccaaccttatacctcatctatacagccgacatccctacaaatagtcgcttaacggtatccacatttgccgacgatacagctatccttagccgttcaaggtcccctatccaagctacagcacagttggcactgtacctcaccgacattgagaagtggctctctgactggcgaataaaagtaaacgagcaaaaatgcaagcacgtgacgtttacgctaaacagacaagactgtcctccgctcttgttgaacagcatacccactcccgaagcagacgaggtaacggtaccttaggagtacacctagacagaagactcacatggcgcaggcacattgaagccaaaaaaacccaacttaaactcaaagccaacaacttacactggctcatcaactctggttctccgctcagcctagatcacaaggtcttgctctacaattctatattgaaaccaatctggacctatggctcacagttatggggcaatgccagcaacagcaatattgacatcattcagcgagcccaatcaaagattctgagaaccatcactggggcaccgtggtacgttcggagtgaaaacatccaaagagacttaaatatcccatcagttaccaacgcaatcacggaacttaaggaaaaataccatagcaagcttcacacgcaccccaaccacctagcgcgaggtctaatccagctcagcagccgttcccgtctccggcgaaaggacctaccaacccagcgaataaattattagggccgtttaaacatagaacagttggaaaaataatacaactgttcaaaaaatacttgttatagttaagatttttaaacttattgttagttcttatacaagaagattcaataaataaaagcaaagtaaaataaaaaaaaaaaaaaaaaaaaaaaaaaaaatttgcagtcgaaactaatttgtatgcttcgacaagaactgtattcagttaacgaacttagcataagatgtcatcgctctgtcatcctctgaaatcagccaactgtattggtggagggcattgaaggggcttggcgaaaagttggtgataaatcggcttacaggggagtatggacgcatggccatggcatttattgactctgatgttgctgctgcatttcggactaagccaataagcatttgagcaaagtgaaataaaagtaggaaaaggctaatgccatgtcttagccttcagcgaccccgccccttgttgcactcgaatttacttgggtatttgccttgggcccacacacactttcctcggctttcccggctttccccagctttcacggcatctgtcgtcacgttttagcgctttagtagctgcaatttgttggagcgtgcggccgggccaagtgcacacatgcatgtgcaaataactttttacggtaatgcaaatgaatgccaatttacgagccgagacattcccaacattcaaccaaccaacctccttgcctgccaatcgcatttgtcaagccaatttgcaactgccgaggtgacaactcaatgaatctccgccgatcctagtgcaagttggtgaagttactggcttagaaactcgcaaggcggaggtttcgagttattcagaaacaaagtgtcctatttaaagcagctccatatccttgatttcaatgggaacaaatgcaattcctaaattattagctaggccctttaatatgagtttaatatagagtgcactactaatttccttttcattctcttaaacgtcaaaaagttcaacgtgagcatgcaaaatttaattttctaaaaattcggaagctgtacacgctgaggaaaataaaagttaaggggaattgcttccgcattcatagaaaaaataaagccaataacaaattcctttttcggtacgaaaattgtttcataggtgcgccagcacggtaaagtttttagcaaaatgaaaaaatcacatgtacaaaacggaaaacaaaagacggccacgtatggcgcaatcatttatgcagcgctttgtgaaaggcatttccacggaaatttcacagcttcaatagaaatgaggctatccctttgtcgtgacatttgactggcaaattataaaagcttagacaatgtgaacaataagcccgagcactttccgtttcggcccccaaataccattgcccacacgctgaccacgcccaaatggcttctgtgtgtgtccatttccattttgaagtcgtctttgagtgtgtaagtgtgtgattgtgtgtcctttgtctgttccaagcattataaaacaatttgttgttttgacaccaacatgccgagataacccttaccctcactgccttcttcccacgaccattccaattatttaaccgcagctgaccccacctgaacccttttgcccgcactgacacacacaaactcgcctattgtttgctcattgcgagacaggatttcgctttgcttccattttgtttgcggctgccattggtatttgtttattagcgccagtgtgtgtgccttgtttgccttgggtttactttttatatgaagtggcgccgtgtggagcagcactccatggcagcacttaagtcctgtttatttattgtgccgacaggctttaaaacgttttaaaataggctctacctaaacactaattgatggattaaatataccactgcggggccattgcaattttgttggttattaaatgcaatgacgttctatatgaaatttgaagaaaccgtgattagattaaactgaaagcttagtaaaaaccacaggctttggaattaatacttttcctttactgggtgtaatttaatagcaccttttcaaaaattgaaaaatatgctaaacttgctcatggaatttgaaaaatgtaaattaacaaattccttgcagcgaaaagtttgtgctgtaatttatccgtattaaaatttcacgtttaatcctgccacacatacacgcacaggcatcctttggcgcccccgcaaaatttatgaagcatacttgcaggcgtcacacacacacacaagccctgcgagtaagcgcattggattacgatcaacaattgaagtttcccgtaagcccagccatacctaagcttattacacgcggaaaaaggagaaagacaaaatttgtttatgaacacaattagaggcggcgacaagaccaccctatattagcccttttttaattaattttcagcattccttttttgtacacttgtttgttttatttatgtcaaaattattcgggcgccaaattgttgtttgccgcgactcggtaaaatcaaattatgaaaatgcaaacacattttcaattagtcaaattgaaagttttcgccgaagacaaaagttcacgaaactttaacgaattaaagggaaagtactgctaggacgcatcggacgtgagggcgcagccctttattgccttttcaactcgcagggaaggaaaaacgcgtccaagaaattgcaactaaaacgcagtcatgctgcgcaggataatccaaaggataatccatgcggcgcactaaagggagcactgaaaaaatcatacaaaaggggtccaacaacgcacgaagcccggctacctctcctccaattttttttttagcagtccacacatgttcaattttatgctaacaaagctttttttattgggagctcctcgaaatgtgggcgtagcccctagatcgacggcaatttcgcggcctttgtgatgccaatgtgtgtatgtttttttttttcagaagctttacagccgaaaaattgaaatgaatttgcagcatcgcagcacgagtgaatgcatttttaagcctgacttttttattaagtttttgccagcccttcaatgtaaacatattgatgatgatgccgcaaaagccgaagcttatgtttgctttcatcagtttgatcagtattggaaagctaaggtcaaaaaaaaccttttgaattaatacccagtcaagccaaattatttttcgctcagcttaacttgatatttaactgctattttttggtgtaaaactgcataaatcgttttgaaagtgaataataagagcggggcacactttaaatagaattaatgtatatcatgaaagcgaaattgtaaacattcttcaataaaacaatttgaatatgttatgagcgttatatgagcaataatcagtgaagaaaagaaaaaaggatgactgcgttattgtgttaagctggcattttaaagaaattgtctttgtatattgaatatcaatgcaattgaaaacctttaaataaaggcgacctaaaccgtacgagtaacggagctgaacattgtaaaataaataattaccactggaagttttcctatttcctgaataacagtcgatttggacgaggataaaacttccggcggagccaaaaacctgtttacctatttgccaggataatcgagctgcagtccttcccactttttccccactgagtggcatgtgattaggccaacttatatgcgcatagaaggccgcgagccaagtggagcacaatttgcatatatatctttatgagcgggatccaaaagagtaaccaagctggaaaaataacaacacagcccctgacccttccaaaacagaaaaaatacaaaatatatacgaacgcaacaatttttcggcgtggctgctgatgttttattttttatgcaaattttgttgcatatgagaaatgggcagaaaatgggcgaggggtacaaaatcatcatacagtatgtgaaggacgaaatgtgcaaaaactttaataaaagactatgtcggtgggggctcgctgagggctccaaccataaatttgtggagcagggtgcgacgtggctcttcaaacaaagcaacactcaacgtcgctgcttcccaacgaaataatttcagtagtagcaaaaactggttggataaaatgggttgaggattttcgggtagcttgcatattaaaagtcagaagtgttgagctgttgaaagggttgaagcgggaagggagttccaccttcttctgccttgttgcatgccacatgaaaaatttgcgttgacaacaatgcgacaacatgtcgtggctggtcccccagcccaaaaaggtagctattgccttttagcccagcttaaattagttaatattaatcattttgcatgtttgtgggggacagctttctgcatgcgaaacgcttatgcgtcctggaaaatggaaaggtaaccgaagtgagttttaagcaagctctctgtacattgcatttgaaagcttctagaaagaaataaaagtatttaagcaacttctgggcaaaacctgctccaaataagaatgttacgcataattgctttgatttatttgactagtttcttttgtttcttttttttctttttgcacacggcttcttggtctgcaactttgtgccaaataaatcaaaaatggcaataaaatcatttccactgcagttgcaaaaaaaaaggacgaaccccgtaagaactttcaattgctaattgccattttgctccagagcttttctttagtttcatcgagtaatttttctcgagctgaacttttaaattatttggctgtacaaagttttggagccgtttataatttaagaactcactctggaataaatcaaaccaaaaccacctcgagccttcaaaaaaaaaaaacccgatcgctgttttgtaattaaaatcgtgtatctaaagttgtgatgaaaaccacatgtgatgacagctgctgacaaataaacacaagcgataaacagcaatcaagcaggatgtacgccatatttcgcagttgcctttgattcaattaaatttgcattatggtgggcgttggaacaattaaattcattagagttaattacagccgcaattaagaggacattttcataactaattgggggtaataaaaacaaacaacagtcaactgaaagacaagtatttttataatgtactcgctctggttttctttgtttgtttcactttttaaatgaacaagaaaacatttgcataaaaggcgaatgaaaaagaaacaattttattccccttcctgtcattttccatgatcatatgaaatcatttctgtgcaggcgcttttaagaaatattatgtactcattttttaataagccaaaaagaggaggctgaaccaatttgaatttggctttttacatgtcataggtgaatgattaccataaaaaaaaaatcattttaatcatatctttatctttatctattacgataaatttggtttcgatcttaatttaagtgacacaccaaatacgcgattcgagtctaaatcagcttactgtgcacaagctgagtgccaagaaaaaatgccgacacagccagaaaaaatgtggagcaattataaaagtggcaaacaacaggaaaaagtacgaaaaaataaaatgaaaggaggaaaagcgtctagccttgttgcgacttttgttttgcttcgttagccggttttccttggcggttttccgcggcacaagtttaagtggattttcataatttacgcgctctgcgctcggtgaagaatcataaattattgcccacaaccgagaaatggcagccacgccccttttcccttgctgtaacaattgtatttaattgtaagtaaaatatgtgaaaagtttgtgttgtcttttcatttttttgtggcactgctaggcagccgaatcgagtgtttggaaacttttgaagtctcttgagtgggtggaatttatccattcaaaaaccgcccaacgtcttttccagccccacctctaaaagtcagcgacatgttgttttcatgtgatttccccctgtcagcagcagctgcgactgtatgtgtgtcgtctggctttttgttttgctttcatgatgatgattttccagcttgtgattcctatgtttgcctttcgtcaacgtttatgacaatatatcaggggaagatccatctccatctccatttccatttctattcccattgccatttccacttccattgctggagaacttggtctactttatgcttttattggctacatgaaaatattcctcacccccccttattttctttttgctttagccttgccgccgcaattgtcagccacagaagttatgaagtattttttctgttttttttttttttttagtgctagccgaagaagaagtgaggaaatcgagcgacatgttgccataaagtttttaattaaattgttagattttacatcgacacttttttcagttgttgctgctgaatgacaagcaaattgagctccttgtgcgcaaaaacaaacatggcctagtcgaaagtactaatttagttggatatttgctgaaatttactcttctatcagaagccatgacttcgacatatgctttggcacgaaaatagccaaatgctattgcttattgagtgacatattttagagcattttaaaatcgtttccagtctcttattttatatcctcacaacctatgctttttcacaatttttatggcacgcacattggcagcttggttgtcaaagactttgttagcaaaaggccacagaacctttggccagttctgacctctgccgataaatgtgcgaaatgtgcacgctccggtaatatttttaccgcccacaaaaggtggccaaagtgggcggggaatggtggacccaaaagggagagcaagttggctgcaagtctcatgataaagttgacactttatgcgtttggccagagacgacagccttagggcagaaaatgcaaaaagccatgcaggaaaatgcagaaaattcacatgcgaacattcaaagttttgattttgtttgaaaagttgaagtgattctgaaataaagaacacggaatactttaaccacaatcagaaatatttaatgtgaccacattttatatttcccttgaatgttttgactcatttgattcattaaataaatcccggctttatatacttttctatccttatcccattcaaaacaggtcccaacccacttgtacatttgatgtgatttttttggacaaaaaatcaattacattttttttggtacatgcggcgtatacgcaatatttgttgctgacctagatttgttggctgcaaatttactacatgtgaagtgaaatttttgtggcccaaaatcagactatgcaaccaagttgggttatttaaatcgcaaacatgtgtacgggtaaccgctcgcccactttccgcatttggtatgttttttttttctgttcgttttttacatatttgttgtcgtacttgcagttctaattacccctatataaatatattcatatgtgtatgcatgtacatatagagtctgaccaaccaaaattcgtgtttatgttataatttggtttttagcactttgccaaattaatgaatatttgaacggctatttgaaattctattggcgttcagtgtttcgtatcgtgtgctgttgagcggaaaatgtaaaactaaaactgattttaattgatctcaatttgttttcaaattgttaatataaataaatctgattgatttggcgcattcaagtgcttaaacaaatttcctatttatattttttcaaccatcaatgcactttcagcgcggaaataagcaatttttccgactttgtgtgcactttattttcgtgcttctcatcacactgtttcaacaaaacccgcttgctcaataatttcgagtgcacgcgtgttcaaatgaattgcattggataattgaatgcatgaatgactgactggttgattgactggctggcttgattgagagctgttctgtgcagaatgccacgaattttttcccaccgatatatatacgtaaagggcggttccatgcctttggggttaggcattgcaacgtgggggagcgacaatcgcaacgcctttcaatcaaacgatgcacacaaattcccaaacaaaccgacatccagccacgcccacatccggcgcccccacgacctgtcactgcacgtgacaaatgccgacaaacgacattcgtattccttctccgccattccgtgtgtctctttcggggctttcaatattacagccagaagggttaaaagccagctacctgaagttgtttgtgccccactaatttgccagatgtttccttttatgcacttgcatctgacattctgacaaacagctttttcgcggccaaaatgttgtcctacccaaaataaagaagtcctacctacctcttgcttgctgaactgcatgggctgaataacttaaaaaaaatagctttttaatgtttatgaaggtatgcagtatatgcattttccactgacaatgaatatttgcatgattttcgacgcctttataaatgattttgagttttatgaaaccagaagagctacctgtctagcttggctttcgatgattaatttacgaaaaatttccttaattctcataagctaggtaatcattaatgctatggaatcgggaaataaatcagttgggcaagcttttcctctcgacaaatttgattggttgaaaaactggcgccaacaagtagatttccatcaaagggagagctgcccacggctgaacaggaagaggaaaaatgctttccctacccgaatttcaccccaaaattgctgtcattaatcattcggcttgaaaaaggtgccaagctgcgtggatgtgacgttaatcttcagaggaaatattggtcaaaacgagaacgagaccctctgcaagcattctggcagtattaaccttattttctgctaccatttcgaagctcaatggtctcggactttcgtaaacaattaaagttgtctgcgtgggcgtggcacttttgttgtatggtcgctcctactgacttttgacacgtgtcatttacgtttgaaagcgtcgacgcaacgacaacaacgatgtcaacgtgaaaggaggtgaatgacaaggccagttaatggccatttggccacaagcaaataccgagcatggtttcttggccagatgcaaacacctgaacattgtggtaattaaaataattccttactagaatgttaattaaacaatgttcgtgtcgtttcgaaatatttaaatttaaatgagctgcaaagtgttcaagccgaatttaaatttcctctaaaaaggtatatcctacgaccttcttattccagtttttacattcactccacatgaaataggactccattgaccttacattcttatagattttttcttttcagcacaggtgagctgtctcatcagaaaacgcttaggcagcaaactaaatccctccccatatccttcgctcctggctagcgttatgccaaatgggcagttcttcctccactcccggtaatttatttgcactttgatagcaacaagatgcatgcagtggtgcggtggcaaaatggggtggtggaaatttgtggagtcgagggtgtgaaacgctgcacttataaatcaccgaatggagcagaagattctgcggagctttcgctgctgttgtggcctgcgactgcgactaagcagtttattgaaaagtggacccaaagtgcggcgccataaatatcagctcaagtgggcgtgggcacgcccacaattgcatgcgcccgcttgtgttctaaaagcagctttaaggttaaaatctccagaataaaatcataataacatatttctacctttggacatagactacctaagacttaattttatcatttatcttaaacttcataaattggcaatcacaccaaaatggaatgccactttctagcctatgggtgtcaaggtcatggcgaattgcattaaaattgctcatcaaataacactcggcactcccattcaacagattcgcatttttgatggcagcatccttactcaatgagttgcatttcatgcattcgcttcgatggctgctcaacatgttcagaagcgtcctcgaaaaacgccatgaacagcagtggcaggatgttaagagtccttccccattcacacgaacactagcacgcacacagaggcagctgggtggttgatcaggttcaaagacctgccaaaagccggctatgttaaaagtatttcaaagagtgcccgcatatggcgtttacatgggttccacatcgaaatagagagaaagtttcgcaagagagagaaaacttcgaaaaagatactgtatgcttacatactgcattaacagaggaacgcaaatttggacctaacatctccctcgtactttttaatatccgttagtgcactgtaagctgatggaaagttaaaaaaagtttttccgaatcgaaagaaatgttatgggaattactaaaaaaatatttttaaattattttaatttctgccaaatgctaattgaaataaacaaacattctgttaataaaatttttctggagaatgtggatcatattctttgtccaaagtcctgtcatgtaaagcgtacatctgttctcttgttctgtaaatattccccttcatgttcgaaattcggtctgctaatgttttcgaatgttatgtatggtttctctcctcaaactgtggatcctaaagcggagctcgaggactgttattttacgacgcttaactttattttctcatctctgcgtgtggatttcaacctcatttttcctatagcgagagtttcgtgcttttcactgcgtaacctcctttaatttttttgcgtaggttcggcaactttttgctatcttttgttgccgccgctgctctcgagtcgcaaaagttgttgacaggcatctcgacgcagctcagcttgaaatagtttgcatgaaattaaaataatctctaagatttattgctctagaaagcgcaattgactccagtcggcgaaaacttgctgctcggtgtctatttttgggccattgttggcaagtgttgaatatgctggcagcaactttaaggcgatttatgcaaattaaagagtgagaagggagggaaaattcaactagttccccttgtttatcggtggctaaccagaaaaacgtagcaaattggcccaagtgccgggagctttgttttatggtcgaaaagtacatatttgcgtttactttgcactgctccccctgttcccttctgttttctactttattttagcgtttcccttcggaaagacttttctcagaggaaagagatttctcaagacgttgtcagctcttcaatggtaaatgcagctgccactttggccaacttgttgttgacttgttgccactctgaccgctcggaaggaaaagcggaaatgaagttggcaatgcggaaatgccatttttcatgatttctcctagacacacacatacacacacacgttcttgtcagagagatatatattcgaatggggcttgccgtcttttttgtcttccacttcatctctcgcttccttcggtttgctcctgacaaattgtttggcattgctgggctaatattaacagtgcataactactccacgaaggccaactacatctgggtacatacatacacacatagtactaaactgtctggttatcgtcgttgccttttatctaattgggaggatttatggactgggaatgccaagcaaaatgccaagtcgcatttaaaagttagctttctgacatacaagacttaaatatatttccattacataccacaaaaatcacaatatatcagtcattttcactaacgactgtgcaaagttccatttacgtacctgcaaagaagagagagaaaaaaatgaaaatctattattaacaaacagattcaatttacagcaaatatcggtggtcatcgccgactatttttaatgtctttaaccgagaggacgtagttcaagcatcgatcataaatgatggagtgcggcaatcaagataaatggttccgtcgagtgccggaggagccatgggcaaaagaaattcccgactcgacggccatttattgttccattctcgatgacatcactgcgtatgcgcaatgtgcgacgagacgagtttaaagtggcacaaaaaaaatgaaaacaaaaattaaacaaactatttacaaattgttggacctttcagaggaagtcataaattgaatgcatggcataaaagcattatcgaatatttagagcaaagttcccaactacttctttgctaaaattgctgttcgccggcagatgggcggtaatattcggtgggagtggccctattttatggtctcgaacattttttacgagcacttatttccgccccagaaattagacaactgcttgggaggcgtttatgcccgaaagggtgttgtatcccaataagctgagtctttgctctcttctattttctctgaatttatgatgtgtgtaacaattgggccattgctaaggttgccctcggccatccactcgagtatgtcatgcaaattctgcttattttatctaatacgatttttacgagaatgaaacgaggtaaggattaaactgctcccggcagtggctcaatttttgagcccctggataaataataatttccgtcggggttgtttttcctgaataactctttcacgctgcccagtgttgcttaaaatttaactttccgacatttgtcatgttttgtttgtctggtgttttggtttccctgttggcgcatttattccccagaaagccaaaggatgtggtacgtgcggagaggttgctaagcctaaaagtatgcataactaaaaagagcacgtttcacagataaccaaacagcaatgggggaagaaagagcaagaaagcaacggacaaaacaagacatcggtaactgggtacacaaggaaaaagcttaaaaacaattaaattaaaatgttgaatgcaccacgctgttataaaaacagctgtattattctgaatgaattcattcatcctacggattaaatgtatgttgtcgaacacttcttaacacctttggaaatgattttcagatcctggtgggattatctacatatttttttgacaccgtacatttctaatccattattttttccagtgcctttgtatctgtgtgattttcggtttgcccgattgtgtgcgtgtgggataacagatatgtttgctgtttaggcaaatgatttttcgcttcgggtctgtttgccaatggagcggaaaatgcaagccgaaacgcagctgtggcaaaattgttggcatttaaatgggtcacaaggtcgaaggcaggataaaaggagcactgctcaaagccaaacaataacaaaggccaaataaaatgagttgcccagcactaatgcaaaacggaattcagggaaatagtacaataggcgaggaggaaaactccgccatcgtggaaaacgaaattgcacacaaatgcagtcaaagcaccgcagaaacttcaatgcacaataaatgcgaaaggaagaaccaaatgcaaatatcaacaaactataatgcagaaaaggaatgttctcagcaaaaccaatgtgaagcgccaagagtgacaggcaaattgaacaaaaggcacagctatgcaaaggaaaatctcagacatcaaaaggaggtacgaaggaatacatcaatcctcaatcatcaagaaataaatatttttgagtaagtcgagtttatttttaacctcatagaggtttttatttaatcactggtcacagttacaaataagattcattgacattttagcttgaaactttattttttaaacgtgattagtagtgtataaccaactcccctgtcaacgacttttgattattttccagcttccgagtcatttcaatgctatgaatgaaacgcaaccagtgatgcctgaaacttactcaatttcatatgtaaatacgtgcaaagaagatactcctgcaaaaacctgccacagatttacaaattcaactttcagctgctagctaaaataaaattttatataccacccacaataaaaaatacatatatatttgttggcgatgccacgtaaaaacaaatatggcaacgtcaattaaaaacaataaataaagtccgaaaacttttgcattgctgaaaatgaaaacgaaaccgatgtcgaaaacaaaaaaattggaaacggaaaacaaatcatcgcacggtacaggcttttaacaatagtttattgcctcttctctaaacaagatcccagccagcaaagcctgtttgttttggctagggaaattgcaaagccacaagctgttgccaaaacctggccccaaaaatgagccgccggaaaagcgcccagcctcctgaaaaccccaaaaaccttgccgcaactttttcgctcaacatgaatatcaatatttgtaagcaactgtggtaatttacgtatatatcacgtatatatctgtgccgctttcccttccccgaacaggcaaggaaactttttaattttcgttttcatgaccaaaagcccctgtcttccttcgcgctcatgttgattgcacgtcactttcaatgtggcccgctagcgagtctattttttcgccgtttccatttaccacgagcttatgcacggcctagtgacgtattaaacaattgaaaagcattttcacagaccgccgcagtacaacaaaaaatacggcaacatataaaaaaccgtgatggccatgagtatgggggtgcggagaaattgattgccatttcaggggcaatttttaatgaacagcaaataacaatgctgccaaggcttagccattgaaatgtgtaataaatgagaaaaaggaaccactgctacaatccacaagttgcaaatcaaatttggaaaattagatgtttgacaagcgcttaattgttcatttcatgaagcggcaaaatgcatttatttttgatgtgggatgttgacaactttgtattggtatttttgttgaaattttggcatactacaaggccagattaaaaggtatttgtcaaacgtagtcaatgaataaatggttggtatttcaacaatttaatccaggtcgatttattctgctttccagcaaagtaattctttaaatcacatctaattcctttacgattcgattcccctgacatccaggcctctgttctagtctcgtcaacaatccgcacctacgtcaaatatttttccaaccagcttaaccattcaaactcaggatgcccggctgacgaaaacgtttttgatgtccgccacgccaaatgtggcaaatgcctggccaacattccgcatacataaaatgccccaaatgcactcgactaagcacactcgcccacgcacacagtcacagtcacccactgacacacaggaccgaccacccatacagccgtatttactcactcataccaacaggctagtaaatatttgctaagcgaattcgcttctggtttttggggaattttgagtcaaatttatttgctgccatttgtagcgaatttggatgacactcaagaactcaacaatttgtttctaaactacattatgcgttttgcaatcttggagcgataaaagttagccactttgcataaatattaagtttcaaataagatactgaattggacttcgtttcgaatgttcaagactcgcttgtatccaagtagcgattctgtctcttgtgacatcaaattcgaaatgtatgtttctgatatatattcgtaatacgagctgcttttaaagaaatacacgaaaaccattttttgataacttatttttagtataatactgtttatgaaacatttttaactgcccagcttacagttactgtcaaaagtgaccgcattttgaattttttcggttttcggatataaaaaatagctccgaaaatgtttaatttgtattgctcacctgaattgggtccattgctgttgggtcgagcagagggggctccatcccgagcctccacttcgagggcataggcgcctttcttctccctgtcgaatacggttttcgtgaagatctccccactttgcagattgatttcgaagaattccttgccctcgtttcgcggcgaatccacaatgtagtagtagacctgaaagggcgaaaagcacatagggattctggcttatttctgctcgatactctggctaattaaaacatggatttgatagcaacacgcataacatcaaaagaaggcaaattaggaatttaactcgggtggccaaagtggggaagtgagagaatataattactgcttcggactttaaagagagacgataatgataatcaaatcccgagaccgttttgggggaaaagcgggctataaatgaaaacgctaattagtgcggacatttcgcgcgtacatgcaaattacttggcttgaggacacaaattgtggctggctgaagactaaaataaaataaaaaaaaaaaaaaacaaagaatggccagcgccaaagtgccatattattataatcgcaaaaggggcttgagggctctgtctgaaagaaccgacccatctccaccaccctttcatcacaaaaagaaatcaccctgcggttgtccgcgttctgcattctgcattagtttttttcacaacgccctccttattcgtggactttcaccaagggcttagcacacacttggaaggcgtgcaaaaatgttaactctttgacatttattacccagctgccagctgatggccaaatggacgaaggacgtggtcagcgggaagcagaaaacaattacaaaagcgtaaaagggttcgtaacagcagggtgatacaaattaagggggggaactaaagaactctaggtgggtcagaaagtgagtgaaacatgaagacgacgctggaaatggcaatttaaagggatttatgaaggcttctttgaaggaatttcaagataaaggctcttgagagggtgctgattttgtggaactaccgaattttaaattataaattaaacagcttgaaattcaaggttaaagctgaatgcaggtgattgcatttccgcgctacaaattaaaatttaacatttttataacttataatagtatatagggtatatagggtaacactctactgctttttaactgagtttcagtataaccagtcttcgattgaaacaatcttctcttgacgactccgtaatcgtatctcatccactttttatttggatttttccgccagccatttcgttcctttttattgttccctttaatttgctatcgcaatcgtctggcatttccgtcgatttgacccgatttccctccatttcgaccaccccctgtgaaatggttctgatgctcacctgattatttggaaatgtgccatccttgtcgatggcgttcacttgtgtcactttggtgccaatcggttcgccctcgagcaccgtttcctgttcgcgttcggtgaataaaggtatttcatcattaacatcctcgagcattatgtacacggtcgcttccgaagccaattgttgggccccgttgttctgtaaagagaagtgcgggtgagaaagtgggaaaaccaatttaaaaagggtatatatttgatttttcataacttttttcccgatcggttgagtgtttgctttttaattaagcaataaagtctgcttaatgagttttgctgctcgcttttgcttttgacaaaatatttttgttttaatttgcactttacctcggctgataaaaaatgattaaaattctttaatgttgtcgaataaaattatttacaagttgaaattgttatttgtgttgatgagtatctatgggatgtgtcggtttcaccctttgccagatgattgattacacacttgccatcaatcaatggaagaaattgaactggcaacttgtcatttattagttgttttcaggccagattgccgattggtccagctaacattcctgcttatgacgtctatttgcgcaatatttgccattcacattccggcattacgttattaatcaatgcatatgaaatcgatatacatatgtgcaaacacatgtttacactaatgtgaacagcagtggggatcctgatggagcagagtgccaatatgaattatttattttgcgtttattccattttcttgggtaaacacgagcagtaattagacttgttattgaccaagtttgggtcttggctgcagaactttgatgagttgcaagaaaatctttaagccaatgcactatatttttggtatattaaattatttcctgcttaatatagtttagctgtttaatgtaagcataattgcgattttacattattcaagaattttagcaccaaccgcaggttaaacaaaaaatatatttgacatattccccaaccgcaataacgatagaacgtgaattaaaaattaatacgaatgtattgtcaaactaatatgcggaaatatgtatattcacggcttccccgaaaccgcaaactattttcgaaattcatttagaagctcgtattcctgtccatcgggaccattagcttttagtgggtcatttgcaggcaatgaagctaaagcccagtgatatttaattacctgcacatcgagtgcaaaatggtgcaaatgccctttgcaattgcatttttataacatttcattaggctgcggttgccagcggaatatccattaatatttcagcaggcggtttgtttagtctggcacacagtttgtcctttgctgaatggccaaactaatgaggaaatgctgaaacttgacattgattgggaatgcacttgattaccgttgagtcgcgaactgccattcagtcagacagtcacttcgtcggaccgccgccccgtcactcaatcagttagtttctaatgaattcgaaacgaaccagagctcgcatttgcattttccggcaaggaaattcgcgcaagtaattaaaacttttcaaatcaaataattacaaacgtatttggaagtcattctcaaatacaaaagtcaaatacatgtctaattgggcctaagaccgactcgaaaactttcgactgccgactgaaaattgtgcaaacatttaccaactttaaattgaatttccttggggtttctgcttctttgcaaattttgcatgtggacaaacttacctcaacacgtatggttaaattgtattccttgatactctcgtagtccagcggatgatttacttttatatcggcccaagtgtcgccattgtccggtctttgttgcaagtaaaacgtgtgaaacttgttcgtttgagccgttgacccgggcatcagtcgataaaaaactgtgggattgccttcgatacccgaactgcagacgttgaggccaaggatcaagtgtaaagtgtttattgcattagtaaaagggcattgacaatatcgtaagtacgttgttagatacttgctacatgaaattatgtttatactacaaattaaatggttaatatatattaagtttatcaaaaatcaattggttaaatgttgaaaagagcaagagaaggacttggaattgaaaaaataccctcctttctcttgctctcaaaaatacattcatacattcatacactcaaaaaattgccgctgtttgaggcacatgcgacattgcaaaatacaaaaagatgacgcatgaatgcaacttttgctcttaactatgtgcagtaaaaatttgcgttgtgtgcattaaaaaatcgtacacaacagaatttcttgaagcgtcttttgtgcgattgataaggtgaaaaccgaaaaaaacgaaccgaatcttaagcaaatggcctcaaaagtctaattgccatttgactgttttaggaatgggttcggcatttgataatgaaaatcaaattaggcgcaaaaaagagcaaagtatatacgcaatgtgtatatgaaaaaaatatatattttatttgaacatggacaacatttgcagctgacaggaaaaaagccttaagaacgggtcttaagaataaatgaaaactgtcaggactgcgcaaaatgttgccaaggacaaaaaaacgacacaaaaattattgttgcgaacaaaaaaattcatggcggaatggtgggtgggaaaatggttgggaagtttgtggattgcatgaaattttcttggaggtttcgtattgttttgtagttgttctgtgattggatggtgtgaatcgattttaattttattaattgtgttggtaaacccaaaataaagaaagtgtttcaaaatgatgtacttatttgcttctgtacactgagcacataacgtaaatgttgtaggttgtttgcagtttgcttaaagcctaaactagttcctattggcttaaaagaagtatgttaaatgataggattataatcaacatttctatctaagagatctctatagatatatatgcgtcttatgccctcgaccttgttgcgtttgttccttgagcccttaaggactcgcggcgcccaagaacaagcacaattatgatgatatacgcgcacactggggagtccttcaaccagccctcccccaaacacttaaaccctctcctaatggggcccaatgtatatatacatattgttaacaaatttctgtgctgggacatgaccagataattgcgaagaagaaaactcaggatgagaatgctttttattcgaaatttaaacacataaagaacagaggcgagaacagaaaacagaaagcagaacccaagcacgtttaatagattgtaatttccttaatattgcgctgcgaacagaaatgaggtgtacttaagggcactaaactaacgctaaacagcagatacagatacagattcagaatcaggctcaggtgtgtgcaggtgcgtatgtgcagtgttttcactttactgtactatactctatttacgtttgtttttatttgttttcatttgtttttatttttaacgtgtcctttcggcttaagtgcatttgctttcagtgcggcaagatagacggaaaagtgcatggtaaaaaatgggattggataatataaaaactgactcggactgacgcataattaaaatgccagtgccatgtggctggtttgccacgaagataaaacggtgcccgcggagatgcaaagcagaaaagtagtgtcgcgggggtcaaaagtcattaaagtccgttgcttgaagttttttaattgcaattataaaaaacaaaactttgtttaaaataaactttccattttttcacaacctcattttactcttcagcaggcgacttgtgtattttattttttgccccccggcttccactaagtggcaggtaattgaaactgacccagctcatcatgcggcaaaggttggcgacaaagccgacttgtgtgccattcgaagtttatgcagcactttcatctggtcaagaagaaaaaagtctcattttttcacagagcaaaggtttaagagtttcatacccaggaccagatttttttaggaaaaggtttcatacaaatttttcatataaaaacattagaaaatgtatcttctatgttttttacaaaacgttaatgctatttttcctaggtcctaaactaagattaccctttgaaaaatatgaaattgggtattttcggtgaaagctgtgtatgattcagaaaacttttccaagacataaaaaattcatactttagtataagtgcagtgccatattttaaacagtatttttttattttttctgggggcttaatatacctgcttctcactacatttttagtgtaataaaaattaattcttcttaaaaaattgtttatatataattaaaaatatatatatgtgctttttaatatacatgtgtgacttgtgcagttttggcatatatttggtgtatatttcactggtgcagtttgagtgctttatataaatgatggggctctatgggaagagatgatattggggagggaaactagttggacgaccacataaaataactatagaccaaaagaaggtgttaatgagttttgttattcaaaaacactttcttgaggtcaattcaatagctaataaacatctatagcaaacattcagaacacacagaaattattgcaagacatgacaccaataaccaataatatatgacaaaaaaaaaaaaaaacatctagaatcatggtaagaaaaaaatgcagttcttaaaattgaactaagcaaaattgaatgtattttgatttgattttttttttaagataaacttttttgcacgaaaaatgaacagacctggctttgatcgagacgactttgccgccaacgggcatattttccttgacataaatgggcccatagacagtatgatcccagacgggcggattatttgcacgatcgaccacatcgatttgtacttcgacagtacgcgataatggcggatagcccttgtcttgggccatggcctctaacttgtatgtctcgcgctgtattttatatacatttcacgatcaatattatcaaaaatcgtttgggtttgttatcaaaatcaagcaaggcgatgcaaaaatgacagtcgcgtcgatattggttggtaaatacgacatttgttcaggaaaaaggcaaaaaacaaaatgatataatatagttggaaccttttatgtaaagaagttctaaaaatgatgtagttataatagtagatttttggttaaaactcaaaaataaattgtaaaccaacaccgcaattaaataagttataaattaatcgaaaaacgggaaaggaaaacattttaagattacggtctttataaaaagtatttcaaatgcagtgcagaatattttgtaaagtctcgaccctagccttcgaaaaaaaatgtttaattatttaaataaatatttatagctttaaaatgaaaatgtcaactaaatatttaatataagaaactgatattgggttttgtgcatttaataagtacaattttcatagcatactttacacagtttgctgcggtttttattcttttcgctttcgactattgctttttaacatttttgaacactttgtgtagttaccttgctccactagcttacgactaaactgcaaccttgttttgcttatgatatatggcgcatgtctaagcagggtattttccaaatgaaaaccaacaccaaaaatttcattacgattctcacaattccaggcattaattcatgtaggggttttgagtctttttagggaaatcacagatccaatgggtgatgtgttttgtttagtatatagagaaagaaataagactcggcaaaatccaaaaagattctgaggagcaaccatatttaaaaaacgaattgctcgattcaaaatcaaatacacaccagcaacaaaagattgaaggattttgaatttttgcacttccattttcgattcggtttcacagattggtcaggacttttggttgctgcattcggtgagagctttacgatatgccaaaaaaaaagggatttgcattccaaagctcacgtaacagtgaatagaccgtatgttcaaaatacttgaaagcttaatgctaggtttaggttagccgattgttattccgctggttcaaaaaaatgttatctagactatgttaaaggagaccgacagctgttagactcgcaagttaggtttagttttagttttaatgttaggttgtgagttctcattggctatacaaaccttgccttaaccgatgttacaaccgtacccacagtgacattctcgcgtatgtgaatcggcccgtaaatgctcttatcccaaatgggtggcttattattccgatcgacgacatctaactcaacatcgacatcggctgccgaggcgggagtgcccttatcggaggcactaaccctcaatcgataacggtcacgctgttgaatgatttgattgagtgggtgaattttgattgaagcagtacagaacagttagggcgaaaatgttagcgtcaacagcacaacgggagttaacattgcaaggagtagtcgagaaccgaacccaaagtgttagcactggttacgttttggtttgtgtactgagtttacgttacgattacgtatttgatggcatcgttgttcaaatcgaaggtgttacagaaatctcttaggtttgaaggatccgccttaactaatgaccaatataatcctattatctgaatatattgatgcttgtaattgctttctacttgttgtggaataataaatcacaataattttactgtataattttagagagcattgaatggcttcaaaaccgaaggatttctttggcacctccaactgtttaaattaaatccaatgattttagaagtataagaaaaattaacacaagatataaataaaatatatatgcgatttgtaacatttgggatgggaaaggatacgtttataagtaataatagtgtttcaaggatcggtggatcggttcacataaatgggtggattcttttgacgagactattatttgcattattctgagttaccctacgatgaaatgagtcctaaattcacaactatttacatttaataaaatgcaacctgttcctcgagttagtttcgattttttatgttagcttacagttttggttttttaactgcttaaaggggttagcacagtaacagtaattgcatttacttactggataacaaccctaaattgttgatatattttttcagtaccattatattggatatgtaaagataaattaaaatataaactattaaaatgcctaaatcgtattccctctcaaatggttagttaacaaataaaaagcaaataaaaatgtaaagtgcatttaaaataagaatataaaagtaaatgtttcctatcaaaatcctgtacaaattaggccacatttcgcatgggcatgcaaaactaaatgttcttcaaaaatccatttaaacattggtttcaaaaatataatagctatagcataaatacttaagctttcagcaagagacgttcaaaaaattgcatagtctcgacaaaaagttttttttattttgctttgggatttgttgggaagatatttgggtataaaataaagagaggcaatacaaaattatgctgttttgaaagttcaactaaattcaaaatatttaatggataaaaccattaaaataggttccaacgatgctcaaaaatattcgtgatcgtttcggggtatgcgcttttattatatacatttttcttaaacctataaacctgtcaccaaaaatagctgaactgttataagcattttcataccaacttctctcccttagttttttttttcttgttttgtgttagttttgatttgtttcaaaaaatgttaaaaatcaattcgctctttggcatctgcactcggtaagcttttgtttttcgccaattttacgcactataaactaaacaaaacaatttgaataaactaaaaatattattttgtattttatttttatagacgcagatctccatcgatgtggcaaaaaacttgcatcgctgcatatcaggctctattgtacctacgactttttgcggtcttgtaagttattgaaatacaaattaaaagaaaggtgcagtttgaaaagaaatcaaaagcaaaaagataacatatacagatatagatacaagccgcttgagctgtctgaacttggtagatgctaagcatctgtcactgaataagttagtaaaacaaaaagtttcgttttttgaaaataagaactttaaattaaaataataagacttggttagtagggacatggcaaactcataattggggtaatcgattcataagttcataggctaaatgaaaagcgaacacttacgtcaagcggcttcttgagtacaatccaaccggactcagcctgaatctcaaagtattccagatcgttgggattgaagggagcagtcaggctgtatactatagctccattgttatcggcatcttcatcggaggcagagacacgaaggatgtttgtgccaatgctggcatcctgctttacattctccacgtatttctagaaaatccgtgaatgtgtaatacattttaggactgatcgttttttttatgactcacctgtcgatcgaacagtggcggattatcgtttacatctgtgatttccacggtgaaggagcagacaccctctagactgggatcaccctgatcggtggccttaactgtgacggacacgaacttgccatcatctccctcgcgatcgaataccttgttggtggacacctctccggtctcctcgtccaccgtgaactttgtgcctttctgatttggttgctgaacaattgagtatttcacctgtcgaaaaacatgcaaaatggtttagtgattgattactattaaagctgccgaggcactcgacctccacacacgacatgcactaagcagtgcattgaacttggtaggcacgaaaagaaaattatggctaaatctcgtcatgaaatcaccctatcgcttccacacacatgcagttaattcaattaggtgtgggtaatcatgtttgcgttggcctcaaaacacaaataacgtataattaatcaggtttggtgaccgaaaggggaatgtaattagggaaaggataatcaaaagaggtattaaagtggggattgctattacaagtatatagtatatgcatctaaattagttaatccgaaaatgagtggaagttttccagtgcttaatcgatattaaaagcagttgatatcacctgtggggttttgttgtatgaaatattatgaaaattatatacatacacacatttagaaatgttatctagtgaaatgtttcaatgcattcttgtgttgtcttattcttgatgtcttcatacaacaaaatattttagctacaattttccctaggaaacaatgcgggcattatattatttacctgtccattcacacccttatcctcgtcggtggccacaaccttaatgacaggacttccattaggagctccttcctcgactttcggataataggtactgcagtccttgaacactggcttattatcgttgacgtcggtgatgaataccacgaccacagcagttgaggtgtggatagtttggtctccattcacacaacaagatccatcgtccatggcggtgacgttcagctcgtacttgtccttgtccagggatatggccttattatgcagtcggataacaccggttatgtcctcgatgacaaactgacccgatgaagtgccgccgcccacgaatccaaaccgcacgttatcaccgtccttgtcggaggctaccacagtggtaaccaaagtgtttggcccggcattctcatccacattgggggtatacacttgctgggagaacttgggctcctcatcgttcttgtttttggtgtaaactcgaactgtagccactcccgatttgggcggttcacccttgtccttggcagtcactatgaactcataataggcattgttgttgtccgcatccagttgcttgttgttcacgatgattccgttcgagtccacggcgaaatgatcatcggatactaaatattcgatttccgcatttgatccggaatcggagtccatggctttaacgcgaagtatgcttgttcccagcggaatgtcctcgtccacattgtgcgcctggtagtcgggcagctcgaacttcggcgcgttatcattcacatccgtaacgcgaatggtgagctgaaaaataatgtaagttagtttttgaattctatatttaaagattttactacttaaaagatttttatatgctttttaatacctccggcttatgtcattaaattttatttaaataactaaggccaactttaagctcctttcacaggaaatatgtatgataaagcttttcttctcaatcttttctgcgacttaacccatcgaaaagaatatgtcatttactcacatcaacggaggttgaaaatcctcccgaatcctcggtggctgtcacaatcagcgagtacacgtgcggctgtcgcagatcctcaaagtccaactccttggccaacttgacaatacccgacgtgggtccgatgttgaaggtgccggctccttggccctgggccttcaaagtatagcgaatttcgcggtctgcgaacgacttggccttaatcgaaatgatgctgaaaggatacggatacgaaaaagttagcaaagggaaatttaaaatttgcttgcatattttatgtccatccacagaccaaaccaagctctgtgtgtgtgcttgtcactcgcaccactgccttttgacagttgttttcccagcggaatttcaatgagcacaagcccacatacacagatcaggtcctacacacgcacactcccacatggccgtctagttcacattgttatgcataacttttattggcagcacaaggaaatttgcatgcacttgtccaaaaaatgccaacgaaacagcttgctctgttcgttcctttaatttacgtgtatttttttaaaaacctttaaagttttctaatatttgtggtatcatttaaatgatttcagtccaaatggatgaaatttaaatgtctttagagcataatttaaatttgttttattgtgatttttcatagtgttcctattagcattttatgggcactgcggtatactttcctactttttttagacttactctgaatcctttttctggttttccgggatctcggcttcatagctgggcatatagaactgcggtgctcgtttgccgcccacgattgaaagtcgctcctcgggagtactctgaaacctgcgatcatcgacctttccgttttgatcctcggccttcacatacagcacatactccatgtccagttggaagagatccgtgcccctggtccgcacgacaccagaacgctcgtccacctcgaaacgtccaccagtccgatcgcgaacgatgaagtagtggatattgtgatccgtatcgggatctcgggcctggagggtgaacactggagtgttgggtggtgcattcagctgaaccaccgcctgcatgggcagtggccggttgatgaaataggggggctcgtcgttcacatccttcaccaggattatcacacgctggttgtccgtgtacttaatgccagctgaaacacacacacggaaaatttgtgaaagggaagcatgagacattttttgtgttctctgttggtttgtttgggttttggctttttcgggcggttgccgaaacttttgccttttgttatttcaactaatggatagtaagtaagggggaagcccccttttgcaatttaagactgtcgggtttcggttgagccattgaaatgcaatcagccggaaaagcagtctcaaggcaaggccaaagcctggcacacacgggtttcgctctaaggccgcactaaagtgttgaaatgattattatatttaaatttaggaaatatgttagacactacaactacaatttaactgacaaacttagaccatttgtcagttgagtaatttattatccaacatttacatataacaagttatatttctcttagcaagctttcgcatctaacaagttacttatttgaattccttcagctaacgaaatgcctcaacttttaatttccactaaacatgcacacaacaaaatggttaaagctgaaagaaatcaataaaaggccaagaaggacggaggcacagaagtaatgcagggacgcaattttttttcattgtactaccttgtgcaaaaaatgtctgcaccggaaaattccaatcatgttgttgggctcctccctatttttgctttttttttttttttttttttttggttaggacaaacaagaagcggtaaacgaggggaaccccaagcagacggacgcttattagaggcgtgtgtattttttttcgcagctggggggaaagtgtgggtggtggtaggttggctgaagtagcgggcaaataaagcagacgatttacctgcccccttaaacaacacagacaaattcaagcgatacataaaaagtggcagcgagaagaaatacaaaggaatggaagcgaaaaagaagtgaaccaaaataagggtgaagcatgtgtaatttctcaagagcagcaaagtgaattgtaaacaggtagcagaggctaacccttaacccgtgtaagcaaatattgcaattgaaacaaagacgcaaagacgcaaggcggcgaagagttggccaaaaaagaaaacgctggaaataaacagcattttcgctcaacagatgcacagaaattgcatgaaaaactttttacccatcgcatagggaaaattcaacggatccgggtggaaaagtgagagggcacaacttggcaaagttattttctgattcttgccaacttttgttattttcctgccagcttggcattgtaacgcttttctatggcttattgtgctagtgccaagcaggtaaaaaatcacaaaaaaataatgccattttccacacacatatataacttgaaatttaaataatacgaagcgagttttattgttatgactgtgtgtgagcggtactaatgtgcattgggttccttcatgaggcacgagcagcagccaacatggcggatttccgtggcgacaatgcacacgatggcttggaaaatggtcggtggaaagcggggaaaatgccttttgtagtctggcaatagaatgtgaatgtgcggctggattaaaatgcgaagcaagagcaagatggattttcattatgttcggcgctgcaatgagcacgaacaaatgtgatttgtgattaagttctcacggggaaagtaaaaaaatcgtcactatttgaagcactttcaagaactgttgtcgttgagcacattcattaagagtgaaggttttatgtattccagagtttctaaataatcattcattattccacccttactaacgatattgcttagtatatgcatacatattcaagtttaaaagtttcaaaaacacatatgtgaatattgtaaaatgttgcatctcacttttagaccttagtaacatttgtaatcaaatcataatctaccctttagttcagcgcgtgcttcctgctcaaggcatttttagtgaagtatcctacaatttacacccggaacatgtagtaataacgagccatcatctttgccacttagcctgcgcacattcgtttcaatttaatgaaactccttggcgcttcccctaaaacactttcatcgcttcctcaatgcgagtacctatatgggtgtagccttctcttatcaaaaatgccataagtatacccgcacacatgcacattaagtgactgtcacacgcgctgcgaactgggggatagatccttgaggagtcaaaaccatgcagctactataatactcgtaatcactgccaagggatggcgtttccccaccccaacgtactcccttcgcagtcatagccatagccattgtcatcataagctagccagggggatgcagtgccaggatcccaaggagatgcgattaaagggggttgggatgcatgcaaacaggggcgtagctcaggggggcagtcagaggttagcactaaatgaaacacccaaaagcagacggcaaagattttgtaccgcctttgtctccattcccgtttgcattgcacttcagacgcgcttcggtagtataacgaaaaaaaaaaaaaacgtgcaaaaatggtggataacatattctgaataacaggataactagcctttgataggcgaatttctattacccttacagacaattatgtaccgagtactgacacaaatttgctaccttctagtcttactgtgctgctaaaataaactctattctatgttttagctaatgaattccattatgtaacagagcgatttatttagattaaataatgtattttttaatgtattgcgtatgcactgtgaaggctgaagaaaatgataggcaaagtgccacgaggttaaagtttctaacaactgaaaactgctgcggtagcacctatactcctctctttcttcctaagtcacttcatctctttcccttttcgaggagtgcaggaacaaaacaaaagtccagaagaaaagtgcgagactgtcgtcgtggatagaacaaacaaagctgcttattgtttcaatggattaagtggaaggcggccaaagtgagagaagctgcactgagcgaaaaatggttagctcgtggagctcaagccaaagggaaagagacacaaaaggcagctgctcaacacagctcagacgattttcaggggatgtggctcagcctcggtggtgccatcttcaagtgggtgccagcttgaatcttccaagttccatccacttctaaccgccaccccaagataccaccacattttccattgcggaagcaaacgaatctgtgagatgagcgaataaaaattgaatttgttaggcaaattgacatgtgaaacttgtgctacgtgctgcattaacgtcattttcctctatgcaaatataatttgagagtttacgtttcgtggaattacttttgatacgtcctttggcggataatgtggtgttattgtattctgcacgctaatgatttatgatttcaattattattatataaattcatccttttatgtcccgtcaatcactaatcaaattcataatttttcgctaccaataatgaaaacatcgagaaagaacaacgcatcaaccactcgcaaaatgttctcaatttttcaccgcaatttaacggcaacttagcctttatggcattggtaaggggacccagacccacctttatgacacccccgcgaagcccgaaagcagaacgatttacaccccaccgtgttcgacataatcaagagggtcaaaatgcggttcagtttggctcggttcgtggctctcggcttgattaaaatgcagtcaagtcgaaactttattctttggaccaagactcaggtacgcgagttccaaatgaatttcttcatttttcgctgcggtttgaatggcaaaacttggcacgctggagtcaagggtcgtggataagaacgtgctggaaatacaagcacaatgttgagcagcagttttcccccgaaatatttttatggctgctgtaatatttcccctttaccaagggccaagagccccatgttttttatgaccatcctttggccatgggcttaatgaagctgttaacaatggattccgggggttttgagcaagaatgtagaaaaagccatggccaaatattgaacatacgtattgattgaagctaattcggattgaagtttctcttttctgctccgctatgattgcactagaggaaagtagcagagacccgaggaaacggtaacggggggaagtataatcgaatctgagagtttgggcaagctcatgggattctgggacccactgcaactgatggaaaagaagttgaagttgaggaaatgaatcaaaagaaaaacttttgccaaataatgaactacaacgaaatgttcttgttttgtttctttttgaaaaatcgtttgtgatgaataacctctcatctggcaggggaaaagaaaggggaaagaagatattaagtacatttcattgtagttacaaagtcagaaatggattgaatagttaagtttgaaattttattcctttaaaagaaaacaaagtaaataactaccaagattttctttaagaacctgatttttcccgatgaatgacatacttgcagtcattacaaaatttgtctctgcgaattgcaagctaagaagcgtaacttatggcatatccatccatgagatgcagcctccgcggggagtcctcaatttgagatgacgctattgagttacttaacagccaagcaaatgagttaacacctggacaggtagaactaagagtgtgccactgcaacggaaacttgcgaggaatctgaggtgtgacaacgagtttgcctgtcgttggcgtttgttggaggatggaaactggggggggggggggaaaactgcctgctttcgaatgcaaagatatgcaagactgcagaaaatgagaaaaaatagagaggacggaaaagaggtcccgcctgtggctctttatctgctgtgcctcgttgcaggcaacaaattggcagttgcagataaagataatgttatgacttctgttgccaccgaacataaaaaccagcactttatcaggtgtcatatttcccgcgctgcttctgataaataaacttggcaatttagatgcacagtcctatgtggacacattaaacggggcgaaatgccatttgacaagcttaggcgaagacacatggcccctcttcgcttttcgccaaccatcgcagacactttaattgccaatttcagcaaagaagaaggatgggcaaaaaaatataaccaacattaataaattaatttgcacgcactggcaaagaaggcgagcgatgagcgccacgactcaattaaaatgctcgtaatcaacttggacctatggcgcatatacgacacgacttaagggaaatgaatgaaaaggaggctaagctaatgacgcttttatacggaatgacattctttggatatacaacttagcttataactaactgattttaacgtatcatataagtcaccaaatgatttatatccgttggcagaattcacttaaaatttcaattatcttttcttgctggcaaatccgctcggaaatcttcatcgattaggctggcttaaagctaatcaaactagatagcgatttagccgcacttctcctttgttccacctgactattcaccattcttttcacccagaaactcttttgcatacacaaacacactctgaagcccgagcaaatgaagcgaaattgcgcacatggcggacattaagcgaaaattaatgaaattttccgatggcgcctcgcctccagtgtagacgcagtttagccgagctttatcaccgggttctaggtgttccgggtgttcctgttctcctgttctcctgaacgagcttcatccaatccgttgttatccgggggctgtcgtgagcttgattgagtttgatggcgattgtgctgcgccaactgcgctgccttgattgcaatttcagccatgatgttacccaccccgatagccaaaggcgtcaagtcacgcccccctgcataccaatcaggtggagattgtggcggtggggagcgggcaggggctggtagcggttaggttcggaggttgcaggttttcccccatctcaggtggcagtcagtcatttaaggcctctggcagtggcacgagacattagtttttcccacctccgctgctccttttgcatgctcttagctaagcacaggactttggcttttgattgatgagcaagccaagcagaagttgactttaagttaccaacataaatttcactttggtttgaggcagtcggctgccaactaagtgacatagaaatgcactgaactgtgggcatcgccgataaaataatgtgaggtgcacagatagaaattatatagggcatcgaagccactgatatcttaactaaaatcattgaaatatgttctctaagcttaaataaacttgagtctttaaaacaacacttataggggtgtctaaatgatttcgactttgttattgatagtattttataggatacttttcaatttcgttgtattcttgtgattcccgatacaaatactcgactattctttgagtgtacaaaatatgaaaaatattcttcctcaatttcattgatttgaatcatgccagtcccccagaggtgcataaatcaaaaactccacgccacttcattaggatttctccccacgttttcatcactcctgcacccctaaaagttcaacccgggaaaaattatagtttgggtcataaccattaccgcatttaatatgcatttttatgagccttactttccaataataataagcagcggctaaagcgggatgccataagaaataatgtgcccaccagagaactgcaagggtggcacttttttaccactcgactcacaccctacaattttgtgtgcgggtgctactcgccacgcacatcgcgggtacttacaaacacacagtataaatctgaacatgcagacaagacaccccgttgtgtgcgcacccgaatcaatacggtgttttgcgtcgcgggtgccgctcacacagtgcctaaaaagggatgagtgagaaaaacacttgtgggtataccgttaaacacatgggtgtttccaaaaatactcgggtgtttccaaaaatactcgagtggtctcgtaggtagtcgagtcaaatggcgccatacataatgattgttgagttcttgtgtctttggtccagtgtctcggctgttaattgccccttttttgttttttacgatgcaattactagcttgttaggattcagtattatttggaagccaaaggaaaaggtcacaataatggcagaagcggctgatttcgttaaaaataaaattaacaatggaacatactcagttgccaataaacataaaggaaaaagtgttatttggagcattttatgtgacattttaaaggaagatgaaactgttctggacggatggctgttctgcaggcaatgccagaaagtgctcaaatttttacacaaaaacacctccaatttatcccgccataaatgttgtctaacattaagacgaccaacggaattaaaaattgtttcggaaaacgacaagaaagtagctattgaaaaatgcacccaatgggttgtccaagattgtcggccgttttctgcagtaaccggagccggatttaaaaatttggtgaagtttttcctacaaatcggcgctatctatggggaacaggtagacgtcgatgacttactacctgatccaacaacattaagtccttatatttaatagatactttttaagcccactatgtttttattatttagattgagacattaaaaaacgtaaaaatcaacaaatgccgtctttaattgcaattactttatgtgtttgaaatgggaggcacccattgagtccatcaaagagcaaagacatgagcacaaaaattttcttgggtattcccttttacccttcatttcttatacccgtcacgcttccacccatacaaattttaggcgtacaaaaaatgaccagagaactgcagcccgcatacaaaaaatgacctgcggccgatcgttgactgtgcgtccactcacccatacggctcttgcgcagcaggcctcgggtggtttttttactcgtaacaaaaacacaacgtcggtaaaacactcgagtattttgtgttgccgcaagtagggtgtcaaaaaaaacggggtgcctagagtaccgagtgtttatcgggtggacgtagagtgcgagtggcgggctgcagttctctggtgcccacacacacacacactcacaaaaagagaaagcactctcagataaggagcgcgcacaaaagtatgctatgaaaaccgtaatcataatcgtaaagcttagcatgtatatattctggatcctactgatttgtgtttcgcatgtgcggcataccaaaaaacgagaatagaaaggaaatctctgcctgaaatcgagccactggaaattgctcaaattaaatgcaaataccgaaaaatatttaaatgtttcagcgcattaagctatgtaaattgttgtcgttgccgctgtccggggactgacacgcactttccattcaataaaactgcaaccacacaatggcacatcaatttacacagactctcgcactgagagggcgccgataaaatgggatgtggggctggcaagtgtccagatcacacaacaacatctggcatgttgtcattaaaggccaggccaaataacccccccaaaaaacaggggaactttcaaggggatggcctagagcaccctgtgtaacatgtaacatcagtaaatgaattaaaaacatataattttttatattacatatttttactatgtaggtggtatattttttttaatatttatatgtaatatttttattaagaaaataatcattataaaaatttttaaaaggggactctaatcaacatcccttctgcattacgtttggtaatggtttattgccagcttacaatgaaagccaaattgaatctcaacacctctattagttcgccagtgtttgccgtacaggaaacatgctcttttcattggattttcatccaagccaaaccacacacagagtatcaacaatgtcgagcgttaaatgaatggcagttggaccacctctacgagcgcgagcattttgcattttaatgagtaaacacagtgccgggcaaaatgggggtaactaaggggcatggctgccccatggtagagggggcaggatcgctggtgtgaataccgcaacgctgcatatgcaaagtgtgattggtccgaaaaaaaaggagaacagaaaaatagtggtatggcgagcaaggactttccttctgttaccccactttcaatacgaatttctggtgtttttccaagaattttttttaacagctgcccagctggggagtttagaggactacgattttccgcgaacaatttgtatttgcaatgtgaaaacaaaatggccactgaacacggccaatccgcaggacatttccccaatctgtcccctttttggcacacctgctgtttgatttgtgtttttctcactcgaaaaatggtctctggtttttctcttttcgttttcatcaaatagccaatgcggttaacagtgaaaaactctgtgctaaatatgcttttctgttgttttcccgctgctcttatttaagtcacacaatttacgctaccaaaaagtgaacggggaggaaaattatttatttcgcttggacaagcaagtgtttattgatttagctcagtaaaagtttgttcagcgatttttatctgtataaacattcagaagcctacgtctgcataaataccgtaataaaagatactagattgtgttcaaatcatttaatatgtcccttaattttattacattttttttaatgttcatcacgaattatgcaacatgcgataaaaaaagctttactcaaccatatgaaaaattaatcatttttattaatgtgattctttgttgctttatgcatcattataatgtgacaaatgcgtgtggctttgatgatgaccaaaacatgtgtttaaaagcgtgttaaatatttatatatcttagtctgacatctgacgtcaatgtcgatgcgtttggctaatttagttagagcttggccataatcaaattcaatgacatgtgaaattttcacggatcagttcacgccaaaccgaacgatatcgcctactcaagtgtgaagattttgtgcgttaacttttcatcagccagcgagctagcgattattattgcggataacaacttcatcgctcttggtcctgctaattggaccgtgacgtgtgtgctcacaacgcccacaaaaacacaaatcacagactggcaactgtgataaataactgccgcaagaaaccgtcaagccacaggccaattgtactagtgtatttccaacgacccccgatccatataccaccacccacccaccatatacgttaccccgtttttcccatttttgcaatgcaaatcgagttgcctgccacgcacagaatgaagtctccgaactgtggactccggactacggcctcgtgtgcttacgggttccgtgtacggatacgggttcccattgcgccgtgcttggtatattgtaataaacgcaatttgtatcatgaattattactgcggcgaactggccgcacgaatgtgcggactcaactcagcaaaacccagagcagaacccaagttcagcgggatttgggacacagaaacactctacagatagcccaaaataacattaaattggatagttaagcataaatacatgcatgtagtaaagcataacttagggcaagtaaactgtagctagaaatatattttatggggtaaatgaattttggtttataaggctaaaaggcttcaaatgcatccagaaactcatatacctctccgaaacaatttaacattttctgcaaacctaacgagagctaagtacagcagtccggcaaatgacgttagttcgagcaaacttggttgaaaagtataaaattgctgtgccaacaaattgggaacaaaattcacggaaaaaaatacatgaattaaaaaggatccagggctaagatacagtattgaaatacattttcagcgcgtactatgcttcagtactttcgccacaaatagttttttattaacttgccggactggcagtcaataatttttaatgcatagaataaaattcgctgccgccattttatagaaatagttgagaagtgatgaaactaagccaatctgggaaagattgaaagccaaactttagccggctatcggcagagcttaaagttgattttatgaatccgaatcaataatcccccaggcttgtacaacaataaagtcagagctcagcaaattttttggcgttgtcaaacatttgtgctcaagttttcctataaagtatctatatgctttcgtacatatataaatcttgctttatcggagggtggattcttggcttccaggcttcgacttcctcggcttgtttacttttgtgcttttcgcagccgtcgtctctgtttacttcgtacttattattccatttgtcgtttagttttctaagggcttttcttcctgttttgactgcccaaatggggcgccattacttatgccctggacgccattatatttctctgtgtgtgtttcttattgcagtcgcagtcgccaaaagctaaaaacacaaaacaaacaaaataagccgcgttcggaatgcttccttcttttttggacgcagtgcgcatccatctttgccgaaatttcccattttcccatccgtctgccgccatggcaacatggtcgcaatagacgccattttgttgccacatctcttggtggaaatctgtatctgtattcgtggctccatgtatgcgaggcctccacggttatgctcctttgcactgtagcctgcccctaggcgtttttgccccccgtttctgccgttcgctccccgtctgcctcagtttgggattctgtttctgattcggatccgagttcggttccggttgctgtcgctggccattaccatttatttcgatgttcctgtcacttgtctactccgattatatgttaattcgaaacttttttttttgcctttcgcgaaagttcagcgtttattgaactctggcaagtgaaaagaatcaaggcacagtattttaagccactttaaaatgcccaaacaaactcacagttaattgacagattaaaataagaaaaaaagctcgcaaaatataaatgattcccattcgtgcatatcaattttacaaaacaaacaaaaagagtaatggtcaagatgagttatgcgttcattttccttgtataaataactaattaatgaactttaaataaaaacttttattcttaaaaaacaaataacacctaagcacattaagtggaaatacaatatatgagaaacaatatttccactcagcacgatttgtacgtataaatttatgtcaattatgatgtacagcaaaatcaagaaattgtatactttttaatcaatctgattttttgttgctttagatcaaagtccattgaacatggttttgtccagttgcaccgtacacgatttttcaatatttattgtaagttttcctatgtcagtcaaaatgcaaataaagttggtaaattgattttgcttgttcagatgcttgtcaaaataaaaatgtggcctaataaatataagcaaatttagtaggaacaaggaaaatcaaaaaggtcaagcggtcgtgtaacatgtggaaatttgatcaacaaaagtgaccttttatcatttccgaaaaatgtccaaagacatccgcaaaaacggaaagagccattcgaatggatttccaattagacagaagcgaatcaactcgcatgggaaagtatgagatttgtattcgcattgttttaacgcaatgtcaagtgagttaaaagggaaaggtttgaacacgcggtgtttaaaatgacattatcgcaaaacctattatatattcaccctgctcagctgtcatattgaaaagtctttgccaggcatcctgcatccaccatagaaaatttatatagcgtcacttttccagcattttctcctaaactttcttttccatatcccctcgccggcacttggaatttaggccaaaacacttttgaagcttgcaacatggcgcagatgtgggttgcaagtttacaaatttccaagagctgaagaatcgtggtaagttacacgaaatgtgtgatgggtaaggatgataacatttagcaagttatgtatttgctcattattaccatacattaaaaattataaggtgattcaatctaaaataattgatcaaaatcacctgactgactgaaagttgacatataaaatcggtgtatccccctccatatgacattttctacataattgatgtaaaatgtgcataatttatattaaaattaaatcggagcacagtgaattcattaatgattcaccgtacagatgacagcactcaccgtaaacccaatttaaataatttccattacgggaatagtttctcactcactgaaagcctagacttgcatataaaacatgaaattaatgcttaattaagcaactttccacctacaatgtgcagtaggtgagtgtgtgtgcttgtacatctaaactcgattatttctccaaagaacaagtactaagaagttttcctcgacgtaaacttaaattctgattttcataatttatacacaagccagcccgaggatatgctacaatttgcgcagcatttatccagggctgctccctcttagggttgccctgctctcttttgttttatgacagccagatggagtttacgacccagagctgcgtaaagttttcatatggggcaagagtccaggtatgacatcgcaacggaagtttatatcgcaataaaagttgtcaattgcgaatagttgggaattgcgaatggagtcaaaggccgcatcttcaagattggctcttggaaactgcacctgagatctcgcggagttcagcattgattgtgtagtttacacggcagcaactctacttatacactttaaaagtctatggaagaataataactaaaaaaccatatagccaatattacaggattttggttgcaggtgtttgaaatctatgaaagctatttatgtattttttatagtttccttatttttacacttattctgttttcattgcagtgcataaatttgatgccttttccctgttacctcattttcttgtgcatgtgcttgtgtcggaatgtcaaagcctttgttccacccttttgccagtgaagtatagccccctcatcctttggagagctattccaatgcaaaaaggactgcatgcatttttggacagaacaatgcgcttggaaatttctaaaacaaacacactcgctagccctgtccctttctatgccaaaatacctccctttctgtcatatattctatgtcaaatcgtgcgtatttattcacggagggtagagtcaaaactcatattggttttttttggctttttggggtgagacaaggagaattctaattgttacgagcgttttcctgttggacctgtcgtcactcctgagcagaaaataaacccaacaacccaacccttagttagagaagttctcatttctgccagtccttgttctcaatttctcccagtttcggaggcgcatgctcgacaatttgttcaattttcatttgtttcaggttttggcatttcacgttccacagatgttgctctcgctatatgtttttacatctctttcgccccttctcccctctctagcacacgttctgcccctctcttttcccctttcacaaccatctcttttacgcctttgaataaccgcatgtgtattggcgtagcattttaaatgaatgaaaaatattgtcgtaaatttcgtgttcacttatgctgcttctcctctctttttgcttcttgtccttttggctggtgcaatgcttggttaagtgttttacatagtagagttttccgctttgccttcgcttaccattagccaagcccatatgtgcatcctagaattttccgtgtatctcctccttgccgccgtacgctcataaattaactcaaggattctcggatctaatggagagcctagatatactcgaagagttccatgaaatctcgaatgtcttggctaaacgcttgagatactaagcattagttcaagtggcataggcagcagtcaagtgataatttcatatagatttcatcaagtgacttgtttacctgatatttgttgggaaagaagacgtaatttgtgtttctattgtgctttacgttataattttcaataattaccgactttttcgtatcaaatttaatgccttttaatagttaaaaatacacttttgatagattaatcagtattgcgaagtagcatgcacttttgtccgggcaatcgaaggacattttccagagaaatggaaaagcctgtgataatgtgtgaaggcaaacagcgtaaatgaaaatcactcaaacaaaaagcagatgcgatagcgaatgagagacagttgcagttgcaaaatttatggaaactgttaattgactgacagttgaacagtcaaagggggttgaggggtcaccaatcgctggccgaagtcccaaccacgcacacaatgcggaaaaactgcacggcaaaagttttccttttttgtgaccatatcccgatgtaaatgaaacaagtgtgcgggtgtggagttcactgaatatatttcaacatttcatgaactcgtacactggttggaaaaccaacttggacattcagagggaaagctgtcagttgtctgaacttttcattcgactcctgtcaaaagttgggcgcagaaatggggagggaaagtgtggttttcgggttttcctggattgaggaccaacagtaatcctaacttgctttacagctgctcagttgatgcctgaatggattctgggtagctgtgggttcaatatttgcttattgagcctcgcttcaaattacattcagtgcagtacgatgtgttcgacaaaacgaagcataactttcaaagtttaagattcaaagtattcattcaggtagaagtatattcctcaatataattaaatttattttctgtctcagctataccttaattttaaaatgtatgtcctttttttactgtgtaaaaactactctccgttgtatcgaccgtaaatgctttccatgtcaaccaaatatttgaaaagcaattttatagcaacaaaagatgaagcaaaggaaaacaaggacaaaaattgaaaggcagtcagcacttttcctgtgatctacgtttaattgtggaaattgtgttttcatgctcagctcaaaaggtcgaataaaatcgctttcagatggcttatgtcgccttggctaatcaaagtgaaactcgattgacatggattgtgctatattaaaattttagacaaagcacaagtctatagatatgaaatttacatacattccaagatattaacactgtttttcaagaattaattagtaccaagaaagtgcatttacccactagaaataatctttgttttatctattgagcctcaagcaaattcaattaggacagcctgttcgacattatatatgtacttcttaattgcctaacccaaatgttcataatccgattaatttatcggcaatactttgcgaacgcatttatttttcaaaaacgctaacgaatataattatgcctaaacagctgaacaatttcgtgtgctaatatgcaagattaaatggactgtgggtcgtttaataaatcactgtgcaaatacagtaaatgctcgctaattgcattcggaatgaagatttcgaatttgaaaactgtcatagatcccaaccataaattaagtatgtgaacctacattaaatataatggaaaaaaaagacattcactcaccattgtgtcccatatttgtgatgatgacccaaaaatcgatagtcttctctggtcccaactcctcgtagtcccacttctttttaactcgcacagctccgtttgtttccaccgtcacccagggattatcatcccggatcttgaatgtttccttatcggtctccttttccaactggaacaccgattttccctcagtgtctccatcagcttcggtgaactcaatcctcttggtgggtcgaacagctcgtgtgacacgtcttttctctcgatgatgtgagtgattgttgatgtcatcgtgttccagatgttgcattataaatgaaactggttcggcggccaaaaattccaatagaaccttcgcgggttttgcgctcaccaaactcgggtaccttagatcgtgggctatcacctcgataagaagttcatttgaagtgggctctccagccagcattatttcgccagtttggggtacaataatgacaacattactgggcgactttagccgataggcaatcttgtcaccatcagcatcggtggcctcaacttttcccatgatcgcaaatcgctgatatgtcacactactgttgctttccatacttgcagatttctgtccagcgatggcgaacttgtagtccagggacttgaaaatcggtctattgtcgttttcatccaacacggtgatttgtattttggaaactgtcctgtctaaaccatcgacatctgatgcttccacggacaggtcatagtgagccctctcctctcgatccagcggacgattggtgaccagccaaacaccggattcgtcatcgccattaatcaccaaggacttggcacttatttgaatgttcttgttggccttacgttcctgcagggcgaatgcatcatccacgttgccgtcaataatggtgtaccgaacctttttgggtgtggccagttcttcgtccaggatggaaccgctgaaggcctgcatcaggggcactcctctcaccctggtacccgccggttgattctccctaacttcaccactggcatcgagtagggatccagaaaatcgcagcatatcattgcggtgcatcacaaacagctgcagattgtgggtattggtggcattgggcgtttgttcaacaaccaccaactgaaccggacgattgacaagcggggaaatatccgccgtggtcatcaccacaccatcttccagtacggtgaagtacttggagtagtccgtgtccaacatgtgataggcagctgcaccagagtgggagctaccgtttatctttacaggatgggttttgaactttttgatactgaatccaggataggtatcgtgtggcaggaccaaggacatttcactgtgatgcgacaacgaggacttttccacatccccgggactgccggccagcatgcgagccgcattttccgccgaaagaccagcaaatgtggtctcctctatggccaaaataaatggaagggatatcaagaatatcgcgcaggtgcatatattaaatcggttggttatataacgttgcctgagctgattcaggcaacgtcgtgccgccattttgccgcggcactttctgatcctgtttggtattaacacctttttttgcgactttcccttttcaatgtgctcactcttcaattgttgactttactattaacacttgacttattcatgggtaaattcctttgtccagtctaccttctccactgctgatcaatacatttttgtttgttttcctgtgggaggcgcaaactgcaaataaagcgggtagagacgaaaattgatttggtggttagtggcggttctcggtacaggtaaatatttatgggcattgtgtaaagtttatgggtcattggaggtgaataattcataggccaggtgaatacattatattggtgctgccctgtgagggttgatcaagtatgcaggaaagtttgttttattgagctgcatattcgcgggctataaagtataaatatttgattgaggtataattaaagaaccctggaaaatacttttatttcataacaggaggcatggttttattcactcagaaagcaggttattaaatattaacattatgtaattatataaaaaaatatataatcaataaaatggaatggaatttctgcagcacagcatgtactaaacagttactaaagtcattgtcattgttagcgaaaatatttaaaattcttttcaacgcttcgatggtaattaaacgttacgacgttagagcaaaagggattccaattttcgaggctatatcatcatcattacatcgctgacatcagctgagcccgagaaaattgtcaacttttcactttttaattgctgtgtggcaggcaggcaagcaccagacttccaaagaactaagaaaatgttgcacaaagggaaaacttttacatggtaatagtaaaagtatttaatattccagctattttggcaggccgagagggaaaacagggcgaagaatggcaacattgtcacagtctgttccagtcaaggacttttcccaggatgtgggattttcggttagtttttgatgttcccccgacat

SEQ ID NO: 15692 - DNA, 9654 bp, DROSOPHILA
aaaatggcggcacgacgttgcctgaatcagctcaggcaacgttatataaccaaccgatttaatatatgcacctgcgcgatattcttgatatcccttccatttattttggccatagaggagaccacatttgctggtctttcggcggaaaatgcggctcgcatgctggccggcagtcccggggatgtggaaaagtcctcgttgtcgcatcacagtgaaatgtccttggtcctgccacacgatacctatcctggattcagtatcaaaaagttcaaaacccatcctgtaaagataaacggtagctcccactctggtgcagctgcctatcacatgttggacacggactactccaagtacttcaccgtactggaagatggtgtggtgatgaccacggcggatatttccccgcttgtcaatcgtccggttcagttggtggttgttgaacaaacgcccaatgccaccaatacccacaatctgcagctgtttgtgatgcaccgcaatgatatgctgcgattttctggatccctactcgatgccagtggtgaagttagggagaatcaaccggcgggtaccagggtgagaggagtgcccctgatgcaggccttcagcggttccatcctggacgaagaactggccacacccaaaaaggttcggtacaccattattgacggcaacgtggatgatgcattcgccctgcaggaacgtaaggccaacaagaacattcaaataagtgccaagtccttggtgattaatggcgatgacgaatccggtgtttggctggtcaccaatcgtccgctggatcgagaggagagggctcactatgacctgtccgtggaagcatcagatgtcgatggtttagacaggacagtttccaaaatacaaatcaccgtgttggatgaaaacgacaatagaccgattttcaagtccctggactacaagttcgccatcgctggacagaaatctgcaagtatggaaagcaacagtagtgtgacatatcagcgatttgcgatcatgggaaaagttgaggccaccgatgctgatggtgacaagattgcctatcggctaaagtcgcccagtaatgttgtcattattgtaccccaaactggcgaaataatgctggctggagagcccacttcaaatgaacttcttatcgaggtgatagcccacgatctaaggtacccgagtttggtgagcgcaaaacccgcgaaggttctattggaatttttggccgccgaaccagtttcatttataatgcaacatctggaacacgatgacatcaacaatcactcacatcatcgagagaaaagacgtgtcacacgagctgttcgacccaccaagaggattgagttcaccgaagctgatggagacactgagggaaaatcggtgttccagttggaaaaggagaccgataaggaaacattcaagatccgggatgataatccctgggtgacggtggaaacaaacggagctgtgcgagttaaaaagaagtgggactacgaggagttgggaccagagaagactatcgatttttgggtcatcatcacaaatatgggacacaatgctggcattaagtacacggacaaccagcgtgtgataatcctggtgaaggatgtgaacgacgagcccccctatttcatcaaccggccactgcccatgcaggcggtggttcagctgaatgcaccacccaacactccagtgttcaccctccaggcccgagatcccgatacggatcacaatatccactacttcatcgttcgcgatcggactggtggacgtttcgaggtggacgagcgttctggtgtcgtgcggaccaggggcacggatctcttccaactggacatggagtatgtgctgtatgtgaaggccgaggatcaaaacggaaaggtcgatgatcgcaggtttcagagtactcccgaggagcgactttcaatcgtgggcggcaaacgagcaccgcagttctatatgcccagctatgaagccgagatcccggaaaaccagaaaaaggattcagacatcatttcgattaaggccaagtcgttcgcagaccgcgaaattcgctatactttgaaggcccagggccaaggagccggcaccttcaacatcggacccacgtcgggtattgtcaagttggccaaggagttggactttgaggatctgcgacagccgcacgtgtactcgctgattgtgacagccaccgaggattcgggaggattttcaacctccgttgatctcaccattcgcgttacggatgtgaatgataacgcgccgaagttcgagctgcccgactaccaggcgcacaatgtggacgaggacattccgctgggaacaagcatacttcgcgttaaagccatggactccgattccggatcaaatgcggaaatcgaatatttagtatccgatgatcatttcgccgtggactcgaacggaatcatcgtgaacaacaagcaactggatgcggacaacaacaatgcctattatgagttcatagtgactgccaaggacaagggtgaaccgcccaaatcgggagtggctacagttcgagtttacaccaaaaacaagaacgatgaggagcccaagttctcccagcaagtgtatacccccaatgtggatgagaatgccgggccaaacactttggttaccactgtggtagcctccgacaaggacggtgataacgtgcggtttggattcgtgggcggcggcacttcatcgggtcagtttgtcatcgaggacataaccggtgttatccgactgcataataaggccatatccctggacaaggacaagtacgagctgaacgtcaccgccatggacgatggatcttgttgtgtgaatggagaccaaactatccacacctcaactgctgtggtcgtggtattcatcaccgacgtcaacgataataagccagtgttcaaggactgcagtacctattatccgaaagtcgaggaaggagctcctaatggaagtcctgtcattaaggttgtggccaccgacgaggataagggtgtgaatggacaggtgaaatactcaattgttcagcaaccaaatcagaaaggcacaaagttcacggtggacgaggagaccggagaggtgtccaccaacaaggtattcgatcgcgagggagatgatggcaagttcgtgtccgtcacagttaaggccaccgatcagggtgatcccagtctagagggtgtctgctccttcaccgtggaaatcacagatgtaaacgataatccgccactgttcgatcgacagaaatacgtggagaatgtaaagcaggatgccagcattggcacaaacatccttcgtgtctctgcctccgatgaagatgccgataacaatggagctatagtatacagcctgactgctcccttcaatcccaacgatctggaatactttgagattcaggctgagtccggttggattgtactcaagaagccgcttgaccgcgagacatacaagttagaggccatggcccaagacaagggctatccgccattatcgcgtactgtcgaagtacaaatcgatgtggtcgatcgtgcaaataatccgcccgtctgggatcatactgtctatgggcccatttatgtcaaggaaaatatgcccgttggcggcaaagtcgtctcgatcaaagccagttcgggtatcgaaggcaatcccacagttttttatcgactgatgcccgggtcaacggctcaaacgaacaagtttcacacgttttacttgcaacaaagaccggacaatggcgacacttgggccgatataaaagtaaatcatccgctggactacgagagtatcaaggaatacaatttaaccatacgtgttgagaacaacggggcccaacaattggcttcggaagcgaccgtgtacataatgctcgaggatgttaatgatgaaatacctttattcaccgaacgcgaacaggaaacggtgctcgagggcgaaccgattggcaccaaagtgacacaagtgaacgccatcgacaaggatggcacatttccaaataatcaggtctactactacattgtggattcgccgcgaaacgagggcaaggaattcttcgaaatcaatctgcaaagtggggagatcttcacgaaaaccgtattcgacagggagaagaaaggcgcctatgccctcgaagtggaggctcgggatggagccccctctgctcgacccaacagcaatggacccaattcagtcaccaaattcatacgcattggcatcgccgataaaaacgataacccgccttatttcgacaaatcgctgtacgaggccgaagtggacgagaacgaggacattcaacacacagtgctcactgtaacggccaaggatcacgacgagtcctcacgtatccgctatgaaattacaagcggcaacattggcggcgcttttgcggttaaaaatatgacgggtgccatttatgtagctggcgctttagattacgaaactcgacgccggtatgaactccgtttggccgcctccgacaatttgaaggagaactacaccaccgtgataatccacgtcaaggatgttaacgataatccccccgtttttgagcgacccacttatcgcacccagattaccgaagaggacgatcgtaatttgcccaaacgcgtcttgcaggttacggccacagatggcgacaaggatcgtccccagaacatcgtgtacttcctcacgggccagggcattgatccggataatccagccaatagcaaattcgacatcaaccgcaccaccggcgaaatattcgtactaaagcctctggatcgcgatcaacccaatggacgcccccaatggcgtttcactgtattcgcccaggacgagggcggcgaaggactcgtgggatatgcggatgtccaggtcaatctgaaggatatcaacgataatgcccccattttcccacagggcgtatactttggcaacgtgactgagaacggaaccgccggcatggttgtgatgaccatgacagccgtggactatgacgatcccaatgagggttccaatgcgcggctggtgtactccatcgaaaagaacgtgattgaggaggagacgggctcccccatttttgaaatcgaacccgatacgggtgtgataaagaccgccgtttgctgtttggatcgcgagagaactccggattattctatacaagttgtggcgatggatggcggggggttaaaggggacggggacggcctctatacgggttaaggacatcaacgatatgccgccgcagtttacgaaggacgaatggtttacggaagtggacgaaacggatggtacggccttgccggaaatgcccattttaaccgttaccgtacacgatgaagacgagacgaacaagttccagtacaaagttatcgacaacagtggctatggcgccgataagttcaccatggtgcggaataacgacggtactggttcgctgaaaatcgtacagcccctggactacgaggatcagctgcagagcaatggcttccgtttccgcatccaagtgaacgataagggcgaggacaacgacaatgacaaataccacgtggcctactcctgggttgtggtaaaactgagggacatcaacgacaataagccgcatttcgaacgggccaatgtggaggtttctgtattcgaggacacgaaagttggcaccgaactcgaaaagttcaaggcaaccgatccggatcagggtggcaagagtaaggtatcctattcgatcgatcgatcttcggaccgtcagcgccagtttgccattaaccagaatggttcagttaccattcaacgttcgctggaccgcgaagtagttcctcgtcaccaagttaagatcctggccatcgacgatggttctccgccgaaaaccgccactgccacactaacagtcatcgtccaggatatcaacgacaatgctcccaaattcctcaaggattacaggccggttctgcccgagcatgttcctccacgtaaagtggttgaaatcctggccaccgatgatgacgatcgctccaagagcaatggcccgccattccagttccgtttggaccccagtgcagatgacatcatccgagcttccttcaaggtggaacaggatcaaaagggtgccaacggtgatggcatggctgtgatatcgtccctaagatccttcgatcgcgagcagcaaaaggaatatatgattcctattgtaatcaaagaccatggttccccggcaatgactggaactagtactctgaccgtcataattggcgacgtgaacgacaacaaaatgcagccaggatctaaggacatcttcgtttacaactaccaaggacaatcgccagacactccgattggacgggtctatgtctacgatttggatgattgggatctgcccgacaagaagttctattgggaggccatggagcatccaagattcaagttggatgaagattccggcatggtaacgatgcgagcaggaactcgtgaaggacgctatcatctcaggttcaaggtctacgataggaagcacactcaaaccgatataccagccaatgttacggttacagtgagagaaattccccatgaagctgttgtaaactcgggatccgtacgtctatcaggcatttcggatgaggactttattcgagtctggaactacagaacccaaagcatgagccgctcgaagatggatcgttttagggataagctggctgacttgctaaacactgaaagggaaaatgtggatatattcagtgtgcaattgaagaggaaacatccgcctctaacggacgttaggttttccgcacatggatctccttactataaaccagttaggctaaatggaattgtactgatgcaccgcgaggagatcgaaaaggatgtgggcattaatatcaccatggtgggcatcgatgagtgtctgtatgagaaccaaatgtgcgagggcagttgcacaaactcgctggaaatcagtcctctgccctatatggttaacgccaacaaaactgccttggtcggtgttcgtgtggataccattgctgactgtacttgtggtgctcgcaatttcaccaaaccagaatcctgtcgaaccacaccctgtcataatggtggtcgctgtgtggacaccagatttggtcctcactgctcgtgtcctgtgggatacacgggacccaggtgtcagcaaaccactcgcagtttccgtggaaacggttgggcctggtatcctcccttggaaatgtgcgatgaatcgcatttaagtctggagtttattacccgaaaacccgacggcttaatcatctacaacggtccaattgttcctccagaacgagatgagacgctcatctcagatttcattgccctggaattggagcgaggttatcctagactgcttatcgactttggttcgggaactttggagctgagggtgaagacgaagaagactttggacgacggtgaatggcatagaatcgatctgttttgggataccgaaagcattcgtatggttgtcgacttttgcaaatcagcagagattgccgaaatggaggatggcactccgccggaattcgatgacatgtcctgccaggcgagaggacaaattccgccatttaatgagtacctcaacgttaatgctcctctgcaagtgggtggcctatatcgggaacagttcgatcagagtctgtacttctggcactatatgcccacggccaagggatttgatggctgcatcagaaatttggtgcataactcaaaactctatgatctggcccatcctggattgtcgagaaatagcgtcgcgggttgtcctcaaaccgaggaagtttgtgctcaaactgaaaccacagctcgctgctgggagcacggaaattgtgttggatccttgtccgaagctcgttgccattgtcgaccaggatggacaggtccggcctgtaatatccctacaatacccactaccttcaaggcccagagttatgttaaatatgctctgagtttcgagcccgatcgattcagcacgcaagtccagctaagattccggacaagagaggagtacggcgaacttttccgagttagcgatcagcacaatcgggaatacggaatccttgagatcaaggatggtcatctgcacttccgttacaatctgaactctctgcgcactgaagaaaaggatctctggctaaatgccatagtagtaaacgatggccaatggcatgtggtgaaggtaaatcgatatggctcagctgctaccctggaattggatggtggagagggtcgtcgttataacgagacctttgagttcgtgggacatcagtggctgttggtggacaagcaagagggtgtctatgcgggcggcaaagctgaatacaccggagtgagaacctttgaagtgtacgccgattaccaaaagagctgtctcgatgatatacgtctcgaaggcaaacacctgccattgccaccggcgatgaatggtactcagtggggacaggctaccatggccaggaatctggagaagggttgtccttcgaataaaccatgctccaacgtgatttgccccgatccgttcgagtgcgtagacctgtggaatgtctacgagtgcacttgcggcgaaggacgcattatgtcacccgattccaagggctgtatggatcgcaacgaatgcctcgatatgccctgcatgaacggtgccacatgcatcaatctcgagccccgactccgatatcgttgcatatgtccagatggattttggggcgagaattgcgaactggtgcaggagggtcagaccttaaaactcagcatgggcgccctggcggcgattttggtctgccttttgatcatactgatactcgtcttggtgttcgtcgtatacaatcgtcgccgtgaagcgcatatcaaatatccgggtcccgatgacgatgtgcgcgagaatatcatcaactatgacgacgagggaggcggcgaggatgatatgacggcctttgatatcacacctctgcagataccaattggagggccaatgccacctgagctggcgcccatgaaaatgccaattatgtatcccgtcatgaccttaatgccaggtcaggagcccaatgtgggcatgttcatcgaggagcataaaaagcgcgccgatggtgatccaaatgcgccacctttcgacgacttgaggaactacgcgtacgagggcggcggcagcacagctggatcgctcagctcgttggcttcaggaactgatgacgagcagcaggagtatgactacctcggagcctgggggccgcgcttcgacaagctggccaacatgtatggacccgaggcgcccaatccccacaataccgaactagaattgtaagctggtggagcgagcagtgatgaggaatagagtggggagaagggagagaccgaatccaaatccgatgcggatacctagatgaacaaactaaaaactgttagtagatacaaagttgcatttaaaacgaaatgaagccccactcccgagggaaactcacacacacacaaagaaagcgcaaccaaagaagcatctcaatgctgaagttggcagaactctctacgtaaatggaaactaagaactagaaaactaaaataggggaagggaagtggaagtgaaatcaaacacatattatgacacgtaaaatgacatttgtaaaaatatttcatcagcatttaaatttaaacaattacgataatg

SEQ ID NO: 15693 - protein, 3097 aa, DROSOPHILA
MAARRCLNQLRQRYITNRFNICTCAIFLISLPFILAIEETTFAGLSAENAARMLAGSPGDVEKSSLSHHSEMSLVLPHDTYPGFSIKKFKTHPVKINGSSHSGAAAYHMLDTDYSKYFTVLEDGVVMTTADISPLVNRPVQLVVVEQTPNATNTHNLQLFVMHRNDMLRFSGSLLDASGEVRENQPAGTRVRGVPLMQAFSGSILDEELATPKKVRYTIIDGNVDDAFALQERKANKNIQISAKSLVINGDDESGVWLVTNRPLDREERAHYDLSVEASDVDGLDRTVSKIQITVLDENDNRPIFKSLDYKFAIAGQKSASMESNSSVTYQRFAIMGKVEATDADGDKIAYRLKSPSNVVIIVPQTGEIMLAGEPTSNELLIEVIAHDLRYPSLVSAKPAKVLLEFLAAEPVSFIMQHLEHDDINNHSHHREKRRVTRAVRPTKRIEFTEADGDTEGKSVFQLEKETDKETFKIRDDNPWVTVETNGAVRVKKKWDYEELGPEKTIDFWVIITNMGHNAGIKYTDNQRVIILVKDVNDEPPYFINRPLPMQAVVQLNAPPNTPVFTLQARDPDTDHNIHYFIVRDRTGGRFEVDERSGVVRTRGTDLFQLDMEYVLYVKAEDQNGKVDDRRFQSTPEERLSIVGGKRAPQFYMPSYEAEIPENQKKDSDIISIKAKSFADREIRYTLKAQGQGAGTFNIGPTSGIVKLAKELDFEDLRQPHVYSLIVTATEDSGGFSTSVDLTIRVTDVNDNAPKFELPDYQAHNVDEDIPLGTSILRVKAMDSDSGSNAEIEYLVSDDHFAVDSNGIIVNNKQLDADNNNAYYEFIVTAKDKGEPPKSGVATVRVYTKNKNDEEPKFSQQVYTPNVDENAGPNTLVTTVVASDKDGDNVRFGFVGGGTSSGQFVIEDITGVIRLHNKAISLDKDKYELNVTAMDDGSCCVNGDQTIHTSTAVVVVFITDVNDNKPVFKDCSTYYPKVEEGAPNGSPVIKVVATDEDKGVNGQVKYSIVQQPNQKGTKFTVDEETGEVSTNKVFDREGDDGKFVSVTVKATDQGDPSLEGVCSFTVEITDVNDNPPLFDRQKYVENVKQDASIGTNILRVSASDEDADNNGAIVYSLTAPFNPNDLEYFEIQAESGWIVLKKPLDRETYKLEAMAQDKGYPPLSRTVEVQIDVVDRANNPPVWDHTVYGPIYVKENMPVGGKVVSIKASSGIEGNPTVFYRLMPGSTAQTNKFHTFYLQQRPDNGDTWADIKVNHPLDYESIKEYNLTIRVENNGAQQLASEATVYIMLEDVNDEIPLFTEREQETVLEGEPIGTKVTQVNAIDKDGTFPNNQVYYYIVDSPRNEGKEFFEINLQSGEIFTKTVFDREKKGAYALEVEARDGAPSARPNSNGPNSVTKFIRIGIADKNDNPPYFDKSLYEAEVDENEDIQHTVLTVTAKDHDESSRIRYEITSGNIGGAFAVKNMTGAIYVAGALDYETRRRYELRLAASDNLKENYTTVIIHVKDVNDNPPVFERPTYRTQITEEDDRNLPKRVLQVTATDGDKDRPQNIVYFLTGQGIDPDNPANSKFDINRTTGEIFVLKPLDRDQPNGRPQWRFTVFAQDEGGEGLVGYADVQVNLKDINDNAPIFPQGVYFGNVTENGTAGMVVMTMTAVDYDDPNEGSNARLVYSIEKNVIEEETGSPIFEIEPDTGVIKTAVCCLDRERTPDYSIQVVAMDGGGLKGTGTASIRVKDINDMPPQFTKDEWFTEVDETDGTALPEMPILTVTVHDEDETNKFQYKVIDNSGYGADKFTMVRNNDGTGSLKIVQPLDYEDQLQSNGFRFRIQVNDKGEDNDNDKYHVAYSWVVVKLRDINDNKPHFERANVEVSVFEDTKVGTELEKFKATDPDQGGKSKVSYSIDRSSDRQRQFAINQNGSVTIQRSLDREVVPRHQVKILAIDDGSPPKTATATLTVIVQDINDNAPKFLKDYRPVLPEHVPPRKVVEILATDDDDRSKSNGPPFQFRLDPSADDIIRASFKVEQDQKGANGDGMAVISSLRSFDREQQKEYMIPIVIKDHGSPAMTGTSTLTVIIGDVNDNKMQPGSKDIFVYNYQGQSPDTPIGRVYVYDLDDWDLPDKKFYWEAMEHPRFKLDEDSGMVTMRAGTREGRYHLRFKVYDRKHTQTDIPANVTVTVREIPHEAVVNSGSVRLSGISDEDFIRVWNYRTQSMSRSKMDRFRDKLADLLNTERENVDIFSVQLKRKHPPLTDVRFSAHGSPYYKPVRLNGIVLMHREEIEKDVGINITMVGIDECLYENQMCEGSCTNSLEISPLPYMVNANKTALVGVRVDTIADCTCGARNFTKPESCRTTPCHNGGRCVDTRFGPHCSCPVGYTGPRCQQTTRSFRGNGWAWYPPLEMCDESHLSLEFITRKPDGLIIYNGPIVPPERDETLISDFIALELERGYPRLLIDFGSGTLELRVKTKKTLDDGEWHRIDLFWDTESIRMVVDFCKSAEIAEMEDGTPPEFDDMSCQARGQIPPFNEYLNVNAPLQVGGLYREQFDQSLYFWHYMPTAKGFDGCIRNLVHNSKLYDLAHPGLSRNSVAGCPQTEEVCAQTETTARCWEHGNCVGSLSEARCHCRPGWTGPACNIPTIPTTFKAQSYVKYALSFEPDRFSTQVQLRFRTREEYGELFRVSDQHNREYGILEIKDGHLHFRYNLNSLRTEEKDLWLNAIVVNDGQWHVVKVNRYGSAATLELDGGEGRRYNETFEFVGHQWLLVDKQEGVYAGGKAEYTGVRTFEVYADYQKSCLDDIRLEGKHLPLPPAMNGTQWGQATMARNLEKGCPSNKPCSNVICPDPFECVDLWNVYECTCGEGRIMSPDSKGCMDRNECLDMPCMNGATCINLEPRLRYRCICPDGFWGENCELVQEGQTLKLSMGALAAILVCLLIILILVLVFVVYNRRREAHIKYPGPDDDVRENIINYDDEGGGEDDMTAFDITPLQIPIGGPMPPELAPMKMPIMYPVMTLMPGQEPNVGMFIEEHKKRADGDPNAPPFDDLRNYAYEGGGSTAGSLSSLASGTDDEQQEYDYLGAWGPRFDKLANMYGPEAPNPHNTELEL

SEQ ID NO: 15694 - DNA, 3138 bp, DROSOPHILA
tatttgagcgcgtttaagtttgtggtgttagcctcgcggagatcggcggagctgcgatccaagcaccagcaagttccgttcaaaactgtcgactcgtcggtgtgggccaagttactgcgcccctatcaccacagtcgccaataacaatagcagtagcagtaactgttgcagtaacagtaacagtacccagctgtcgcagcattgcgctctccgctctgtaccgcaacactcacatccaatccgaaccgaaccgctccgctcattactctcccgatcttggggcctggagcggagcggatgggtttcactgttaacagttaacgctgggagagcgcgatctcgacttacgcacaccctcgctcaggaggctcgctgagattttaaatttaaatatatatagagcaacatgaacaatacatatgttacattctattatctgtctattggtggaaatggagtatattatctgattaatcagtgttgtggtgatgataaatattactcataaagctgcactatttcatcgttattttcaaagtattcattttagtgtgacattttacattatgttaacactacgcagcaataatctgtaaactttctttaggcaatctttcattctttcaaactttccttagaaaatatttcaattgtgcccgtttctattaacctgacttcatgtattgatatttttttattcatataagtacattgtctttcagccatctgcttgctatattaaagtaactattcgcttatgtctatagttcctaagatgtaaatgtaaatcgtctcataagcattaattttacagcaaaaaataaaatacgattttaaattcaagttcgtttggaaaaacatttccgatgactaggatataaattcaaaatattaacgctattaaaacgttacatttatccattgcttaagtatatattaatcgtagttctggacgtgagatgtcgctcaggtatctacgattccggctaggttgactgccctacggatgttcctcacacacatgccgttcgagatcgatggcccggaagaagggccgcacgcagaattcacaggtgtaagtgccgtgtccatggccgcgatccgtctttatgtgatcggtgaggtggcaccgctgggtgaatctctttccgcacgtgggacacagatgcggtcggtggtccaggtgcagactgttaacgtgcttctttaggtgatcagcagtggcgaagtccgcctggcaaataccgcacacatgaccgcgcaagaggatgtgaacacgttgcagatgggaccgcagggcttctcggctgccatggctcttgccacagtagcagcagtccagggcactgcgttcgtgaacctgctccaggtgccgcaccaggctcagactgccggggaatccgttggcgcagaagggacacacgaaaacgctcggcttagcgttcacaatgcacgactccttgtccaggtcggtgggccagccaaaggtgagatcgtcgtcccagtcgatgctgggcagtatgttctcaatgttctcctctagcatctcaagatcctccatttcatcaacctggctgtctgcagggatcggattgaatagtattattaagcagggtatgccattaacatcacaactactcgtaagcagaatacctacctgcatcactggccgtggacttcagggtacgcaggcgatgcacctcctcggcgtgctcctgcagctccagcatcccgctaaaggtcttaacgtcgttgcagttgtccgtgcacatgtcgcagtagaacagcgactgctggccgtgccaactggcaacatgacggtaaagaaacgtggctgacgcgtacttcttgccgcactgcaggcacaggaactggccatcgttgtgctttcgctcccgatgccgctccagccgggcctcctcgccgaaaagcgtcaggcagtgggggcagacgaaaagacgcctcaccctgacggagcactgctgctcgtgccgcttggcggccagatgacgagagaactccgcaaaacaaacgccgcagtggtacgtacgcttcttggccggcttcttcgccgccagcggcagggctccgcggttgctcgctcccggcgcttttggccggatgggcaccggttccataattttagcttgtccaattaaaattgttgttacaagcaaaactgctcgctgactatcgatatcggaaggcgcgatttgttatcgattgaccgcaagtgccgggaagccaaaagtgtgactgcagcgcgaaagctgaacagaatatatcaataagcggtcacatttacttaccgaagtgttcaaaaacaaaaatcaaacattttcaaattaaattcttcatattcccattgaaaagagcccgctcgtacattttcgtcacttgaatatttattgtacttcatttaaatcattttgtatttgaattttttttacatacttttatggtttttaatttcatcagcataattcaataatatatagtttttgtatagtataataattttataacacgtttttctgcactgtgcaaataattttcccatcaacttctattcaattagcgaatttccttttagttatttgcgtgatggagtgttgatattcaaatttccttgaattctttagtacagtctacattaaattgttttacatttgatttcatttaccgactaacattttgttgtatattcttttttgggttttttttctcaaaataattcatgtttttaacacttttataatagtataagctgtatacacttataataaatgacttgaatacataataacaaacgcctcggttacaatcttcaatcttcacaactgtattcatgacccagaatttacatggcgttactaaaagctctggaatcttatgtattaagcatattgttttgcgcattcctgtcctctaatcagtgatgtgagcactaattatccagaaattaaagtaaatatttgcagggcaatgccacccacctgacgcgtgaagtagtacacacttatgtaatccattaaacatacatagttatcgaattctttgttcttattatcaaaatggcgctgtggcggctcaatcaatccatcggacctctaatggttccttagttctatgctcatc

SEQ ID NO: 15695 - DNA, 1059 bp, DROSOPHILA
atggaaccggtgcccatccggccaaaagcgccgggagcgagcaaccgcggagccctgccgctggcggcgaagaagccggccaagaagcgtacgtaccactgcggcgtttgttttgcggagttctctcgtcatctggccgccaagcggcacgagcagcagtgctccgtcagggtgaggcgtcttttcgtctgcccccactgcctgacgcttttcggcgaggaggcccggctggagcggcatcgggagcgaaagcacaacgatggccagttcctgtgcctgcagtgcggcaagaagtacgcgtcagccacgtttctttaccgtcatgttgccagttggcacggccagcagtcgctgttctactgcgacatgtgcacggacaactgcaacgacgttaagacctttagcgggatgctggagctgcaggagcacgccgaggaggtgcatcgcctgcgtaccctgaagtccacggccagtgatgcagacagccaggttgatgaaatggaggatcttgagatgctagaggagaacattgagaacatactgcccagcatcgactgggacgacgatctcacctttggctggcccaccgacctggacaaggagtcgtgcattgtgaacgctaagccgagcgttttcgtgtgtcccttctgcgccaacggattccccggcagtctgagcctggtgcggcacctggagcaggttcacgaacgcagtgccctggactgctgctactgtggcaagagccatggcagccgagaagccctgcggtcccatctgcaacgtgttcacatcctcttgcgcggtcatgtgtgcggtatttgccaggcggacttcgccactgctgatcacctaaagaagcacgttaacagtctgcacctggaccaccgaccgcatctgtgtcccacgtgcggaaagagattcacccagcggtgccacctcaccgatcacataaagacggatcgcggccatggacacggcacttacacctgtgaattctgcgtgcggcccttcttccgggccatcgatctcgaacggcatgtgtgtgaggaacatccgtag

SEQ ID NO: 15696 - protein, 352 aa, DROSOPHILA
MEPVPIRPKAPGASNRGALPLAAKKPAKKRTYHCGVCFAEFSRHLAAKRHEQQCSVRVRRLFVCPHCLTLFGEEARLERHRERKHNDGQFLCLQCGKKYASATFLYRHVASWHGQQSLFYCDMCTDNCNDVKTFSGMLELQEHAEEVHRLRTLKSTASDADSQVDEMEDLEMLEENIENILPSIDWDDDLTFGWPTDLDKESCIVNAKPSVFVCPFCANGFPGSLSLVRHLEQVHERSALDCCYCGKSHGSREALRSHLQRVHILLRGHVCGICQADFATADHLKKHVNSLHLDHRPHLCPTCGKRFTQRCHLTDHIKTDRGHGHGTYTCEFCVRPFFRAIDLERHVCEEHP

SEQ ID NO: 15697 - DNA, 6015 bp, DROSOPHILA
aatggccaaaacgcggcggttgacgtcagccttgttcatttcgctgctgctggtcgcttctattttcctatattaccctttatttccgccaggtgtaacagctgttgtgtgtggcaaatgggaagagaagaggagagaagacgagtggttacgggagggttgataaaaaaggaagtaacgcgacagagaagtagagaactgacaacgtgcacaaatctcaataaggcaatgttcgaggttcggttcacgcttctcgtttttttttttcctgcttttgttgttttctctgccctgttttttggcattcacttctatggtctgttattttgtagtacaaaaagcaacactgagctgctggaacatctagaaatttcagataataatctacttgcctcgggctcccacttgttcccaattaacacggctgctgtgtcgatttctgcacaaaattagcacaaaaaatcttcgctaaacggcaatcccaaaaactcgattccagtgtgaccacagcgataaagtcacaaaataccatcgggctctggcaaagaatggggaaaaaaaaatgaaattagtgatggaattatattttatacgatacaaaaaacaataggtgtatgacatttgtatactagcttaattatttgtaggtttgtagggaacagcctaccttgataatacatacattttcttattacatttttttttatcaaatccaaagcaaaacccatacttttagaaaaaaaattttttttaacattttttggaaacataaaatatgtatcgtacacattaaagaccagcttcactttattatttatataataaataaaacttctgctacaagccagaaaaagctaaaatgtagccaaatatagcatggacccaaaccagcgggagcactaacaactcgtaacgtaagcgcagcacgtaacatttccgctatctcactcgcacgttcagctacatagtgcggactcacttgcacctagtagtattcgatccgcttggaaattttgctcgccgtttgctttctcaaaggctcaaaaaaatgcagctaccaccgacttacctggcttcgcaagtgaacgcgaactaagccaatagcatctcgattcgccggcgttgcgcagcgttcgcaaatgcagctgaaacgagcaaaaaacacgcgcacaacgaaaaatccgcaagtggaaaaaactgctacggaaaaatcaactctgccagcaaacagtgttgcaaatcgatggagttaaacagctgagtggttagtgttgactgacagccgagtacggcaacttacaacactgtaggcgttttggcgcgattttaggttttggagggaaactgcatctagtgaaaaatcgtggccagttgtaattcgagcagtgcgctggcacgacgtggtgataaaaaaggaaaactaatagaattatactgactagtgataattaaccggacgtgcccatctgttaattcagccaagtggtatctttacaaccgtttagccaacaaccaaattgctatcagaaatatatattatacacacttactatggcccagccatcggtagctgcatttttcacaaaccgcaaacgcgccgccttggatgatgctatcagtatcaagaacagggtaagacttccgtcccagcaacgtgactccagatacaaaagtatctgcaaggacgttctgccaatacaggcattttaaaaatggatttgttttgcagcgtttggtggaacccgctgaaaccgtctctcctgcctccgccccttcccagttgccagccggcgaccaggatgcggatctagacaccctgaaggcggcggccacgggcatgcgtacccgatccggacgcactgcccgactaattgtcaccgccgctcaagagagcaaaaagaagacaccggctgccgccaagatggagccacacatcaagcagcccaagctggtgcaattcattaaaaagggcactctgtcgcccaggaaacaggctcagtccagtaagctggacgaggaggagctgcagcagtcgtcggccataagcgagcacacgcccaaggttaacttcaccatcacaagccagcagaatgcggacaatgtgcagcgtggcctgcgcacacccaccaagcagatcctcaaggatgcctcgccgatcaaggcggatctccgccgtcagctcactttcgacgaggtaaaaacgaaggtatcgcggagtgccaagctgcaggaactcaaggcagtgctggcccttaaggcggcgctcgagcagaagcgcaaggagcaggaggagcgcaacaggaaactccgcgacgctggcccctccccatcgaagtccaagatgagcgtgcagctcaaggaattcgacacaatcgaactggaggtgcttataaggtgagctttatgcttatataagaagttttatgggtactgaaccaaattcggcttcaaatacttaaaagagattgaagctatattgaacatcatgttgtgtcctatagtttcaagtcctctcgaatcaacaatttctttttaaatttctttgaggttgtttgatactcgctttatcattcgaagaggcatccttagggtattaaaccttgattgaatgatataatttgacatgcctttcgcatcctcttcaaatcgagtaatcatgggtgtcgaagaaaatcagccatgtaagaagctcaagatatgtgcctgccgcaacaattttgattgagctggctggtggcctagaatcggcataaacaaaccacggactgtggagtgtggtctatgaaaaaaccgggtaacatcatttagcgaaaggccagcagttgctgccgtgcagttctgctgcaatcgaggtcgttctccgggtctccagcttattcaagctctcgactgctgaagttgcatattttccgcccaagagtcgtcaagtcaccgatggcttggctttggttcggcaatatggctatttttgtacgagcaattgctgctgattcgtgacgtctgtacaacatgcataaatacccaactggctgactgaccctccccatgcggcgacgctgtgtgtgtgtatcgctatgcgcagcatgtttacccttcgcagacgttacaatctagcctgaccttccctttgaaaatgcttattttccgcccgcattcggtggttgctttcccttcggcactcggaaaacaaggatcttaactgctgtactgcatgggaatgtgcatgtgtatatctgtgtatatgtattttgggtctgacgctcaggtagcaacctttttttgtaacggtcgtcttgaagaaaagtcccaagcagcaagcaggataaattttcaaataggacatgcctgtttgtatttcgtattaatttcatgaaataaataagtgcattagcaaccctaatgtttagaagattttttttcttctatttttatataatgaaattattgtttcgcgcaaacttaagcaccgaattttaaaatgttgatatagataacttataattttcgtttttttttttttcacaatcagccctttgaagaccttcaagactcccacaaaaataccgccacccaccccggacaaacatgagcttatgtcgccgcgtcacactgacgtctccaagcgccttctcttcagtccggccaaaaatggatctcctgtcaaattggtggaggtgccggcttataagcgctacgccagtctggtggaaagcagccgcgccggccaacttccattgccttataagtaccgacacctgttggacgtgttcaagggtctcgattccgtggtggccatgtttcacaaccgcaaggagaccatcacattcaagaagcttaagccggcagtgcagcgcatgctccggaagaacttcactgagacccatttggcccagatcaagcacatctatccagacgcatttatcttcagtcaggtgaagacgcgcaatttcggttctgtctccaaagcggactatttccagctgatcatcgctcccaatgtggagccactgcccgagcaacagcaatcggagaagccacaacatttcaccaagatcaacgaagacgatgtgctcgcgtcggcccagtcgacgtccatgaatccacacgttatgacggcgcgcatgcagcgctttcagagccttctgctcgatcgggcaatgcgggcgcacgaccagttccttcgctcccaggatccgccgatcatcatcgaaaaggcgctgactcgctggcatccgcagtttgatttggagagttgtccggaagtggagctgtcccctttgccgcagccgcccaatgtcgagaaatactcgtcagctaaggatattctgtctaccgctcgaaatctcttcaattgcgccacgcccatggagagagcaatggatcgctatgaggccaagttggagtcggaaaaacagcaagcagctgaaagcaataaaaagacggaggaacagcaggcaggagaagttaccaggacaagtacagcgattcaaaccagtcaggaggtgcctggaatatctggatcatcgaaaaacccaactgtccctgaaacaacaaaccaaacagaaactgccaagcccaccgtgaaggattgcacagtgccagatgccagctccaatctactgaagggactgccaaaatcactgatcgagaaaattcgagccaaacaggcagcaaaggctttggaggcgatgactcgacgtccttcgcaggaccaggaggccacgaagtactcacgtttgcccgaattggccagacacctgcgcaatgtcttcgttaccgagcgtaaaggagtgctcaccctggaagtaatcatcaagaagatccagaacagcttccgggcgaacctcacaccgcaggaaattgaggcgcatctgaaactacttgccaaggagctacccagctgggcttcctttcatgaagtgcgcaagaccatgtacctcaaggttgccaaggacatggacatgaacaagatcatcgagaagctggagagcgtggctaacgccaagagcaattagaccggaaacacggaaacgcaaccaggacgcgggactccgtcgagcaatgaccctgtggctatatccagatatatgtttaagtacttgtcaaactcgctggccattacttgattaaacaaccggattaggctaaccatcttgacatttccacattcaacaagcaccttgacaaccaggattggattcatcacatttacccaagcaatcattatcattatatgtgtaatttttggaccaaacgtttatacattcatatttattagttttaagaccattttcatgttgtaccacgttgaataaataaatatttttcctggaaataataaacgtactcattcaattgtgtagacaggaaatataaaatttatagcctggctcacaagcattaaattcatctcttatcttccaagtctatctatgtatatataagctatttaaatcaaaatcattttcagttccaaaatgcagctcatcgtgaaattactggtgagtaagctaatcagtgaaaaggtatctttcgctaacattccatctccctcagattgtccttttggcattatttgaattgctgtctggcaattcaaataatcgacaagagacctggggccaccctccatgggggtaaattaaatggcgtgaaaattagatacaaaagattcaactgtagttgttcttgatgtcttattaaaaagtgaaatacttttgacttgtgcattggcttttatttataaaaattaatggtgatgcgtctaaaaaactcgaacttaatagtttttttgcgcaatataatacttatatacaaaggcgacagcgccctctagcgctttttattttacaataatgcgggactatagctaatcccattgtcccagctgccaagtaccatattcaaaagatctggaaattcgggacccggctgagagtggaaacttttggatgccgtggagaggccctgatacggaatgtgtcatccaagtctactgacgtggcgtatttattc

SEQ ID NO: 15698 - DNA, 2699 bp, DROSOPHILA
ccgcttggaaattttgctcgccgtttgctttctcaaaggctcaaaaaaatgcagctaccaccgacttacctggcttcgcaagtgaacgcgaactaagccaatagcatctcgattcgccggcgttgcgcagcgttcgcaaatgcagctgaaacgagcaaaaaacacgcgcacaacgaaaaatccgcaagtggaaaaaactgctacggaaaaatcaactctgccagcaaacagtgttgcaaatcgatggagttaaacagctgagtggttagtgttgactgacagccgagtacggcaacttacaacactgtaggcgttttggcgcgattttaggttttggagggaaactgcatctagtgaaaaatcgtggccagttgtaattcgagcagtgcgctggcacgacgtggtgataaaaaaggaaaactaatagaattatactgactagtgataattaaccggacgtgcccatctgttaattcagccaagtggtatctttacaaccgtttagccaacaaccaaattgctatcagaaatatatattatacacacttactatggcccagccatcggtagctgcatttttcacaaaccgcaaacgcgccgccttggatgatgctatcagtatcaagaacaggcgtttggtggaacccgctgaaaccgtctctcctgcctccgccccttcccagttgccagccggcgaccaggatgcggatctagacaccctgaaggcggcggccacgggcatgcgtacccgatccggacgcactgcccgactaattgtcaccgccgctcaagagagcaaaaagaagacaccggctgccgccaagatggagccacacatcaagcagcccaagctggtgcaattcattaaaaagggcactctgtcgcccaggaaacaggctcagtccagtaagctggacgaggaggagctgcagcagtcgtcggccataagcgagcacacgcccaaggttaacttcaccatcacaagccagcagaatgcggacaatgtgcagcgtggcctgcgcacacccaccaagcagatcctcaaggatgcctcgccgatcaaggcggatctccgccgtcagctcactttcgacgaggtaaaaacgaaggtatcgcggagtgccaagctgcaggaactcaaggcagtgctggcccttaaggcggcgctcgagcagaagcgcaaggagcaggaggagcgcaacaggaaactccgcgacgctggcccctccccatcgaagtccaagatgagcgtgcagctcaaggaattcgacacaatcgaactggaggtgcttataagccctttgaagaccttcaagactcccacaaaaataccgccacccaccccggacaaacatgagcttatgtcgccgcgtcacactgacgtctccaagcgccttctcttcagtccggccaaaaatggatctcctgtcaaattggtggaggtgccggcttataagcgctacgccagtctggtggaaagcagccgcgccggccaacttccattgccttataagtaccgacacctgttggacgtgttcaagggtctcgattccgtggtggccatgtttcacaaccgcaaggagaccatcacattcaagaagcttaagccggcagtgcagcgcatgctccggaagaacttcactgagacccatttggcccagatcaagcacatctatccagacgcatttatcttcagtcaggtgaagacgcgcaatttcggttctgtctccaaagcggactatttccagctgatcatcgctcccaatgtggagccactgcccgagcaacagcaatcggagaagccacaacatttcaccaagatcaacgaagacgatgtgctcgcgtcggcccagtcgacgtccatgaatccacacgatccgccgatcatcatcgaaaaggcgctgactcgctggcatccgcagtttgatttggagagttgtccggaagtggagctgtcccctttgccgcagccgcccaatgtcgagaaatactcgtcagctaaggatattctgtctaccgctcgaaatctcttcaattgcgccacgcccatggagagagcaatggatcgctatgaggccaagttggagtcggaaaaacagcaagcagctgaaagcaataaaaagacggaggaacagcaggcaggagaagttaccaggacaagtacagcgattcaaaccagtcaggaggtgcctggaatatctggatcatcgaaaaacccaactgtccctgaaacaacaaaccaaacagaaactgccaagcccaccgtgaaggattgcacagtgccagatgccagctccaatctactgaagggactgccaaaatcactgatcgagaaaattcgagccaaacaggcagcaaaggctttggaggcgatgactcgacgtccttcgcaggaccaggaggccacgaagtactcacgtttgcccgaattggccagacacctgcgcaatgtcttcgttaccgagcgtaaaggagtgctcaccctggaagtaatcatcaagaagatccagaacagcttccgggcgaacctcacaccgcaggaaattgaggcgcatctgaaactacttgccaaggagctacccagctgggcttcctttcatgaagtgcgcaagaccatgtacctcaaggttgccaaggacatggacatgaacaagatcatcgagaagctggagagcgtggctaacgccaagagcaattag

SEQ ID NO: 15699 - protein, 715 aa, DROSOPHILA
MAQPSVAAFFTNRKRAALDDAISIKNRRLVEPAETVSPASAPSQLPAGDQDADLDTLKAAATGMRTRSGRTARLIVTAAQESKKKTPAAAKMEPHIKQPKLVQFIKKGTLSPRKQAQSSKLDEEELQQSSAISEHTPKVNFTITSQQNADNVQRGLRTPTKQILKDASPIKADLRRQLTFDEVKTKVSRSAKLQELKAVLALKAALEQKRKEQEERNRKLRDAGPSPSKSKMSVQLKEFDTIELEVLISPLKTFKTPTKIPPPTPDKHELMSPRHTDVSKRLLFSPAKNGSPVKLVEVPAYKRYASLVESSRAGQLPLPYKYRHLLDVFKGLDSVVAMFHNRKETITFKKLKPAVQRMLRKNFTETHLAQIKHIYPDAFIFSQVKTRNFGSVSKADYFQLIIAPNVEPLPEQQQSEKPQHFTKINEDDVLASAQSTSMNPHDPPIIIEKALTRWHPQFDLESCPEVELSPLPQPPNVEKYSSAKDILSTARNLFNCATPMERAMDRYEAKLESEKQQAAESNKKTEEQQAGEVTRTSTAIQTSQEVPGISGSSKNPTVPETTNQTETAKPTVKDCTVPDASSNLLKGLPKSLIEKIRAKQAAKALEAMTRRPSQDQEATKYSRLPELARHLRNVFVTERKGVLTLEVIIKKIQNSFRANLTPQEIEAHLKLLAKELPSWASFHEVRKTMYLKVAKDMDMNKIIEKLESVANAKSN

SEQ ID NO: 15700 - DNA, 3330 bp, DROSOPHILA
tcgatcagcataaaaaaagctttaattagaaccaatttagagcgtggaccaatttatcagaagcattttgaaaagtagttgaaaaccagtcgagagcaacttcagcatttccgacggcgggtgttagggaggtgttgccgcacatttcattatattgtagctcaacattagccgacatattattgttatggcttataagcccaactgaagtgaactgaaacagcaaactgaaattgccatttacgcatttgtttttctttgtcaattgttccactatttaagaggtgtggaccaggttcaagtgcacattcataactattatatatttgtaacaatatggagtagtgactgcaagagttaagtgatgggttaatgaacgtgccgaagggaaatatattgtttcgcagataaaagaaatgtttgaaatagttttgaacaatttagggtgtcattcgggtttatcgaaataaatatttgtaaataatagtaaatattcgaaataaaaagaagggcaatgaaaccttgaaatttcaagattgtcatgttttaaaaatttgttgtaattaaaactctacttccaagctgtgcaatccatagttcaaagaaaaatgctgaagtgacagcattcgtgccaggcaccatgctgaagtatttattcagcgaaaactaccaactattggagctgccctcttgttttttatttttgctaacactttcagctttacatacaattgggaaaccagttaattaatttggttcgattcttggcatcaagatggaattcaagacagccgccaaaaaaagttttctttatataacaattcattaattacctttcgatttctggtttttaccttgggcggagtcatgaacccgacacctaatgccattagcccagccgttgcggatctgggattacaatattcgagtgtttggatcgttcaaggaaatagttttattgccagcatagctgatgcaactacaagttgtttccccaattctagtatctatcgtattttgcctttgtgggcaccccaggagcttggccgtttgttgagtggttcaggttctgattattgctgtgatttgctccactattactacttcctgccggcgaggaaagggtatagacctcatagtcggtgatggtaaagttatagtccccgaaaagtgtcaggtgagcagcgttggttccgtcgtaggaatgcggaagattcgagtatgagtccatgtttgtattacagttgctggaaatgagcagatcggctccagcaccaaaaatgggaccgcaactaaaggggaaagcagacatggtaatcagtacgaattcctaaacataatgtaatatataagattattttagacatcacttactcaggatgatagcaaatggcatatggtttctttacaatatcaaacttgaccggctgttccccattggctggattcaaggcaaagaggaaggctcgctcggactgaacatatcccccctttcggcttgttttggcccacgccacatccgtataaccaccactgatctctccatgcgatcccaagccaataaccatgcaaggagccacgccgtcgcaataacgatgaaaggctccagaatcgtagccatgagtggacgctcggaaaactaatctccaggattgcttgcccactccaacccaattattgagaacagtctgtagtgccagattgtcattcttcaggatttgggatccgggaaacatgttgaccgctacagctaggcggggctgaagtctcttatcgttatccatcatcttattggcatgcaaagcggcatagcgatatcgttctagggatagttccataggtacagctcctgtaggttccacttcctccgcgaaaacttggctatcgatgagaagcagacgcacgtgacccattacaccgcttaagtgttggcagacacgagcacgctcctcctcagtccaatgtgcagtgggttgggtgactcctgcctggtatttggcccaggataaaacgcagcgccacacttcctcctcttccaagcagaactattggtagttaacagttttggtaattaaagaaattcagtaaattgagtggttattcattataaactcttacatagtctgaggaaataatcttaataatggcatcctttgttaaagtaaggaaggcattagtcttaacgcactcatttgcattttcccctatgtagatgatgcagcgttccataaacgaggcagcgcatttggcacctgaaatttaaagggaaagtttaaaattaattccttgttttttaaagacactcaacggcttttaccttgagacagcatcctattctatatgtcctgaaatcggatcgtatttgctaccttacccattagaaacacttgattacagaaagtctaccatttatttcaacattcgtcttcagatatcggctttacatttattttacttatattaagggcgttcagcgtttgcaggtggaattcgaaggattcgcaggatggccgctgagtcgcctagtccttcgtgggactgacgttctgtatgagcgtgatgttgtcgcccttgagcatgatcctcccgaggttgcggcgctgccgggtcttcacatagacttcctcggcgtcgtccagcaccagattcatgtactcatcgaatcccacaatgtggccctcgatgcgcagcgatatgttctcgtataaccaaacttgcacgcgggaccggttctgcaggtaacggaagatcaggttgatgggctgcaccatcaccttctgcaccttgggatttcctttgaacgacatttttgctgatttccgacgacttaatttgagttaaacaaattttcgcttctttttgccggcgtcttcttttcgtccaggcgataggcagaaatatcgatggcacagcacagatggtcacacataatcgcggcctaccgaactatcgaccagcctaaagataccaaaatggtaaatcctctggtagcataaccatatcgatagaaacactatcacaatcgcactgttaagtttttgtggttgggcagaagttgttgccatttattcatagctgaattaaactatagtttataaagaaaaccaaacaaatggctatggctaatgtggacaaaggtgaacttatggaccaggttaagcaacagattgctgttgcgaatgcccaggaattgctcacgcaaatgaccgaaaagtgcttcaaaaaatgtgtcaataagccgggaacttccctcgattcgtccgaacaggcaagctatacatatcttattttgcactatagaatatgtatttaaatagtatttcattaata

SEQ ID NO: 15701 - DNA, 1110 bp, DROSOPHILA
atgctgtctcaaggtgccaaatgcgctgcctcgtttatggaacgctgcatcatctacataggggaaaatgcaaatgagtgcgttaagactaatgccttccttactttaacaaaggatgccattattaagattatttcctcagactatttctgcttggaagaggaggaagtgtggcgctgcgttttatcctgggccaaataccaggcaggagtcacccaacccactgcacattggactgaggaggagcgtgctcgtgtctgccaacacttaagcggtgtaatgggtcacgtgcgtctgcttctcatcgatagccaagttttcgcggaggaagtggaacctacaggagctgtacctatggaactatccctagaacgatatcgctatgccgctttgcatgccaataagatgatggataacgataagagacttcagccccgcctagctgtagcggtcaacatgtttcccggatcccaaatcctgaagaatgacaatctggcactacagactgttctcaataattgggttggagtgggcaagcaatcctggagattagttttccgagcgtccactcatggctacgattctggagcctttcatcgttattgcgacggcgtggctccttgcatggttattggcttgggatcgcatggagagatcagtggtggttatacggatgtggcgtgggccaaaacaagccgaaaggggggatatgttcagtccgagcgagccttcctctttgccttgaatccagccaatggggaacagccggtcaagtttgatattgtaaagaaaccatatgccatttgctatcatcctgattgcggtcccatttttggtgctggagccgatctgctcatttccagcaactgtaatacaaacatggactcatactcgaatcttccgcattcctacgacggaaccaacgctgctcacctgacacttttcggggactataactttaccatcaccgactatgaggtctataccctttcctcgccggcaggaagtagtaatagtggagcaaatcacagcaataatcagaacctgaaccactcaacaaacggccaagctcctggggtgcccacaaaggcaaaatacgatagatactag

SEQ ID NO: 15702 - protein, 369 aa, DROSOPHILA
MLSQGAKCAASFMERCIIYIGENANECVKTNAFLTLTKDAIIKIISSDYFCLEEEEVWRCVLSWAKYQAGVTQPTAHWTEEERARVCQHLSGVMGHVRLLLIDSQVFAEEVEPTGAVPMELSLERYRYAALHANKMMDNDKRLQPRLAVAVNMFPGSQILKNDNLALQTVLNNWVGVGKQSWRLVFRASTHGYDSGAFHRYCDGVAPCMVIGLGSHGEISGGYTDVAWAKTSRKGGYVQSERAFLFALNPANGEQPVKFDIVKKPYAICYHPDCGPIFGAGADLLISSNCNTNMDSYSNLPHSYDGTNAAHLTLFGDYNFTITDYEVYTLSSPAGSSNSGANHSNNQNLNHSTNGQAPGVPTKAKYDRY

SEQ ID NO: 15703 - DNA, 5126 bp, DROSOPHILA
cgtgctttgggatcaggaatttcctgagcaccattaaatctatctcttgtcaagaagtagccataatctaggtcttttataaaagagcaagtattcaaaataatttttagttccgaaatgcagatcatcgtgaaattgctggtgagtaagctagtaagtgaaaaagtatcataagctaaaattaaatcttccgcagattgtcgtcctttgggcattatttggtgttgtttctttcacatcaaatagtctacataaaatgtatggcaatagcgcctggtcctgcccaccatggtgtagcaattaaatggcgagaaaaagagatacaaaaggttcaactgtagttgttctcgatgtcttattaaaaagtgaaatacttttgacttgtgcattaacttttatttataatttgatttaataaaatgtttgcgcaatatattactcacataaattggcgacagcgccctttagcgcttttgcattctacaatggtgcggaactatagctaatcccattgtccaccattaaatccatctcttatcttacttagtgtatctcaaatcgtagctcaaatataaaagagttcaacataattttcagttctaaaattcaccttattgtgaaattcctggtgaattatctagtcagtgaaaattatcttacgcttacattccatcccacttagaatttgcttttggcattattagctgcttgtgcgttttaatgttatccacgggaatacgataattcaaaatgagataatattgtttaactgtagttgttctcaatgcctaataaaaagtataatacttttaacttgctttatttattgtaggcaagcattgaaatgtatgcaaaacataatatttatattgacgaaagcgccctctagcgtatttccgatgtacaaactttttgtactccgtatccgattagttaagtcatataatctggtcacacagcaacctaaagagcgccataattttgtgaattagtgcactcgttgcatttaagccacaattatgttggaaaccaattacaatgctgacacggaggaagagccggatgtgcctccaccaaccaccgcgttgtcgggtcagataaaggcgattggcaaggatacagtgcacaaaatatgctcgggacaagtgagatacaaaattattttttttcgttcaagttccttagacctggactcaattcattttaggtggttctcagcttggctgtggctgtcaaggagctagtggagaactcaatagatgcgggcgcaacgctggtggagatcaagctaaaggatcagggactgcagagcgtagaggtcagcgataatggcagtggcgtggaggaaatgaatctggaaggcatgagtaagtgcagccaaatctacaatgatgcggaacaatagttaatcccactgcacacagctgcaaaataccacacctcaaaaatccgagagttcgtggacctcctgggcgtggaaacctttggattccgtggagaggctctgagttcactgtgtgccttgtcggatatggttatccaaacccggcacaagtctaccgatgtgggtgagttatggacggaaccctacgtttaacgctacttttattccattaaaaacgtccacctttctaggggttaaggtggaactggaccatgagggcaggatcaagaagcgatctccttgtgcccgtggagttggcaccaccgtccttctggcaaatcttttttccacactgccagttcgtcggcgtgactttacccggaacatcaagaaggagttcaccaagatgtgccagattttgcaggcctattgtctagttaccaaaggtgtccgcatcctttgcagcaatcacactcccaaaggggccaaaactattgtgctacaaacgcatggtgaccaggaggtcatggccaatatatcagccatatttggagcacgccaggccgcggatctggtgcctttaaagtctccttttggccagggccagctgaccgaggcggaattgcgggctgatctagaatctggtgcagatttagccgatactacttctcctcaaatcagcaccgaggatgtagagcgtcttaatcaggcggacttccaactcgaggggttcatttccagttgccgacatggtgctggacgctctagcagagatcgccagttcttttttgtcaactcgaggccctgtgaccctaaaaatgtgagacaaacccctttaaaatgcttaaataaagtaaataatttatactgcagatagccaaggtgatgaacgaggtctaccatcgctataacgtccaacagcaaccctttatttatctcaacatcatcacggcccgttctgatgtggatgtgaatctcacgcccgacaaacgccaattgctgataaacaacgagcgaattcttctgctggcgctgaaaaaatccctgctggacacctttggccaaactccagctacatttcaaatgcaaaacaccacaattgtgagcatgctggaacccaagacaaattctggtaaaactaaattccctaaagaatcaagtaaggacgaccaacacgaagaagtatccgaagaagatgtacccactacctccacgcaaaggtttatggatgtgctcacccagtggcgacgtactggcgatacaaaaggtacagcaccgtcagttccagtaaagcgccggtgcagtgaatccgaagaattggttacccgaacgttaaaaatgcaaaagattcatacatttctcagccaagagtcacccaatgagcagagttccaaatgcgaggcagaatctgatgcagcaagtgatgttgacatggcaaaaaaagacaagacgcaagtctccttggataatagtttcctgaacctgaaagagctggctaaggagtctgagggtgagaaagcttaactatcatatcatcgttaataaattttaatttattcaaattggttacagcttatgatcttttaacgaaaccacagaatacacctcgcattgattgcaaggttctgaccccaattaaaagtcgtcgcagtattttcgagtttaagactgatgctatggcattagacaaacaggaatcaccggcagaactcaattcccaaccgcctagtttcactcagctgtcggaagaaactgatattgctagcgacgaagatgaccacattgagctgcccactcggattgagttcgatgaagagatggaggagggtctgccatcaaatttttcaagcggggaaataactacttctctagaggagatcgcatcttctttaaaggcccacgagcaacagcagcgtgatcggaggactcgaaccaaacttcagcgtctgcgcttcaagacggaaattaatccgaaccagaacaccagtgcagaagcagaacttcagcgtgagatcgataaggaggatttcgcccgcatggaaataataggacagtttaatcttggctttatcatagtcaagctagaggatgatctattcatagtagatcagcatgccactgatgaaaagtacaactttgaaacgctgcagcgcacaactcaattggagtatcagcgcttggcagtgccgcaaaatctcgaactaactgcggttaacgagatggtgctattgaaccacattgatgtgttcgagaagaatggcttcaagtttgaagtagaccacgaaggtgggatttcaactgaccttctgttattttacttataaacgattgccatttcagctcctgccacgaagaaggtgcgtctgttgggcaagccgcacagcaagcgatgggaattcggcaaggaggacattgatgagctcatttttatgctgcaagatgcgcccgaaggcaccatctgtcgcccgtctagggtgcgagctatgtttgcctcacgtgcttgccgaaaatcggtgatgattggtacagctcttagcaggaatacaacgatgagaagactgatcacacagatgggagaaattgaacagccatgggtatgtaaatgtacaatttggaattaagaattgcaaattctcagttttatagaactgtccacatggacgtcctacgatgcgacacctcataaacatcgcaatgctaattaatagtgacgaaaacgatgagcaagagcctccggcctaatagaaacgactatgtgtaaaaaatcagttgttaaattattgttgcagttttaattttatttaacttttcgtttgagccactaagtatacgtcattgttctgtaaatgcttacttgattaacgattaaacgacaggatcagacttacatctaaagacaaatacaaaggttatcacttgagtatgtctaacaaactactcgttttgttgttttgttttataactattactagatgttacactaaatatatatatatatatatatatgggtacgctttatataatttgagaggctacaatactttagggtatatgtgtgctatgttttagttttgattactaaatgctcctcttctttagtgactattcgtacctagagtcggttgagaaattcaacgatttggcaaacagtttacaactaccgcatttgaattaaaatgtttgtcggttgtctttcgtagttggccatcacttactctatgtattttggcctattgccccatgtgaactcgtatcttacagctgtcgtatcgtacacaaacagtttttcaccgtaatgctagagttatgtgtttaaaactataagtttgctaagccacaagtataattaaacgctacattcttcctgtttagtgtataaaatgcatggcacccatagggaacaaagttcgttgagcaagttaccttagaacacaacactacagtaacttagtgactatgactacagctacactttgatccaatattcttttcatttcgattccagttttccacatttcgtttcgtttttcgttcgcgtcgttcatacattttgtaaataaaaggcaactcatgaacattttttgtttttaacaacaaggggccatgagcctcacgctgatttccccccatctcactttaacaaactttgcaggtggttcagttcttaggtgttacttgtttgttggattagttatctttggaaacaaatagtgatttgtcactggaaacagggtgaagttag

SEQ ID NO: 15704 - DNA, 2719 bp, DROSOPHILA
ttgcatttaagccacaattatgttggaaaccaattacaatgctgacacggaggaagagccggatgtgcctccaccaaccaccgcgttgtcgggtcagataaaggcgattggcaaggatacagtgcacaaaatatgctcgggacaagtggttctcagcttggctgtggctgtcaaggagctagtggagaactcaatagatgcgggcgcaacgctggtggagatcaagctaaaggatcagggactgcagagcgtagaggtcagcgataatggcagtggcgtggaggaaatgaatctggaaggcatgactgcaaaataccacacctcaaaaatccgagagttcgtggacctcctgggcgtggaaacctttggattccgtggagaggctctgagttcactgtgtgccttgtcggatatggttatccaaacccggcacaagtctaccgatgtgggggttaaggtggaactggaccatgagggcaggatcaagaagcgatctccttgtgcccgtggagttggcaccaccgtccttctggcaaatcttttttccacactgccagttcgtcggcgtgactttacccggaacatcaagaaggagttcaccaagatgtgccagattttgcaggcctattgtctagttaccaaaggtgtccgcatcctttgcagcaatcacactcccaaaggggccaaaactattgtgctacaaacgcatggtgaccaggaggtcatggccaatatatcagccatatttggagcacgccaggccgcggatctggtgcctttaaagtctccttttggccagggccagctgaccgaggcggaattgcgggctgatctagaatctggtgcagatttagccgatactacttctcctcaaatcagcaccgaggatgtagagcgtcttaatcaggcggacttccaactcgaggggttcatttccagttgccgacatggtgctggacgctctagcagagatcgccagttcttttttgtcaactcgaggccctgtgaccctaaaaatatagccaaggtgatgaacgaggtctaccatcgctataacgtccaacagcaaccctttatttatctcaacatcatcacggcccgttctgatgtggatgtgaatctcacgcccgacaaacgccaattgctgataaacaacgagcgaattcttctgctggcgctgaaaaaatccctgctggacacctttggccaaactccagctacatttcaaatgcaaaacaccacaattgtgagcatgctggaacccaagacaaattctggtaaaactaaattccctaaagaatcaagtaaggacgaccaacacgaagaagtatccgaagaagatgtacccactacctccacgcaaaggtttatggatgtgctcacccagtggcgacgtactggcgatacaaaaggtacagcaccgtcagttccagtaaagcgccggtgcagtgaatccgaagaattggttacccgaacgttaaaaatgcaaaagattcatacatttctcagccaagagtcacccaatgagcagagttccaaatgcgaggcagaatctgatgcagcaagtgatgttgacatggcaaaaaaagacaagacgcaagtctccttggataatagtttcctgaacctgaaagagctggctaaggagtctgaggcttatgatcttttaacgaaaccacagaatacacctcgcattgattgcaaggttctgaccccaattaaaagtcgtcgcagtattttcgagtttaagactgatgctatggcattagacaaacaggaatcaccggcagaactcaattcccaaccgcctagtttcactcagctgtcggaagaaactgatattgctagcgacgaagatgaccacattgagctgcccactcggattgagttcgatgaagagatggaggagggtctgccatcaaatttttcaagcggggaaataactacttctctagaggagatcgcatcttctttaaaggcccacgagcaacagcagcgtgatcggaggactcgaaccaaacttcagcgtctgcgcttcaagacggaaattaatccgaaccagaacaccagtgcagaagcagaacttcagcgtgagatcgataaggaggatttcgcccgcatggaaataataggacagtttaatcttggctttatcatagtcaagctagaggatgatctattcatagtagatcagcatgccactgatgaaaagtacaactttgaaacgctgcagcgcacaactcaattggagtatcagcgcttggcagtgccgcaaaatctcgaactaactgcggttaacgagatggtgctattgaaccacattgatgtgttcgagaagaatggcttcaagtttgaagtagaccacgaagctcctgccacgaagaaggtgcgtctgttgggcaagccgcacagcaagcgatgggaattcggcaaggaggacattgatgagctcatttttatgctgcaagatgcgcccgaaggcaccatctgtcgcccgtctagggtgcgagctatgtttgcctcacgtgcttgccgaaaatcggtgatgattggtacagctcttagcaggaatacaacgatgagaagactgatcacacagatgggagaaattgaacagccatggaactgtccacatggacgtcctacgatgcgacacctcataaacatcgcaatgctaattaatagtgacgaaaacgatgagcaagagcctccggcctaa

SEQ ID NO: 15705 - protein, 899 aa, DROSOPHILA
MLETNYNADTEEEPDVPPPTTALSGQIKAIGKDTVHKICSGQVVLSLAVAVKELVENSIDAGATLVEIKLKDQGLQSVEVSDNGSGVEEMNLEGMTAKYHTSKIREFVDLLGVETFGFRGEALSSLCALSDMVIQTRHKSTDVGVKVELDHEGRIKKRSPCARGVGTTVLLANLFSTLPVRRRDFTRNIKKEFTKMCQILQAYCLVTKGVRILCSNHTPKGAKTIVLQTHGDQEVMANISAIFGARQAADLVPLKSPFGQGQLTEAELRADLESGADLADTTSPQISTEDVERLNQADFQLEGFISSCRHGAGRSSRDRQFFFVNSRPCDPKNIAKVMNEVYHRYNVQQQPFIYLNIITARSDVDVNLTPDKRQLLINNERILLLALKKSLLDTFGQTPATFQMQNTTIVSMLEPKTNSGKTKFPKESSKDDQHEEVSEEDVPTTSTQRFMDVLTQWRRTGDTKGTAPSVPVKRRCSESEELVTRTLKMQKIHTFLSQESPNEQSSKCEAESDAASDVDMAKKDKTQVSLDNSFLNLKELAKESEAYDLLTKPQNTPRIDCKVLTPIKSRRSIFEFKTDAMALDKQESPAELNSQPPSFTQLSEETDIASDEDDHIELPTRIEFDEEMEEGLPSNFSSGEITTSLEEIASSLKAHEQQQRDRRTRTKLQRLRFKTEINPNQNTSAEAELQREIDKEDFARMEIIGQFNLGFIIVKLEDDLFIVDQHATDEKYNFETLQRTTQLEYQRLAVPQNLELTAVNEMVLLNHIDVFEKNGFKFEVDHEAPATKKVRLLGKPHSKRWEFGKEDIDELIFMLQDAPEGTICRPSRVRAMFASRACRKSVMIGTALSRNTTMRRLITQMGEIEQPWNCPHGRPTMRHLINIAMLINSDENDEQEPPA

SEQ ID NO: 15706 - DNA, 7584 bp, DROSOPHILA
ggaggccatctagtggaggttagttgggagtagtataatttataaatacacaatacgttttacaatatatcttcatatgcctggccagccttggggcccattaaaactccagttattattgttcgtggggcggttgtggaagttttcggggtaaaatatttacaattttatcgcacttttaatttttttttatttcttgtttgaccgcgcaaaaagaagttgaaaatccgcacttagtctacaccattaagggttttttttcagagtttttctttttcagagggacggggttgctctacaacacataggtacatacatataggtacattttacacttcgggcttacccaaaggattttaaaaattattgttctagcataggaactgttttatgtccttttaagttttccagtttcatttcaattctgaatttctgcattctaaaccagtaagtgtaattcagttcggggtagagggaaaaccatgtttaaactttttgaatggtatacaaacatttcaaaagtgtgtttctaagacacacttctctgctgggcaaaaaactttgcaaatattccttgtgttatgagaaaaatattattggacttatgtatattctttagcaaggagcctgcttaaagaaattgactagttttttgtaataaatactaataaatgaacttaaagagagtataatcaaattaacatttgcatatggaggaatcaaaagggtccgctaatataattttgtaaaaggactcaagcatttgaaagtgattttgcaaagtgtccttcacaacatttcaaaatggcacaagctcattcaaagtacttcaaagcgaattccaggacaatcctttgctccatttatttgtccattttcacgcactttgctttcgtttcaattggattttaatcctgtgaacatttccgacactattgtattgtatcccctttttcggacccagaacatttttgcttgcaacatggcttcccccggcccctagtttccgtgtccatagtcgtggtggctgttgtcgtcaggtgttcccagatggcttaataacgcccatagttgggcccgaaccgggctccatctccgcccaactcgtccagggcacccatggcactcagtttctgcagccaggcggcattagagttgccgttggacacgcgtggattgttgatgttgctgctgctgctgctgccaccggtggcctcattgtggagacgcagctgtgggtgttgctgctgctgctgctgctgctgctgctgttgtgggtcctcattgctcaactccaaaatctgcaaacacaaaacgcaagacgggcagagaaagatttaaactccgagctgttgttatggttgttataattatcgtatagttgctgttgttaacacgactcgaccccccgccgccttgtgatgatggagtcagttatttcagaaatctgttgaaatcttatttatccaacgtgggaagttcgtcacacatttttcgctatcttcgtcttttttgttaattttaatttttctttttggcgcatcattaaatcgaatgaactttatctgtaacgacaaggcggcctgcttctgttgtttgcttggattaacccactggtttcgtaaagttaagtatttaagttttaaagaatttaaatttgctgaatacaacaacttgaagtgtgcaaaagtccgttgtcttgagcaattaactccactttaatagcttctttaaaatggaagcatttaaaaacctatgtgttaccatcacccattcaaggcaactgagatatctaaaaaattcgaagaatctatcgagttggtttcactgctagctaaaatgggttaaccagtcttggagcatcttaacttggctaccaacttttggctcctcatctctgctgctgtgagcactgatgagctgaatatgtgttaatggggggtattgtcgtgtaattatcagccgccaacctcttttctggctaccactgtaagccctgtcgcttttgcccctttgcagctgagcttttgtcttctttttttttggccaagactggtgatgatgtgtgaacaaacactaacaacagcagattaagcgaaaaacctaaaacaatttcgcgccaagtaattattttattgctaattttgaaagagaagaaaaaagacagtattttgtttatattttcgtacagtttgcaatatttccctcctttcgctttccttgacttaaatggcattaatggtctagaggtctacaggaaagcgatgatgactctgggattgttatcgcattgcatctgtctaacagggggaaggttgagttttccaggggttgaggggtggtgtcagctgggttcatctcccttcttttcattaaggcctctttggacagtttaatttgagagttgtcgttaagtgaaaagttatgtgattttatttggcatccctctccctttttccagctatctttgtctacttccatgaatcgatctctttccctctttcggccaggattcggaatttgccgattggaaagggagttggcagatactttataaataaacagctgcgtttcgactggattttatgcgagggggaatctttggatgttgaagatgggttgttttgggttcggcaatttctgcccattctgtggaatgggccacttgatgagtggtgggatttgttggctaagacatttgtggcaagtggaaaacgaatgttggaaataattgccatcaattggacataatgttgtcatgggaaagggagaaaccaaagaccctagaattattattctagggtctttggagaaaccttctataaaatatagcacatatttcttataaagtttatggattgttgttaaagaatagtgaattggtaaaatgtaatgtgaatgttaaacttggtaaaaatatcaaaccgatagaattcacaaaaagctgcaaataccatttatttataccatttcattaagaagcttaaactagtaaataaattttagccactttgtcatctacacttgagatttatactgaccgcattaaattgtctgcctaatggattacgtttaagaccccactcatctcttcattaaattaacattgaatcaaaagctcaagttcatcctcaaattagtttcaagccccttaaccaattataaagtttacccacgtaccattttgcaacccctgagctgagtcgacacaattataatccaatatatctctaataagtcaagagcattatgaaattgtcattttccacattctataacacaaattgcttctgggaattccgtcgtccatctccattgtcatctcgggccaaaagccaagggagattcgaggggatgtgtatgtcgtgtcctcctgttgacatccatcccgtggaaggcaataagctaaaggccaagttatgttgtctcgtgtccctaatgctgctgttgctctcagcttttttttttagcttctcagctactcaggttcaatgcattattgtgtgtcaagtgttttcatttcgcattctgcttgtttttcccccctccaactgccgcctgtcttcagagtgacgtagtcaagtcaaccttcatcagcggcaatgcgaccacgtcaccgtcattatttgctatttgacatttgatttcccttttctttcgctcgatctcatactttttgccatgctttatttttctgctcggctttttgtccaaacatggtcttctcttggtctttggtttttgatttttggtctttgtctgcgcgacgacgtcagcgacttatcgatttgcagggaccatgactcagaaaagagtctgcaaaggggttgagagccatgaacgtccatacattcagggaaaattcaacctagaagcctggaccggaaattctagatcaatcttcgttgaaacattaaatttgcgctgtcattgactgtctattaatggggagtgttaaatatacatatggctaacatcccacattttggcaccaaatatgtatattcgatattaatacagcataatatatatattattgcttatgattcaattgatttttttcagtgccgtatctgtctgctacagatactcaattcgttggtagacaaacagttgcatttaggcattttgtaggctaaagtcgcgctgacttgcagctgcattggatttgtgcacatccaaaggcagctaagtggggcttcctcgccgaatcccctggtgacccccgtttccctgaaccctcgattctcctaccctcctagttgagccgcatttttgtgtcttggttgcgaaaaagaacaggaaactgtgccgaaaaaaaaaaaaaactacagacgcacacataaagtaacaacaactgccgcggtggcggcgaatcaaaaattgtgcaaaagatgaggtgcccggcatgcaagtgttggccaagttggcgattgtagccgagcaggctcctccgtggatggagggggggaaaaagaagaaacgcttgcgaaatatgtaaaaatatttctgaaatggtttgcagacgcacaagaaaccgcagcgccaggagattggaacaagaaagagaaaaagagagatggtgcggttagcaggaatcttcggtggaatgattggggccgtggccgagggacctgtgtaaccttatatccgagactatgacgtaacctccattccattccatttaatgccactcgactcctcgccataagtgaccaaaaacaaaacaccaaaatccaaaagagcaaaaaaaaaaaaaagaaaccaaaaggtagaaacgcacgaaaacaaaaacacgtcgaaaataaaacctcaataattggcgacataattgcaacttaataccacgctttggctctcttttcatttagttaattatattgacagcgcaccaaaaatgccaatgcacaaaactcggctgaagtgaagatacccatcgaacactcactcagatacactgaagaaatgttcaataatggatcattttcatctggcgatccattaaagcgtcaatgataaatgtgaaatgataacagcataattcagcactccattaattaaggcatgggtcatttagtagtaattatgtacaccaatatttatgaaaaccactatgcaatttatctaaaacatatttacaaacttaattcattttgagatgttctttaaaaattgattatttaatacattgcggcgttgcttttaattgaaaataaatgtatatttcttatgtcctcgttatctgaatatatttcttcacctgactattgtgaaagatatattttaaagtatttagttttaatatttataaagtatctaaggtttgttttaattgtaatgcatctcaagactctgtaacttcctggcaaaactatttacagatgcaccaaaactttcgcccagtgtagacttgctcacctgcagcatcagttcacgcaacttgtccaaatcgtcgccatgcgaccttgtcggcaggtaacggccgtcgaccagatgcggtgggacgaccaggagcagcaccgtcatccaaaccaagagccacctgtgtccacttccacagccaattccagttccgtgactccgtggcactcccattgttgtcctggttgggggcgtggcaccgggctgcaaggagagagaggcaagtatgtgtaccccttgcagcattgcatgaaagacgaagacaattgcaggatgtgtaattggcatggcaatgttgatggcttttaaggtggggtcgcagtgggaataaaaacaaaccagaaatgcatcgcacagactcacagattgcagggaatcgagtgactgataatttatttccgatgactgaagcagagtcatccactgggattcctattaatttactcataaatcttgcaagcatgcatctgaagcttatctctcgggaatctattattaatttgttaagtttgtcttgtattattcagatcaattttggagactgttagttgggaataagtctagatttgttaaaattctgtaacttttttatatttcacaatcaaatgaaacgatgaaacttataaatatttgattggaatttttagagtctcgttctacaactttaacttctgttcgcgtgtatttcttttcaagtggcgcctccgaaaaattcaatttaaatgtaattcgcgttttcttgactgcgcagtaataataaaactgcagcggagccacttggtttgtttacccaatcgaaagaggattacacaatgctcgaaatttatgattatggcactgacactgaaaccagaagcgaaggcaactggcacatctgcacctgcagcccgctgtgactcacggtttgtgtttttcgatggagtttcaagttacggagttgtcctggcgcgagtgggtggctaagtattccgtcctaacaacgtcacgtagcgaatgtgttttgttcggcgaagttgaggagaccccgagcgatgttgtgaactaggataacaatgtaagtttaagccaagctgcgtgccgacatttgtatttatagccaaaattgcggcactggccgagatttggagatgacgccaggacgccgccgtcgccttcgaccacggcccggatattccgccctacgaatgcgctacgcccctatggggaattcgaattagcctttggtttgtcctgtctccgaagccgagctctttccccatttcacttttagtgcgcgcgcagcgtcgggaaaagccagcgaaagtaccaaacaacaacatcctatccatatcattgtcaccacacactcgtttacatgtgcctgtggctgtgcgcgaccgtgtttgtgtggcctcgcatttctattgtcctgttctcgggcgtcatcatcataatacgtatacgcccagcacgcccaaaaaaaaccccgccataccagcatcccgaacagaaagcttcatctggcgaaatggtttcgcttggccaactttcatggttaagttactgcgggttttagtgggttgttctagtcatcgtggtaatgggtcttaagtgggtatataggaggaactgaaataaatagttcgcatggtattaaattaaaatgtccacgataatatttaaattcgaaataactattgagtgcatgagtgcacaacaatttttcattgataatcatcggttttttatttacaagaaatgtgtcctgtcccttgctataatcataatacagaatctaaacataaacagtttaagatttctaatattttcatatagcagtattttgttatttgattacagggtatctcttagttcaaaaactttgttaccgcactgttgctgttagtagttgctgttgggactgccgtcgtcatggctgcaattgttgacattgcgggcgtcaataaatgccccagtccttggtgctacgactttggttaacgttaactggagcccagcactcaattgttatggtcttcctccgcgctgctgggatatgtgcggctggctatggctgtctgtgctgtggtgtcggtgaaatggaccatttgaataccacgcacgaccgatagaccgaaatttttgatatagcgcagttttgtgtagccattgctgtgattgaat

SEQ ID NO: 15707 - DNA, 770 bp, DROSOPHILA
ccgtggtcgaaggcgacggcggcgtcctggcgtcatctccaaatctcggccagtgccgcaattttggctataaatacaaatgtcggcacgcagcttggcttaaacttacattgttatcctagttcacaacatcgctcggggtctcctcaacttcgccgaacaaaacacattcgctacgtgacgttgttaggacggaatacttagccacccactcgcgccaggacaactccgtaacttgaaactccatcgaaaaacacaaacccccggtgccacgcccccaaccaggacaacaatgggagtgccacggagtcacggaactggaattggctgtggaagtggacacaggtggctcttggtttggatgacggtgctgctcctggtcgtcccaccgcatctggtcgacggccgttacctgccgacaaggtcgcatggcgacgatttggacaagttgcgtgaactgatgctgcagattttggagttgagcaatgaggacccacaacagcagcagcagcagcagcagcagcagcaacacccacagctgcgtctccacaatgaggccaccggtggcagcagcagcagcagcaacatcaacaatccacgcgtgtccaacggcaactctaatgccgcctggctgcagaaactgagtgccatgggtgccctggacgagttgggcggagatggagcccggttcgggcccaactatgggcgttattaagccatctgggaacacctgacgacaacagccaccacgactatggacacggaaacta

SEQ ID NO: 15708 - protein, 117 aa, DROSOPHILA
MTVLLLVVPPHLVDGRYLPTRSHGDDLDKLRELMLQILELSNEDPQQQQQQQQQQQHPQLRLHNEATGGSSSSSNINNPRVSNGNSNAAWLQKLSAMGALDELGGDGARFGPNYGRY

SEQ ID NO: 15709 - DNA, 10443 bp, DROSOPHILA
tttatctaaaagcagggatagttgggaaaggtcacaattgaaatatttacattttttgggaaatggattagacatgcagatggagatattatcgttacttggcgggttcaataaacatttaagcaggacaagtactcacacaatgcaactcccttctcccatttttgcctcaactcagctatatatatttatttaatgttttttttttttcatttatttgtcaatccttaaccaatcgctaagcaagagatgctaatttaaggttagttctttttttcgagaaagttaattgaacagtatcacaagagttttaggtttcgcaatcgaacaaatttgtttgttgtgtgtgctgtgttttttttttttttgtggactctaagaataatactcgacatttttaatctaaaacgaaacacaaaagaaacagaagtaaaaacatacatacatttataaagtgacttaaattacgtaaactatatatatgtacagagtgtgtgccagcagttgaacaaataataagtttaaacaaaaaccaaaaaccaaacagtgggacctgagaactctgaactgataactactaaatgtttttcactaattcattttctactttaactgcaaaaaccatatgaatacccattagttatttgctttatatgggaacttggccatgcgattggttgctttaatatatcaaatagctagaaactacaatgctgaggaattcgcgcagtatgaatttccatggttttggaaacctttccaagcaatggcttttaaattctattaagtaattctattatttgccagaaaactatcaactgtacgaaatggctataataaataagcgaggaacttgttgggacagcttaagctagggagccaccaccaggaaccaaccgcaaaccaaccaaggacgagcacaaccgttccccagaccagaccagatcagaccagaccggatcgcaaccaatccctgcccgtggatccctgcctcgagggagctgtgtcctatcgggagccactcacgtcggtgcacttgcactgcgtctcatcgaagacggtgccggtggtgcagctctggttgtagcggcaaacgcaggtgcaattgtcgtccacccaatacttgttctcggcctgctccaggcacttgtcccgggcatccgtgttgtggcactcgcagcggcacaaatccttgcgatacgactggtacacgttgcagtcctccgccttcgtgcgacaatcgcagcggcactgcgtatgctgctccacggtgatgatggtgaacggtctgcgtccgctggtggccgcccggtccaccttgcgcacccgcagctgcacctgctctacctccgttggctggcaggagatcagcgtggatccgcagcatccattgcatcggctgatccgcgtgcacgcgggcatatagtagtagttcgcctcgtcctccgccggtggcttcagctccacgatcgtcggttgcggggagcagctcgccggcgttgcattcctcacggttgctggagattgggaatatggtaattgggatattaggttcccattttaaaagcaagtaaaaaatatggcttacatttcatgatgctgcgcttaaagttttctgcaaagagaatgatagtttacaaatagtatagtttagttagttagatacacaggtgtccagatactaacccttggaggagggcatctcgccggacacatcgtagtcggcggtcacgttggtcagctcagcggacacggacagtgggagctgtaagatggattggacatggattcagttcacccgcaaattcatttggatttagtcatgggccactactaccactactaccatacgtatcgacgtcgagattccattgaaaaacgtacggcgactgcatagaaatggatggaataaacaccaaatcgacgccatcgtgcgtcacccagttattttgaccgtatttcggtagccgttccaagcggcggaggagcaagtgaatccacatccacgtaaccacgtgcccagttctcggcgccgtcgtcgttttgctttcggccaatttgcacgtacgtatgtcgttctgacggtagctctgggccatgattcattagcgacatttgccaccgttaattgttcgatctggcggagatcgggggcatatgtgtgcatagatttgtagaaaacagcatccgcagctgcgtcacaatgcggagaaagttcaagggcaaatggcaaacgatcgcagaggaagtggcacattttatgagttaactaaccgccgtgataataacgatcgtaaagaaataagccaggctaatataactatttgtacagtgaggtgtgcgaagttaaggctattattgatattaatctgccctaaaactgttcttatctttgcatcaataactgcttttttaatttttaaatatttgtaaagccacgttttaggcaaatattccagcaataggcagtttaaatattaccatttaattatgagcatctttttttttttactcaaaacgtatgtttaccacgaattatagattctacatatgtttttatttatttattgataagcttccaggaagcgaatcgcatttttaacactaattggcatccgatatcggaactgtttttgtttcgacttctgtgccgagtgcccagaaaccgattccccacttgtttacccagccaatatgacaactccaacgtaatcccaataaaaataaagaatcccagaagagaaaccctttcaacatgattataaaaatgtatgtatatttacatacgagtatttctcgccgggaaaggaaatcttttgttgatctggacagcaaggcaaacaaaactttggttctcctgggggtttgggttggaaagtactggaggtgggggaccaattaaaaacgtaatgcgaattatttgttttggaatcaaggcggttagtgcgctatcaatgccaaagacgcagacagaagcagaaaggcgatcactgagagaaattttagtccgtactctaaagtaatattgatccaaaaagaaattcattcaaaaagtacctcagaaatacaatacactacaaagtagaatttgttaagtgaaaaatatttaataaaatataattaactgctcaactttatagatacttagtaaattggtttcaaaagtatctacaagttactgctttaataaaaaaaatataaaattagcttgctagttacaaaatttagttaaaactgtacttttggtgtgtagtttctattcccatttcgctgcgtgagaatatgctgagacaacggcgccactgtccaccggctgctcccgatctttggtggggtttggggtctgggattggggtctcagatctgggatctgggatcgggttgcggttggcgttgtgcagcgaggcagcgccttatcaagctgcaaacaaaacgctgcgatgacgctgacccaaaaaggcgatgtctctgggcgacacagtggcgccatctagatgcagccataatttatagtaatatttgctaaataacagactaactaaaattcttaactcttatcaaacttatcgaaaagcacgttcttggtatttcaagcagtgtaccaaaaaccaaaatatagagtaatgggaattacccttgaaactttgaaaaatcccatttattatatcactcgaatctttctgataaaaccggaatcggaattttcgaaaatatatctcttaataatatactattatcaaataattttcaaattagttttaccatactgatggatgtgtggagtgattgtagcatttgtcttaccgtcaatggtgttccggcttccgcagctgctccttggcagcagctgccctccagtgcacccggcgccgcactgggatcgtccgcctggcggagcaggcgcaccttggtctgcgtggaggaggaggacgtggcggcggcgtagaagaacctctgcgatggttgcctgttgttcggggacaccaaggagcccgccgctgcctcgctgacgatcaggacgagaaggagcactggcaggatgagcaatggatgctgcatgggcttcagaattcggattcgggacatggccatgcggatgcgatggaagaacagttttcaatggcgttagaggacacagaatccgttacaattatctaaaatcaagggatgaaacatcattgccatgcaattaacatactttattaataatttattaatgtactataatttgcggaagtgaccttccgaatcgaatggtgagccatgtttgagacatatgtacataaatattttcggaaactccaaattcagcttaatttggtttggaaaattcttcaaagccgcgaagattcgagaaggtaaagatttcttttcatttgaaaatggttatattttttgaaatttttttttttatgccggtagaagtgtgaagtcgccttttattcccagacttcctctgactgatttacgacttgatatatgtatgtatgttggaagatgacagagtcagagattcatattgttttcctagggttaatttactttttccccacaatgtcaattcttcgggcagcaggtggtgtgctcttcaggtgtgggtgacaggtgggcaggcgggcgggtggtcacgtttcccattcgaattggggtcagttcggttatgaacgcgatgttggccaacgttggaggcagcaaaaaaaaaaaaaaaaacctgcgtcggccaacttgacattgatacaaaacgtcttatcatcactccgagggtacgagggtatcgtgcgtcaggcatatcaatgagacaatcaacctgccgggggacaggaagcaccgggcgtgttagtcaccagcggcactcgataaacaccccttaatctcgattgaaatcgtaaagtttgcgacaaatatcttacaatgccaattgtaaacaattgtaaacaattcaaagaacaattaggtgtattaggtgcatagggtaaatcaagcaattgtggctagttcaagatggttactaaacgactgagtcacgcatacgcccctggcgcacactctttacatggtactaggcaatgcaatgccactaccactaccacttttggctatgaatgagccgcgtttgttcgaccgtttcttttattatggccatgccctgactcataaatcagctacacttgtggccattaaagccctcgaagccaagtcaaaaggcggcaggattcttgtgtaatcgccagcaatctagaagactcaagcgggaattcttcagttcgtttcctgtctttcaaactctatttcgaatgctaagtgcgtagggagtttaatatttcctgcatatgaaaagtaagactcagctactgattatgttgcactcgaaggaaaagtgcaataattggtcgaaaatgaaattataggtaaaattaatcaactgcagaattcgcgttctgctttcgaacagaagaattcttcttcttatgctgttaagccaatgattttatttccagtgccggctccactgtggctctcgcatttaatgcatttcattattatttgtttttattctcgtcgctcccttgttcttattcttttttacttattcttgcgtactgcttaaatatgaaaattcttattataggtcagttcgcgtttccctttcagctgcacagtctgttcttcttcttcttcttcttcgtgggctgtcgataacgtaacgcacgcctagtgatagtgataagtcccagtaaaacatactaaatgcacatgcatacatacatacataaatatacagatttgtatatagcgtgctggtcaaggcgctttatcagcctagtgaatagcaaataaaatataaatggctattgtaaaatcgcaaaaggcgttcattcattaaaatgcaaaacaaaaaatagaagacgaagaagtgagaaagatgtaaacatagccatatgctcccccatggatcggaaaatatatacatatgtaatgtacatacatacatgtatattgggtctggaaaaaaaatggactgctagattccaagagcttgcttcgctaatttagtatagatataaacaaatagtggtttgggtaaccaacttcattttaaattcagtttaatcgaattttggatgtacggcgaatgaaattttgctgaacatgataccatgatagaaaaatagttggatgcaagtttttaaggaggctttatgagcctattttactatacaaataacttttataatgcaactggcaaattggaatgatctttattaaaacgtacaaagttttttggaaatacttgtatgaacttttttgtacacataacaaagtgtggaaagtttttgaagatgccgactaatgggttaatgcccattatatgtatatacataattgattatatttctctaatacaaagctgtggaatatgcggacaaagcgttttaaagtgatcctggtttcgtgcagtgtatgagggcaagacgaagaaaagcaaagtgagaagtggtgcaaaaaacaacacaggaaaggagatagcagaatgggtaagaggggtgtggaaaggggtggggaaggagagcaagatcggatggtgttaaaaatagctttaagctcgccttgtaacggtactcctcgggagtttcaatttgtgtgtatgtttctgcacttgcgttttaggtgcaatgggtgcacaagtgtttatttgtgggctgcaatcaacacacacacacgcacacggaattcagctatcattgttttcctttctgttttccttacatttcttggctctttttaacagttaagcaaataccgattgatatgacagaccaaacgttgttattcttttcatcgctctccctccctctctctttctctgttgccaggtgtcacgcacacctgtgtgattcatcttgacattcctctgtgccgtcttgttgttgttgctctgtttttatttttttttttggcggctgctgcacaagctttgtgtggagtaacagctgttagcttaacagtttcggaataattttcaattggaattaaaaagatatcaagtaatttactaatctatctgcaaagaatttcaatagatcttacaaactgaaaacaagattcaaaatataatgcagattcttaaaacctctataggatgttcgttcgacgggtgggccgctggtgattgcacaacctgtcacatcgaaggtctctttaacccgattcaacggttaacttgtgcgtctagtcagttatcagttatcagttgttgttgtttttgttgttgttgctactgaggcatttcgtcagcgcagatattacagatcgaccacagggagacggatagatgggagtagtggtaagggggaaaggcagattacaaaattaagcacgtttttaaattatatatatgaatgcgaatatgtacttattgcgaaagcgacaggcttttgttactcctcatactgattgcttttagtaccctgtactaaaaaaaggtatgctaactttggcgaaatctgatcagcatttagtttcaaaaaacgcaatcaagccactgtttacaagctttctttaggaatattaaacttataaggctatcatatgcatatatccatgcctcaggtatcatatagtcgatagacgatacccatatgatctgtatttagtttgcgcaggtgtcagctgtatttattctcacactttcgaggcattccttcccggtgcgtcacccgaagatatcaaatcatatcaagtaatctcaaggaggagaaggcgaggaaccaaaaggaatcatctcggaatcgcgatccccacttgggcggtccttaattacgcgaagggagtgcctcccgccaggcaattgctccccgcacaagaattccaatacaaaaggaagactcaagcgttaatgataagaccgcgggcgcggcgcgggcggaggcgtggcagatcagggaacaggcccatagcttgtcttcccgtctggtcattcgctcaggcaaatcaattacaatatagacatgataataactccactgcatccatgggcccatgtagacgggggagcagtagagcaaacaacaaacaagaaaacacaaaacttggaccaacaggagggcaatgggcaatggacaatgggcagtgggttctacaagctctacaagataaattatggatttgctcccaaagggctcccaaagggatcgggtcaacggcgacgtctggaatgcgagtctaagattaaccgatttcaacttttggaaggcggaaatatgaacaagtttttaaaaaactagggcatatctaaaataattgttttcttttttaagtttagtgaaggtgtcacttgctcaaggtatagtttcctttctaggatatcaaagttctccagttgtttcatacaatatacgttataattagaaacgtttactataatattttaatattcatcacataatatataatgtgtgacttttgtgagcaaacattatcattaaacgtgttttcttttaatgaaaacccgcaaatgtgcatttcaaaataaattatttcttaaaaatggcatttttgttctaaaatgttataaattaaaaaaaaaaaaaaaaaaacaggaactttgaacacattgccagcattagtttattgaactttattgacgatttatccgcaataactcgatcataaacaacttgatatattgcagtttaaggcagcgactacatttaagccaagttcactttcatttgtgattcacaaatcttatattcgcacgcgatttgacgtagtttgatttgaataacgattaagcccggcttagactttgtttttaggaattcaagcgcaacattttcactgggttttccacacagccactggaataactcaacagccagatcaaaaaacgttaattgcaattgtacttttttgttttgtttggttttttttttttttgcatttgttaatgataaaatggtgttctggttttgctcgaaagctattggggaaaaaaaacatatatataacaaaaggctgtgcgctgtggagagctttttaaaaggcccggctttagtggggcagaagtggaaaaccatataaacaataacaaaaagcagtttcagtttaaatgttagatgtagtcgagggtcgctggcttgtttgtttacgctgctgatttgtgttgaaatgttgaaattttgagaagcaccacttactttatggaaacacggcttgaaaattctaaatattatgttttacacgaagttcaatggcacaaatcggttagcacgaaacgaaaaacaaacaacaaaaaatatgtgtgcacaaatggggggttttgtatttaataatttgtgatatatatttgagcgcgtttaagtttgtggtgttagcctcgcggagatcggcggagctgcgatccaagcaccagcaagttccgttcaaaactgtcgactcgtcggtgtgggccaagttactgcgcccctatcaccacagtcgccaataacaatagcagtagcagtaactgttgcagtaacagtaacagtacccagctgtcgcagcattgcgctctccgctctgtaccgcaacactcacatccaatccgaaccgaaccgctccgctcattactctcccgatcttggggcctggagcggagcggatgggtttcactgttaacagttaacgctgggagagcgcgatctcgacttacgcacaccctcgctcaggaggctcgctgagattttaaatttaaatatatatagagcaacatgaacaatacatatgttacattctattatctgtctattggtggaaatggagtatattatctgattaatcagtgttgtggtgatgataaatattactcataaagctgcactatttcatcgttattttcaaagtattcattttagtgtgacattttacattatgttaacactacgcagcaataatctgtaaactttctttaggcaatctttcattctttcaaactttccttagaaaatatttcaattgtgcccgtttctattaacctgacttcatgtattgatatttttttattcatataagtacattgtctttcagccatctgcttgctatattaaagtaactattcgcttatgtctatagttcctaagatgtaaatgtaaatcgtctcataagcattaattttacagcaaaaaataaaatacgattttaaattcaagttcgtttggaaaaacatttccgatgactaggatataaattcaaaatattaacgctattaaaacgttacatttatccattgcttaagtatatattaatcgtagttctggacgtgagatgtcgctcaggtatctacgattccggctaggttgactgccctacggatgttcctcacacacatgccgttcgagatcgatggcccggaagaagggccgcacgcagaattcacaggtgtaagtgccgtgtccatggccg

SEQ ID NO: 15710 - DNA, 1219 bp, DROSOPHILA
acgagtcgacagttttgaacggaacttgctggtgcttggatcgcagctccgccgatctccgcgaggctaacaccacaaacttaaacgcgctcaaatatatatcacaaattattaaatacaaaaccccccatttgtgcacacatattttttgttgtttgtttttcgtttcgtgctaaccgatttgtgccattgaacttcgtgtaaaacataatatttagaattttcaagccgtgtttccataaaataattgtaacggattctgtgtcctctaacgccattgaaaactgttcttccatcgcatccgcatggccatgtcccgaatccgaattctgaagcccatgcagcatccattgctcatcctgccagtgctccttctcgtcctgatcgtcagcgaggcagcggcgggctccttggtgtccccgaacaacaggcaaccatcgcagaggttcttctacgccgccgccacgtcctcctcctccacgcagaccaaggtgcgcctgctccgccaggcggacgatcccagtgcggcgccgggtgcactggagggcagctgctgccaaggagcagctgcggaagccggaacaccattgacgctcccactgtccgtgtccgctgagctgaccaacgtgaccgccgactacgatgtgtccggcgagatgccctcctccaaggaaaactttaagcgcagcatcatgaaatcagcaaccgtgaggaatgcaacgccggcgagctgctccccgcaaccgacgatcgtggagctgaagccaccggcggaggacgaggcgaactactactatatgcccgcgtgcacgcggatcagccgatgcaatggatgctgcggatccacgctgatctcctgccagccaacggaggtagagcaggtgcagctgcgggtgcgcaaggtggaccgggcggccaccagcggacgcagaccgttcaccatcatcaccgtggagcagcatacgcagtgccgctgcgattgtcgcacgaaggcggaggactgcaacgtgtaccagtcgtatcgcaaggatttgtgccgctgcgagtgccacaacacggatgcccgggacaagtgcctggagcaggccgagaacaagtattgggtggacgacaattgcacctgcgtttgccgctacaaccagagctgcaccaccggcaccgtcttcgatgagacgcagtgcaagtgcaccgacgtgagtggctcccgataggacacagc

SEQ ID NO: 15711 - protein, 301 aa, DROSOPHILA
MAMSRIRILKPMQHPLLILPVLLLVLIVSEAAAGSLVSPNNRQPSQRFFYAAATSSSSTQTKVRLLRQADDPSAAPGALEGSCCQGAAAEAGTPLTLPLSVSAELTNVTADYDVSGEMPSSKENFKRSIMKSATVRNATPASCSPQPTIVELKPPAEDEANYYYMPACTRISRCNGCCGSTLISCQPTEVEQVQLRVRKVDRAATSGRRPFTIITVEQHTQCRCDCRTKAEDCNVYQSYRKDLCRCECHNTDARDKCLEQAENKYWVDDNCTCVCRYNQSCTTGTVFDETQCKCTDVSGSR

SEQ ID NO: 15712 - DNA, 2623 bp, DROSOPHILA
ttatttaatcaatcaaaattcatggactgcctcttttattcaacattcagacactttgtatctttgatttacgttccggtaaagcgggattacaaggaattgtatttgttagttactattgtatctttaaaacgtaaacgtttatctaacattcttagtaacatagttagtttcataaaatgaaataaatataataaaataaataataaaaagtgtacacgaaagtaaacatgtgctgcttatcggccaaaatgtaatctcaagtttttgttctattttgttctatcaaaccaaacacatatatacaaactgtttgagattacaaattcacaaataatttatttctagcttatctataaatggttctaagcaaaatatattgaaatgtattcaaaaatttatcacaaatttaaagcgttgaatcgaggccattaataaagtaacatttttagcgacaatgaaatttatacattttttattgcccttgccctttttacaagttgattataccacttatttttaaggccaatacacttgcttaatcgcagcattccctgccgtgtccaaaattttgttttatttttctactaatcattgacctcagcgccatcaaaatttgggattttccacagggtagtcgaagttgattaggaatgtgtgcttcttaagcggatgtacctacaatttagattctggaataggggaatgttgagatccggaaaagttattgcttaaatatatcaaaaaagcctttcctttcaaaagcaagataccccccaatcgatatctactatgacaatataaactgaattaaaatcaatgacagtccataacaggtaactaaatgtcgaaacgcaatgcccactagcttgggtataaaagaagacactctttggcattgactacagttcgaaaaaaaatatcaagatgaaattaatggtgattaagctaatggtcagtgaagtttacataatcctcaatttatttaccctttaggttgtcctgttcgccctgatgggcattaccttggccagaccgggatacgacggagcagcaaccgcccagtggggtttgagatccgttccacagagcggacaaagtggatacggcagctcgccaagcggatacggcggatcagcttcccagagcgggcaaggaggatacggtggcgggcagggaggatacggtggcgggcaaggaggatacggtggcgggcagggaggatacggtggcgggcaaggaggatacggtggcgttcagggtggatatggccaacccgctccattgactgaacaggtgggatacggcggcactcagggtggatacggcagtgcacagaaaggatatggcgcatccgtgcccccaaatgaattcgcacttggactctcgggccaaggacgtttgggaggatatggcaatgccactcctcagagtggaaagttgggatacggcggcggacagggaggctaccgaagaccagctccccaatcgggccagttatatgccgcaggagagctcggagcaggcccccaacttgtacagggagaattctccggcggaattggtcacgagaactgtaaccacgagcatcacaagcatcatggacatcatggacgttactaaaacggcaactttaagtataacaaagtaaattaaaaaaaaaaaaaaattaaatcttgcgaaaaagttgacttaattcttaaggtatagttattgctcacattaaactaggaattaaaacacatagacatcaatatgccaaaaatacaagcaccattacaactttctattgaacttccgcaataattatcaatcttcgatttcccgaactaatctcagtaccagtcgattaaagcaacattaaatagtttattcaatttgtcaagttcttaagattgtgtttttagaaatgacacatctattttataaacctctgcaagttattcgagaaatgcattttagaaattcaaaatcggtcttttttttagcaacagcaattcttaaattatactacttttttcccaaatcgaaatatataacttttgtctatatttgtatattgagtatatttcctctttgtaagattaacattttgtttgttacatattaacaaaacaaagacttttttgacagattttttgtatatttttttcacagggcactccaatcaataatctgtactatccaaatagacatagacatattaaagtaaataatacaattaaaatttatatatgaattttctcatagtctggttttaaaccgttaatctgtctattaaatttaatttttttccagacatcatattattatattattttttaaataggttcttttacataaaaagttcgcacacgtgcccaaaatgaaaatcaaataataacgcaaaaaaacaatactttctgcctaattggtggttccgctgtctgtgattaacaattcgactgttttgttttcatctaaacaatgacctcctgtttctgttatcaacatgttgaattttttacagggtaatcgtattttggtgagagtataaataaatagcttaaggttggcacatttgtttataaattttgaaaataaaaagtctttaaaaatctccagcctctgctatataaattaa

SEQ ID NO: 15713 - DNA, 623 bp, DROSOPHILA
tcctgttcgccctgatgggcattaccttggccagaccgggatacgacggagcagcaaccgcccagtggggtttgagatccgttccacagagcggacaaagtggatacggcagctcgccaagcggatacggcggatcagcttcccagagcgggcaaggaggatacggtggcgggcagggaggatacggtggcgggcaaggaggatacggtggcgggcagggaggatacggtggcgggcaaggaggatacggtggcgttcagggtggatatggccaacccgctccattgactgaacaggtgggatacggcggcactcagggtggatacggcagtgcacagaaaggatatggcgcatccgtgcccccaaatgaattcgcacttggactctcgggccaaggacgtttgggaggatatggcaatgccactcctcagagtggaaagttgggatacggcggcggacagggaggctaccgaagaccagctccccaatcgggccagttatatgccgcaggagagctcggagcaggcccccaacttgtacagggagaattctccggcggaattggtcacgagaactgtaaccacgagcatcacaagcatcatggacatcatggacgttactaa

SEQ ID NO: 15714 - protein, 202 aa, DROSOPHILA
MGITLARPGYDGAATAQWGLRSVPQSGQSGYGSSPSGYGGSASQSGQGGYGGGQGGYGGGQGGYGGGQGGYGGGQGGYGGVQGGYGQPAPLTEQVGYGGTQGGYGSAQKGYGASVPPNEFALGLSGQGRLGGYGNATPQSGKLGYGGGQGGYRRPAPQSGQLYAAGELGAGPQLVQGEFSGGIGHENCNHEHHKHHGHHGRY

SEQ ID NO: 15715 - DNA, 10468 bp, DROSOPHILA
tgaactatcataaaaaaaatatatatatataaatgtgaaacgtaaactatttttgctagcttttaagatgcatttttttctcaaaattacgcctgtatgtatgtaatatgcataacgatcttaatacccatgtattatatatatattatattgtacattttttttttgtgtgtggaattgctgcagttaggacaggaatcccagacaccaatgttgagaaactaacgatctacttgcagctgacagacaatcagagttgaaatgaacttaaaattacactatattgcactccgctccgtaatcccaatattattaacccaacccgttgaccccgaaaaatccatcaaaccataattaaacatatttagccaattgtaattcgcgaaaataggttaactgtacgctgcaaagatccgatatggaaacgaattaattctaattacaacacattttctgtgcgcagtttgtagcctaagaaaattgtacaatattgtattgataacgacatcccggcaaaagataaacgatgaatcaaacaaaaaaaaaaatatatatatatatatatctacgaaattatactgtacaagaaaaataaaatcaactgaggaaacaataaaagttaaacataaatgtaaaatcatgcaaccgaaaaagtagtatttattttatttgagtgggagatcgtttaggcttgcaatttcatattgttttcgttccgatacttaaatggaatctttcagaaaattattgaaaagagatcaatccagaaaacaccatcttcggctggaagtttacaaagaacgctgggaatccggtccatcgttggatgaataggtaggtatccactatccccactatcgatacacacagacatgcacacaaacaacagaaagttttcatagatatgatgccataacacactttaatatcttgattgcttatcttttttttttttggttgcttgtttttggttttgctagtatttgacttagttggtgttggttttgatgttttattttaaaagaaatcttacatttctcgattcaataaaaaagatgttgagtttttgattttgaatagcaagttgttaactacttagttcattcatttacttttattaaaattgtttggctttggtatttaaatgtagtgtttgtttttacgaaaagtggtgaaggaaagtggtgcgcgagggcgggcccagagtgtggattggtctattcctcctcctcctcttcctcttcttcctcctcctcctcttcctcctcctcttcctcttcttcctcctcttcctcctcctcctcctcctcatcctcctcggcctcctcatcttcctcctcgacgacctcctcctcgacctcctcatcatcctcgacgatgtcctcatcggccttggcgtcctcctcgccctcgggtgtctcgggctcaccggccttcttgcctggtcgctcgccgaaccactttggcagtttggctatggattaaaagtatcggattacaattagcatattgctaccacaaatcgaaatagttagataatcgaaacaaatcgacaggaaacagaaaaaaaattaaaataaaataaaacacagcacgacaatgaacaaattaatgaatgttgttctgttgttgtcgtccctttgaaaggggtacagttgatccccatttaccctagctacataactcgcatctgatctaaagtacatacatttttgacggccggtgtattgctccttcttctcgttccagatcttctcgttcgagtccttggagatctcatcccagccctgtgtgtagtaacagtgttgtgttcgtgttttggtgtgtgattttatgagcacagtacaacatacagttgacaattatgaaatatggtacataaaacatagaaagagataaaaagagagtagacgttaggtgcgttattggttgccagccgcccagaaagaccaaaaaatacccctagttacttgtcaaatctatcacgtaattgaccattaacgacccaaccttttgacgttactgtacttttgattgtgtttcaaacatgactctacttttggtagcccttactttttccgtgactgtacttttagtagtgttggaaccgcctcaaccttttgacatgactgtactttcggtggcagtgatacgaacaaaaaacatagtttatgatgtaaacataaaacaatagatagataggatacagaagaagagagccacgtagacgtgaatgcttcagcggacgcttacattttgtgcgctgagtgaatctttcctgtctttcttgccaggtcttttctaaggtttccgcatagaccgtattatagccctaaatgtgcgtaatattgatacagttttacaaagaggcaacccaaaaaaatacccaagtatagttagctttagtgaggaaacccgaatacttacaccctcgaagagcttcttcttgtcgtcataagagcgggtgtccacacgtcgctcatacttggaggcgacttggatcttgggctgtggggaaatgtgtcacgttagctatgtgagccaggcatctccaaattgtaaggctaacttaccgggtatttgccagtcaaagcttccgggtcgagacccttcttcaaggctttgtgcctgagctgttgcttctgtctttccttcaactctttcaactgtcaatggacgacatgggtgtcagcataaatgtgttcccttgcggatttataggcctaagccaagtggtactcacatcgtagtcctgacgtttctgcctttcttccaagtcatacttctcagtttccaatttgacaatgagctcccacagctcctgggccttctcgcgcagcttagcctcgccgaatccttcgatggccaagggcttgatgcggaacgacagcgagatcttcttctcctcctccaactgttccttagtcttgttgcgttccatggcggcggacgagagtcccaactattttttgtttcatgtggcgagttttttttttttttttttggttcgattcgaatttcgcgcaggatgcgttttaatatttgtttttagttttgttttgcatagcagacacatttcgttgtgtttttatatatatgtagttatatatatatttttttttttgatttttcggatttttgagatttgatttttggtacgtgcggtacaaacgtggtgagagacaaacagtgagagagatagacacacacagagaaaagagcgcaaaacaaagtgatattttgtttgttcgtgtttggtgtgtgtacatgcgtgtgtttgttttttttttttttttgttttgtttgttgtgtaaaagaaaaaagaaaacaaaaaaatatgttttgttgtttcagtttcacattacagtgtagtgttttaaaggcatatttttaagcgatcgatatgaacacagacgattaacgattgagaaatgtcggaatgatcgatttttgaatcaaatacacaggataaacgattgcgaatgattgatgggagccaaaaaacacaaacgattaacgattgtggatgatcgattcgggcgcaacacaaacgattaaggattacaaatgatcgatgaattcaaaaaccgacgattaaggcgattgatgatgatcgatggacacgacgggtggcaaatgaggtgtttaaaatggaattgatttggaatcaaatataaaataaaaagaacgaaaaagaagaaaacgaaaacaggaagagagagagagagagacaaatggggggaggtgggaagacggaggcgtatcagcaaccggcattgatgaaatctcatataattaccacgcctgcatccttcttggcaatggtgaagttggggcccttcttgtccttgtccttcatggcctgcagcatagcctggcgcttcttctcggcctcctcgagacgcatgcgcttctcctcgatctcgcgctgcttcttctcctcagcctcacggacacggcgctcctcctcctccttcttgcgctgggccatcttttgctcctcctcggcgcgggtgaccttgcgcttggcctgcttctccttcagcttcttcagctcatcctcctccttggatctctgtttgcgccactcggtgatgtattctttcagctgatcatcgaggtcggagcgcttctggtcctgacgcttgatgaactctggatcgccctctcctctgatgatcgttacggtaagggacgggttcgggaatgagaaagaactcgattagtttaatctgtcggatcgcgatcgctttcttcgatagccactagtactacgagtaatgtctaggcatttaaattaattacagaattttgacggaatttctaacagcctgtttatttgtttggtgattatatttagattatttttttttcgatttggttccgaaagtcaaagagttgtttttacaattagtatccaccaaagtgctgatgtgagaaagcattagataactacattctacgtatggcaatattactactctagttataaaaaaaaaaacagaaacagaacagaaacacaccaaaaaagatagggggattgcttcgatggcactggagtggtgagttgtggtgagtaagagtttgtgttgagtagtgcttgctacagaggtacagtttacaccttagaaactattttattttttttttttaatttttatattttatttggttttgagtgttttacaggacacgcacaggcggattaatcggggacgatcttaagataactctaagggtttagtcttggttagcgttctggtttcatttgttgttcacatttgttttttgtacatagacttactcggctggtgtctgaggtggttttctatacgtgaggcattgaggtggcaacaaacatggaggtggtgatattttttatttatatatatatatattggttttgtgtttcaaaaattgacaaattcacgatggtttcgattgattgattgatatttgttgtgggtttcggttcgaaaagttcatacaaaatgcgattgttttcgttatttcagttttcaaacaaaaaggaacgttgaaaagaaagagaaaaacggttggttgttttaaaaaattcatttgcaaaatatattggtttgtttgttgtttttttatttttcattattatttttttttttttttttggtaaacgaaatgaaagaagaagataagatggagaatatatatagagagatatttgcataaaaggttgaaaagaataattaattttgtaatggttggtacgtaattgtttttggtttggttttgtttgttgttttctggttggttgttgttctaaagaaaactcaaaaatgattccaagcaacgaatctttgtacagtatgaactggaactggtactggagctggttctggaactggaactggttctctgatgcatatggagcagaaatgcacacacaaaaacttgaatttttgttttcaatttttttcagaaattggcaaacgagcatatacgtaattttggggccaggcaaagagtaatttggggagaaaaaaaaacttttatacagatatgtgggatctttataggtctttctttcttcgtttcattggtttctcacacaatttacttacttcctgcaacaagaacgagatcaaaaagagatggaagagagaaagagagagataaacagaattgatatcaatgatttccaagtcttataggcaacaacacttttgctaagccaggccagcgataggcagaaagttaacttttggtcaaaagtctttttttttttagaatttggaaattgcgttttacggctttggaaatgtattatcttgtggggagagtcgggagatacgatggtaaaaaaatagatagacagatagacaaaagacgtgttacaagtgatacaaaaatacacagtaaaaatccgactgggttcaaaataatagttcaattattaaatgataatcaaatatacgcaatggataagtggatgtttagttgtttttaacataaaattggtattaatattaataaattaatcaatttttgtctattttgtatcaatcttattaaaatcgatgacttttccgagctacgtatacgcaatatttgttctatttttatagaaaattactactaccattattttgaacacagtttcatacacatgtggtgggtggtggtggtggggatacacacagcttttatatacacaatttgccaatttttcgctaggttttttttttcgggagggggtatgaactatgaactcgctgcttgagtgggtgtggggtgaacagtgggtgggtggggtttgctctcgggttccattagtaaattttgtacaattatcggatattgattttgtgatcgtatacttttaattctaaattcaattttggtttttatagacacacaacaacacattgaaaacaaaaaccaaaagaaataacaaaaatgtacacaaaacagaataaaaaataaaaactaaagataaattaataaacaaataaaattatttacagacgagtacacaaaacaaaaatgttgggttggtttcgggtttctgggtgttttttttttttcaaatcttttttggggaatacatatttctaccaattttaaaaaaagggtggttttttatattgcagacattgacaaaatacaacacatatagaaaatttggaatacaaaatggtgggcaaggttcggtttcgaaaaaaatcaaaaaatttgttatagttagggcaaaaacaaaaaaaaaaaaaagatagacataagtgaacaccaatcgagttctttaggctgctgcaccaaaaccaacaaaagatgtcgacaaaaatcggcaacaaaaatgtacttacgtctcctcgcgggtttcctcgacaacctcctcctcctcggagctgctttcgagttcgtaattaaacgaattttggtttttttttatattttttggtttaagatttttgaataaggtgtttttttttatatatatattttggagtgaaagtgcagggttacacacggcacacgggtgcagaggtgatattgttgatttgttgttgaattgtcgtgtggttgttgttgaatagttgttgattgttattagttgttgatttcaaaagaaacgaaacgacaacattagcggttgttcgaacagattcatgggttgtggttgtggaggtttttgggatcgtggtcggtttttcggttcgggttcagggatgacaatgcgtggaaatagatagaaaggagtacagatcaaaataggtgccactggtaaatgtgattacaaaaagttctcttacaagaatccacaaaaatctgatcgttgaattagttagtacgtataacaacaagggttcaaacgagaccatcgaatacttctcttcaactttgctactttacttaagttatctgtttactttacacacttttaaatcttgttcgcggtcatacgcgtcgtatacttaatatttgcatcttgtcctacatattccatgggttctacttacgtgtactcttcatcgtcggacatggctacggtttagggttgaaaaaacctgcaataacaatatatagaaaataaaaagtttagtttagtcttcaaatgcatatatttaagattaaattaggaagccattgtaatagaataggaaagacaccaaaaacgtgaatgtgttccattattatatttctttttgaattcaattgatattaaaaataatgcttattaaatataaccccttttttagccaaagcagcaacaacaatagaacagcgaaatacaggtgtgcaaacaagtcaacaaatgattgccctttttgataaccccttgtctattttctattcagggtttcactgtacttgaagcagcctttgatcgccctgcgataactctatatttagacggatctttccccctatatatatgtatataatatatatgtatatgcgattccgctgtgtatatgtaggcagggcgacctgtctttttatagccggcaacaatgtctcgtcctcacatcataatctttcaaattcaagaagaaaaaaataaacgataaattccgtacgctctgctctaaaattatttaatttcccatgctatctatatccacaatctataactgtgtgtgtgcgaaggagagagtcgtagtccaatctatgtatgtgtgttttttcattttcctccgattttttctcaattaaaaatagactttggggcagtattgaatttcccgagagccgaaagcttccgaaaacatcaaaaagcttcggacaaagccttttttgaaaattttcgtttttttttttaccttggcactaaatcggaaaatctaaagaagcttttcaatttatatatgtatatgtattgatatatatttgggcgtacttgtgtgtaatgaaaagaaaatcaaatcaaatgccattcatagatcgcctgtatatatctatgccagttattatgccacgaatttatatatttaatatgctatttgaaatttctatgattatgaatattctatttctataatctttgcacttttgcgtggaagtgcaattgctgagcttgtatttttagccttagataaactgggtcagttttggggcaagtgcttggaaatgatgtgaaatgtattgagaaaagttctggaaaaattgaacaaacttttcaattgaaactggtaatgatctaaatatcatccgacagactatcagaaatatacgtctatcgtcttttcacacttacatatacaaaaatgttactgatcatacatgttagtttcaaaaacatggttttgaatcttactttttgtcttttcaagttcaaagtttgagtaagtgttagctacttcctgcctagcaacataaaactgtcatatgctgtttttatatcctgtcattatatccttatcgaatttactctacaaatttccctttctttaattcaatctatctgtgccctgtttccatttatagtcctatatatatcctccaaaaatctccagatctctattcgccatcgatcttgtgtgggtggctatagttccgtctcgttttcgcctactatatctttaacatatctgatcggcgcctgcgcggaaagctattgaaaaaagttttcactctacgtatctgtgtgtgtgtgtttctctgtgtgtgtgtgtgtgtgtatcttggacattttgccaaggtaaaaacacactcgctcgcgcacacatacgaatcgaatttatttttaaaattcgtcgaaaaaaatttgagaacttttcctctcagatcatataacactttcagaaagcaaaaagatatacatatatgtatatgtatatttatatgtatagattcctgtctggcattgttgttgcttttgattttgttgttgttgttgctgctgcggctaatcctgttgttgtagttgccgttgaatattgtttttggcgccgccaatgcctgggcgaattttttcaaattatttttagcctttagccataataaaaaaaaaaagtttaaaaaaaaaaaattttttgaaaaagttggcttcagagttcgtttttttggtggctttcaagtcatttattcgcactatttgttcgtagattgcactttaaaaaaatttcaaaaaaaaaaataaaatgttatataacactaggattttccaattcgtaactttcttttgttgatgttcgtggttcgtggtttattcgcaaaggattcggttttctcgttttcgataactttcttttcgtttttaggcacacaagtttattttatattttctttttatttttttggtgatgcagcatttgaaggagatgtgaagcagcagtagagcagaaacagaaaaaaaaaaacttacttagggagaaaaacaaattgaattgaagtccgagcagctgacgtcgtaggagcgaatgctgcggttcgactaaccaaactgacgatgaaaagcgctgctacacgttatgttaaagaatttttcgtcgcgttcgcggaaaagccatttccacgcacacaccgatcgcctttctatatagccaatagctggccatgtgtgcgagcaggccagcgctatatgccacatatcgctggccgatgtggcaacaagtgggtggtggtgggtgcgcctgcctgtgttggctgtgttcgatgtgttttgggtgaatttttcaggtgggctgcagctgaaacataaacttgtacacgcacacagccgccgtcgagttttccaattttccattttggccagagcgagatgaggcatacgatattagtatatactatacattagaccataatggcgcacgcacataactagatcatacaataagtatatagcgcatacggacgttcggtgcgttggcggcattttacacatttgtttttggaatcaaatatcgtagagcataaatttcacagccattaaaaagtcggcctgcatatattgctctataatatatacgtacagatgttcgtgccgatataa

SEQ ID NO: 15716 - DNA, 1502 bp, DROSOPHILA
aaccgcagcattcgctcctacgacgtcagctgctcggacttcaattcaatttgtttttctccctaagttttttcaaccctaaaccgtagccatgtccgacgatgaagagtacaccagctccgaggaggaggaggttgtcgaggaaacccgcgaggagacaaaaccacctcagacaccagccgaaggagagggcgatccagagttcatcaagcgtcaggaccagaagcgctccgacctcgatgatcagctgaaagaatacatcaccgagtggcgcaaacagagatccaaggaggaggatgagctgaagaagctgaaggagaagcaggccaagcgcaaggtcacccgcgccgaggaggagcaaaagatggcccagcgcaagaaggaggaggaggagcgccgtgtccgtgaggctgaggagaagaagcagcgcgagatcgaggagaagcgcatgcgtctcgaggaggccgagaagaagcgccaggctatgctgcaggccatgaaggacaaggacaagaagggccccaacttcaccattgccaagaaggatgcaggcgtgttgggactctcgtccgccgccatggaacgcaacaagactaaggaacagttggaggaggagaagaagatctcgctgtcgttccgcatcaagcccttggccatcgaaggattcggcgaggctaagctgcgcgagaaggcccaggagctgtgggagctcattgtcaaattggaaactgagaagtatgacttggaagaaaggcagaaacgtcaggactacgatttgaaagagttgaaggaaagacagaagcaacagctcaggcacaaagccttgaagaagggtctcgacccggaagctttgactggcaaatacccgcccaagatccaagtcgcctccaagtatgagcgacgtgtggacacccgctcttatgacgacaagaagaagctcttcgagggtggctgggatgagatctccaaggactcgaacgagaagatctggaacgagaagaaggagcaatacaccggccgtcaaaaatccaaactgccaaagtggttcggcgagcgaccaggcaagaaggccggtgagcccgagacacccgagggcgaggaggacgccaaggccgatgaggacatcgtcgaggatgatgaggaggtcgaggaggaggtcgtcgaggaggaagatgaggaggccgaggaggatgaggaggaggaggaggaggaagaggaggaagaagaggaagaggaggaggaagaggaggaggaggaagaagaggaagaggaggaggaggaatagaccaatccacactctgggcccgccctcgcgcaccactttccttcaccacttttcgtaaaaacaaacactacatttaaataccaaagccaaacaattttaataaaagtaaatgaatgaactaagtagttaacaacttgctattcaaaatcaaaaactcaacatcttttttattgaatcgagaaatgtaagatttcttttaaaataaaacatcaaaacc

SEQ ID NO: 15717 - protein, 397 aa, DROSOPHILA
MSDDEEYTSSEEEEVVEETREETKPPQTPAEGEGDPEFIKRQDQKRSDLDDQLKEYITEWRKQRSKEEDELKKLKEKQAKRKVTRAEEEQKMAQRKKEEEERRVREAEEKKQREIEEKRMRLEEAEKKRQAMLQAMKDKDKKGPNFTIAKKDAGVLGLSSAAMERNKTKEQLEEEKKISLSFRIKPLAIEGFGEAKLREKAQELWELIVKLETEKYDLEERQKRQDYDLKELKERQKQQLRHKALKKGLDPEALTGKYPPKIQVASKYERRVDTRSYDDKKKLFEGGWDEISKDSNEKIWNEKKEQYTGRQKSKLPKWFGERPGKKAGEPETPEGEEDAKADEDIVEDDEEVEEEVVEEEDEEAEEDEEEEEEEEEEEEEEEEEEEEEEEEEEEEEE

SEQ ID NO: 15718 - DNA, 3395 bp, DROSOPHILA
cagattgagattcagattgagatggagatggagaggcagaaacaaagaggcgccacaagctagaccgaaagtgaaacatccgaaaaagtgaagcgccgctgacagttttccaagaggacaacaagggcagcagattcagatacgaagatacgtagatacttgagccgttagatagacggtcttagatacagatacaccccggcacaacataaatcgtgatgcgtgccagcctgttagttgctataaaattcaaacactggccattactgtcttgaaagtgaccttgccgatcggtttgtagacctttgaccttgtcgccgctcgttgcttgtgcgctgtttaccccacaggtttgttatttgttatagttgctcggcgatcttgtgcagaagttgctctcaattggaaagatacacaaaaacaagtagcaggcgaaaccacagaaattaacatgactttcagcgcccgtctttcgaatcgtgtgcaaacgtgggactctatgccgcttatctctgtgaatctacatacatgctctaaattcacactacacatatgacttgactaaaagcaaacaatttaagccaccaacatttggttcgtttttaattgttaattgttaagattgccatctccgtgaatcaggaaacactcgaactggaatgtactcagaagagtgatacgacaaagtccggagaatttcttttggatgaatgaggaagtgattctcggcctcttcaaccaaagttctacatagatcatactgtcacattattatgcacttaaatacatttaattaacgtctgcttgagtcacttattcgtggggtagttaggcattccaattggaagtgtttcttggttaacaagttggcatatagaattttaaaaataatgcactccttaagcttagaactcagcttcctgtgctgttatgcaaattcatataaatcctttcgataaattaatcatttaatagtatactattttattataaatctgacctcgttcttttaaattctaattccttagtttgtttcaccttatagtaaaatatccagttgggtactcaccattctcttggccttcgtagaactgtccttcctcctctccgtcctcctcctcatcctcctcaccctcctccacgtcgtagtctagaacggcgtgtacctgagtcctggatccctgaccagcctgaacccgtgtaaatcctggtgctcgttccggataattctccggcggggcaactccgtatgtctgagctggttgagcctccggcttggcctgcctggacctttggggcggtggtgcaggtggtggttgctgctgttgcgatggcggtggttgttgcggctgcggtggctgctgctgctgctgcctgctgccaaagctggtaatactaaagctgccgctgttcttagtaaaagtggcactggcactgccgtgtgcattgaaatattgcttctgttgcggttgctgctgctgcggcggctgtgcttgctgtccgggataacgggagtacgaaccctccgccggtccccggccactcgcatgagtctgtgtcagctggatggaactttggcccgtggtgctgctcgaacttgatctggaactgctgctctggaaggacacgctgttctcatgctgatcctgctgctggtgttgttgttgcgtttgctgctgctgcgtctgctgtacctgctggatgtggtaaacggaattccggacagcattcggcgctgtcggtggcaaataggcgttactctgcttgcgtcgtccagctgtattttgatattgataaccacccgattgcggcggcgcatagggattgttcttgaagtactccggatcggcggctgcctccgcgggagtctgctgctggtggtcagctggcgagtagagcagattatttgtgttgctggccaactggtggattggatgcaggggagctatggtgactccccagggctggcccagggcaccgaagggcagcgagaaattggtcagagccatgggcgtgcgaaatatgctagcgctctcagttggcaaacgaaagacttaagcgacaaactcgatccggacgcgcatgcgacatcatttagaacagatcagcgcacggaaatcgatggcgcgcgctctcgaaattgatttatgcaaaaataacaaatcagtcagatcagctcccgcttcccacccctggcaacaatggcaaacacacactggcaaacacagaatattaacacacacacatacgcgtcgatcggcgggctatgtcgtttatatatatatatggcgatattaaggtatgtgcaaacgatgttgttgttattaaataacttaagcgcgaactttttgcttcggtccccggtccgcgtgtgtgctaaaaaaccattcacgacaagctgacaatcgagactgagccgttctcgccgtgcgccttaaaaacaaacttaatgggtggaaaatgtttcaactctcgaaatctcaaaatctccgacttgaaacattgcgctcagctccctcaatctcggaatctggctaagagcgaacgctcggcgaactgagttgcgtttttatctttcgtttttcggtttctgctgaatggcaaatcgaaaaataaaacaaaaccggaaaatattcgatactgagccaatcgaagagcaaatgctcttagaggcggagataaataaacaaaaatattaaaaaactgacatattttcaagttatacagaaaagttctctattaattatggtttctaataaattttagtgaatcactattagcaatatgtttaagcgaattttttcattactattactataatgtattagcagaatagttataatatagatcacataatattaatgttttgttgatgattgatggactaacccaataaatttaaataatttactttaatcatctgaggggttttaaaagtgaacctaaagttgttgacagttaccgcatatcagcattaaggtgttttattatatttggcttaatgttttaattaagaaaaggggtttatcttctggcatagttaaaagctggtttggatttttaaatcgcttaactttatgcgctgaatttcctttgaagtgacttaattaaaggaaatcgcatactaattaagttacgtgcacttctgaaatcaatccaattctggattggagccaaatacaattttgagtatacctttcctataccttcaccgggggaatcttcttcgacaggtgccgacggcatccctcaaagtgggattaggttgatgttaatgagaaccccgtttagctggcattagtgacctaggtcaatgcctggatgcgtcgtcatgggctgatatacattttagtggcttttgccgagaaacgcatattaatcacagtaaccaaacc

SEQ ID NO: 15719 - DNA, 1395 bp, DROSOPHILA
gtcgtgaatggttttttagcacacacgcggaccggggaccgaagcaaaaagttcgcgcttaagttatttaataacaacaacatcgtttgcacataccttaatatcgccatatatatatataaacgacatagcccgccgatcgacgcgtatgtgtgtgtgttaatattctgtgtttgccagtgtgtgtttgccattgttgccaggggtgggaagcgggagctgatctgactgatttgttatttttgcataaatcaatttcgagagcgcgcgccatcgatttccgtgcgctgatctgttctaaatgatgtcgcatgcgcgtccggatcgagtttgtcgcttaagtctttcgtttgccaactgagagcgctagcatatttcgcacgcccatggctctgaccaatttctcgctgcccttcggtgccctgggccagccctggggagtcaccatagctcccctgcatccaatccaccagttggccagcaacacaaataatctgctctactcgccagctgaccaccagcagcagactcccgcggaggcagccgccgatccggagtacttcaagaacaatccctatgcgccgccgcaatcgggtggttatcaatatcaaaatacagctggacgacgcaagcagagtaacgcctatttgccaccgacagcgccgaatgctgtccggaattccgtttaccacatccagcaggtacagcagacgcagcagcagcaaacgcaacaacaacaccagcagcaggatcagcatgagaacagcgtgtccttccagagcagcagttccagatcaagttcgagcagcaccacgggccaaagttccatccagctgacacagactcatgcgagtggccggggaccggcggagggttcgtactcccgttatcccggacagcaagcacagccgccgcagcagcagcaaccgcaacagaagcaatatttcaatgcacacggcagtgccagtgccacttttactaagaacagcggcagctttagtattaccagctttggcagcaggcagcagcagcagcagccaccgcagccgcaacaaccaccgccatcgcaacagcagcaaccaccacctgcaccaccgccccaaaggtccaggcaggccaagccggaggctcaaccagctcagacatacggagttgccccgccggagaattatccggaacgagcaccaggatttacacgggttcaggctggtcagggatccaggactcaggtacacgccgttctagactacgacgtggaggagggtgaggaggatgaggaggaggacggagaggaggaaggacagttctacgaaggccaagagaatggtgagtacccaactggatattttactataaggtgaaacaaactaaggaattagaatttaaaagaacgag

SEQ ID NO: 15720 - protein, 324 aa, DROSOPHILA
MALTNFSLPFGALGQPWGVTIAPLHPIHQLASNTNNLLYSPADHQQQTPAEAAADPEYFKNNPYAPPQSGGYQYQNTAGRRKQSNAYLPPTAPNAVRNSVYHIQQVQQTQQQQTQQQHQQQDQHENSVSFQSSSSRSSSSSTTGQSSIQLTQTHASGRGPAEGSYSRYPGQQAQPPQQQQPQQKQYFNAHGSASATFTKNSGSFSITSFGSRQQQQQPPQPQQPPPSQQQQPPPAPPPQRSRQAKPEAQPAQTYGVAPPENYPERAPGFTRVQAGQGSRTQVHAVLDYDVEEGEEDEEEDGEEEGQFYEGQENGEYPTGYFTIR

SEQ ID NO: 15721 - DNA, 2467 bp, DROSOPHILA
attatcaatcttcgatttcccgaactaatctcagtaccagtcgattaaagcaacattaaatagtttattcaatttgtcaagttcttaagattgtgtttttagaaatgacacatctattttataaacctctgcaagttattcgagaaatgcattttagaaattcaaaatcggtcttttttttagcaacagcaattcttaaattatactacttttttcccaaatcgaaatatataacttttgtctatatttgtatattgagtatatttcctctttgtaagattaacattttgtttgttacatattaacaaaacaaagacttttttgacagattttttgtatatttttttcacagggcactccaatcaataatctgtactatccaaatagacatagacatattaaagtaaataatacaattaaaatttatatatgaattttctcatagtctggttttaaaccgttaatctgtctattaaatttaatttttttccagacatcatattattatattattttttaaataggttcttttacataaaaagttcgcacacgtgcccaaaatgaaaatcaaataataacgcaaaaaaacaatactttctgcctaattggtggttccgctgtctgtgattaacaattcgactgttttgttttcatctaaacaatgacctcctgtttctgttatcaacatgttgaattttttacagggtaatcgtattttggtgagagtataaataaatagcttaaggttggcacatttgtttataaattttgaaaataaaaagtctttaaaaatctccagcctctgctatataaattaaatacaaataatcgaaacaattattacattgtaagtttacatttgcttacatacgtttgtcaaatcgtaagtgtactacgcttaataggtatctgaaagtcgagacatagttaagtccacgcttacagatcgggtatataaagaggccactttcagagcggatttcagtttaataatttaaagcaaaatgaaactactggtaagctagctgggttatgtgaaagaaagtagaaggatcttacgttcgtctattttatagattgttgttcttgccctggtggccgcagttttggccagacctcaatttggacctggtggtcaaggaggatttggtggtcaacaaggcggctttggtggacagggaggattcggtggaggtcctggatttggtggacaaggtggtttcggtggcggacccggagaatatggcggtcaaggtggtttcggtggcggaccgggaggatatggcggtcaaggtggtttcggtggcggaccgggaggatttggcggtcaaggtggtttcggtggcggacaaggcggctttggcgaacaccacagacaccatggaggacatcatgggcgcttctaataccccaatttcttaatcgtcttaaaatcgtaaacaaaaaataaatagttttttccaacatatacctgctgttttcgtgaaccaaatattaaggagaccacggatcctggagataactcgcaaacgaaggaaagaacaaacacgcatcttgaggagacgcaaaaccaaggaaatactacactctgggattctgcacacagaaaagattgactcggctattgatcctgactaataatatatatattaacaatatatacactttattaagtcggaatcgtttaattctacatacaaatttcataggatgtgtcacttcatgtgagaatattaacaagattatcttggcaataagcgcttcgtcacttcgtggatcgctagatgacgtttatttgggaactcgtcatcttcatcacaaccttttcatctgtaaaacgtgactctactaattattatatatttttattattataatacaataataatacaaaaacatatttacagaaaataactttgaaacctatgatttgtttcataacttaaaatttataattataattcagcaacaaaaatcttagatactgagatattacggggtattatgaataggttggttttgataaaaacggtaaaggtataaaacaagacatacacccacaaaaaataaattatattattcatgcaaggatgtaccaaggagtttttcggacaattcggggatgattgcaaaacaaaggtaaattattgaacgccgtgttgaacaaatcatgctcaggtatacccaggctcatttaccctgcaaattatggcactgaatgtggcatgtttacctttcaaattgagcgcacaatacaaaccaaatgcgtttgacactgaagtcagaatatgcctttctcgcaaatccagggaccttcttcgtctcgaaggatatcagattgagaaaattagctgttggagtggggaaaataatgagggatcatagacacacattgaggaaggcacagttactatttcattatattttgaagactcagttttaatctaaatagcaatctataggtttg

SEQ ID NO: 15722 - DNA, 407 bp, DROSOPHILA
caaaatgaaactactgattgttgttcttgccctggtggccgcagttttggccagacctcaatttggacctggtggtcaaggaggatttggtggtcaacaaggcggctttggtggacagggaggattcggtggaggtcctggatttggtggacaaggtggtttcggtggcggacccggagaatatggcggtcaaggtggtttcggtggcggaccgggaggatatggcggtcaaggtggtttcggtggcggaccgggaggatttggcggtcaaggtggtttcggtggcggacaaggcggctttggcgaacaccacagacaccatggaggacatcatgggcgcttctaataccccaatttcttaatcgtcttaaaatcgtaaacaaaaaataaatagttttttccaacat

SEQ ID NO: 15723 - protein, 113 aa, DROSOPHILA
MKLLIVVLALVAAVLARPQFGPGGQGGFGGQQGGFGGQGGFGGGPGFGGQGGFGGGPGEYGGQGGFGGGPGGYGGQGGFGGGPGGFGGQGGFGGGQGGFGEHHRHHGGHHGRF

SEQ ID NO: 15724 - DNA, 5580 bp, DROSOPHILA
cataataatttcacttacattgtcatcagctcgttgctaaaaagcgagaaaaaagtggagaggcagaatttatcagtgaagagcttgcagcacacagtcgcacacacaaacacacgcacacatgcttacacataggaagtacaattggacagataaacacactatagtgtctcgcaaattgaggcagagttatctcaattgcgggcttatcgctggctccactgaatgggcgggtggatccgaccgctccacccccgccccctgaacagccaccgcacccctcgacgacccagtaaagccggcttgggagcaacgatatcggatggttttcggattctacggaatttcgctcgctctctcgctgctgcttgcctacgtcacaaacacgcccgtaacacacatacacatgtatacacacccaagtctccgacgaccgccgttacgcaccgctttccagcccaattcgttccacgccagcctgaaatccgttaacatgtagtgccaaagtgcgcgggccggggcataaaatgcatttgctagcacacggcggccaaaaaactataactaacaacaacaattttgcactaatcttcttgtatttatatacacatacacgaagcaatgtgcccgttagcgcagagcggaacaagatcttcgggaattccagaaaatacgctaaaaaatgcaaagaatgcggaggataaataccaaaaatactgaatttatcagatgaaaaacggtgactggcggggatatcgtgattttttggccaataagttattacttttgcaattcaaaattgaaaaagatttattttcttatattcatttattattcatattaatttagcaaacaatgtagctgatatattctcctcgtacgttcaacaatttgttaattttttttaattttaaaaatttttgttttgtgtatttagtgatttggtattttaatgtagccctggtgaacttacaaagccctagggcggccacactgaaaccgatgattgaaatcaagtcgattgatttcagtttccttcttttgtattgttttatatttgagcaatacttacgatactgacatcgctcagaggtacaatggaacttagttagtcgtcgaccagaacagactcggaaaacatggctggcatttgcccccgggaggcggttcgggtgaaagtgaaggcaagtgaaaggtggccagaaggcgagacaacaaaagggctgcttagtttgtgttcctcaatctaatttttttgaaatcgcccacagaaatgcgaacccactgctcggccggagtggcgaaagttttcagtggacccgcagatcaccacgctggaggtgttgtactccctgctggccaaggccttcgatgtcaagtcggacttctccattaagtacaaggcctttgatccggcgggcaacgagatctacctggccgtgcgctccgactgggatctggatgccgcctttctgaggattcacaacatttccattcagacggcctcagaaccctgcctcaccctgcagatcgatgtgaagccatttacggtggtcagggagtgtgagaccgaggcctccccgggtagatccataacgggagcgcctgctcccgcaactcctgcaccttttgtacccgcccgcgagcttatgtcaccactgcagtccttaggagtctcccagaaatatgtccagcacatgcagaccaaactgggcagctccattctgaatcagatggagaaaaccttctccatagtgcagaaagcgtttaacttatccgaggagcatatggccaatctaccgccacggccgcccatgtgcgacagcgagttccggctctttctggacgcacttggtcagattcaacgcaaggacgagttgcatagggtcatcttcctaggaggcattgaccccagtctgcggcgcgttgtgtggaaacatctgcttaacgtttatcccggtggcgctaacggactggcacttgatggacaccagcgtatggaattcatgcgacgaaagtctgagcagtactgtcgtctgagagacacatggaaagcggccgtgaagcgaggcagtgtggctggagaactggcttacgtaacgagcatggtaaagaaggatgttctccgcacggaccgcctgcatccattttatgcaggcagcgacgacaatcagaacatcgctgcgcttttcaatatcctcaccacatatgcactaaaccatccatcggtctcatattgtcaaggcatgtcggacattgcttccccgctactggttaccatgaacgacgaggcacaggcctacatctgcttttgtgcgataatgtcacgtatgcgtggaaacttcatgctggatgggattgcaatgactcagaaatttgctcacctaacggaggcgctaagtttttatgatcctgagttctgggagtacctcaagtcgcagcaagcggacgacttacttttctgttaccgttggctactgctggagctaaagcgggagtttccttttgaggatgcccttcgcatgctggaggtgcagtggagttcacttcgttatcgatgtgatggggagaaagagctggcgctctttgaaaaggttagtgcgaaacccaaagggaattgcttaatttctaatcaccatgatttttcacaggaattcgtacccattactgatgcctccgtgcccaatagcgccagcactttttccagctcctacagcgctacgccgaccagtccttcctatctgctgacaaaaccgcgtgaaagtccctacaccaaggtatgcgctttgcgccgtcagagctcttcagcctccttgagctcactaagttcttcggtgggaaccagtcacggattggacaatacaaaacggctgaatcacagcctagacgacaatatgtcgcgtcatgcgacagccgctgctcgccgccaaagacggacttcggccaaggtccatcaaagtctggacgagtcaaaaatgctggcgcttattgagggcgctttggataataggaatgtcaagttggaacaaaacttgtccgccggcgaggaaaccgaagatgatgatgtatttgataggaaggagtcgccaagctttttggagacaaatccgtttaaggatgatgctcagagagcaccagaaagagaaaccacacctcctgtttcaccaggacgagcctttctgtgtagttcgtcttcctcgaatctggacgaggaccccagtgacaggaaggccaagctgcagcacaaaaacattatgaccgtgagcaatatcatcgccaaacagctagctactaatgctagtcaagtgagtgaaagtatgaagcgagtaagcacttctagtggtggccattttaaggatctcaaggaaaagctggcggcaagcagtcgtattggtatctcttttgatggagaaggagaagatgatggtgatcggaagatgccgccaaagcttgtaaaaaacttcaatgaattcctaaattttgcaactattaataagaatcgtatatccgatcgttttgccactcagccgcaacaaacatccggtccaatttcggttactaagcccgtggtacagctaaccaagagtgggatgggtagctccctggacgaatctgattcttcctcacttccggaaaccagttggagcgcttcaacggctgcgacgaccattcagcaggcacaggaactgagcagttacaatctacagctagatttggaaagcaatcacccatgcgaccccgacgattcaaacacaccggatcaagatcccgaccaggagtactaccccatgacgacggccataacgcgtgagctgcgcctagaggccgagaatctagatcgacaagtttttgggctgccttttacggagagcgagaaacgggaagacatcgagtacgagaagctggacaaggacgccctggacttagtggaggatctcaaggagaacgagatcataacctgtcccgatgtcagtgagctacatatgcgtcgtcgacagcgactggcggctaagagtaacagcgttcagcaaaacgagtcgcatgcctttaatccattcatcgacgaaagccaacttatggatgggcacagtccattgggaatgcgcaacagcaacagtttgcccgaagtcatcctgcccatttccactgagccgagtctagtggaggtttcgcctttggtggagatcgccacgaatgcagatgacgagagcgcctatacgcgatccccccagcgttcaacccatcttaatggagtcagtgcagtgaataccactgcggccgcattgcctccacctacagaattcggtggaggtaatgcattcctcatgtttctctgtctaacacttttgctacagcaccgaaacacgatcatgaaggcaggcatggactacaacgagattgccatgcactttgataaaatggtgaggaaacacgacgtcactcgggttctcaatcaggccaggcgtatgttcgtggactaccttaaggcacaaagcagcccacagcgccagagatcgcccagcgggactgtctccactggttccacgggcgcgagcttgacttcatcaatgcctgcttaagagacttgcaatcctaccccgcttccatgaaaccttagtgtcatctcagcttggcaaccgttatgtatgagttactgaaatttcacaaatattcgatgagtgttatgcagaacttctccaattcaacagaacaaaaaacccattacaataaacaattttatcatcttggcattaaaagaaactttgactccacgataaccccatgccctcgatgcacgaacttttcctttaagttttaacatttcatgaaagtgcagctcttgatgtaaccataaactcagtcgattgctcagatttgtcttgctagaggtgaatggcagaatacataaccaaagtcttctttttgtacgtatacggattttgtactttcttattttgaattaaggttttatttatattttattacatatttatctgcacctttgccaaacgatcaaatgcgagctgtttggctggaaattgctttatttctctagtctgctaatgcattccatgctgttgtaaaaactatattttagatttaaaatcgcgcctaaatactattttatgcaaataaattgacggatctataacccaaataaccataatcttattatctcaaacgttctgtatcttaaaaatctctcaacgtactctgaaaacaaaataattttgtaaattaaaatttaattcaaaaaattcgaagtaaagttaacgaatatgctatgtaaatttacgaaaaaaaagaacttttaaacaatcgattaataaacgaattctaaacaactagtgtacaatttattggaatcaaattacgttttaaatacaaaaatatcaaaatgcctttaaacgaaacaataatacgaacataaatcagaggccaaagaattcaaaagttatattttttcttgagtcgctcgcgaatgaggagacccttgatcagcttcttccagtttccgtacacgcgggtttcgtacttctcctgctccttgagaacttgtacctgttgatcctcttccca

SEQ ID NO: 15725 - DNA, 3208 bp, DROSOPHILA
cgatgattgaaatcaagtcgattgatttcagtttccttcttttgtattgttttatatttgagcaatacttacgatactgacatcgctcagaggtacaatggaacttagttagtcgtcgaccagaacagactcggaaaacatggctggcatttgcccccgggaggcggttcgggtgaaaaaatgcgaacccactgctcggccggagtggcgaaagttttcagtggacccgcagatcaccacgctggaggtgttgtactccctgctggccaaggccttcgatgtcaagtcggacttctccattaagtacaaggcctttgatccggcgggcaacgagatctacctggccgtgcgctccgactgggatctggatgccgcctttctgaggattcacaacatttccattcagacggcctcagaaccctgcctcaccctgcagatcgatgtgaagccatttacggtggtcagggagtgtgagaccgaggcctccccgggtagatccataacgggagcgcctgctcccgcaactcctgcaccttttgtacccgcccgcgagcttatgtcaccactgcagtccttaggagtctcccagaaatatgtccagcacatgcagaccaaactgggcagctccattctgaatcagatggagaaaaccttctccatagtgcagaaagcgtttaacttatccgaggagcatatggccaatctaccgccacggccgcccatgtgcgacagcgagttccggctctttctggacgcacttggtcagattcaacgcaaggacgagttgcatagggtcatcttcctaggaggcattgaccccagtctgcggcgcgttgtgtggaaacatctgcttaacgtttatcccggtggcgctaacggactggcacttgatggacaccagcgtatggaattcatgcgacgaaagtctgagcagtactgtcgtctgagagacacatggaaagcggccgtgaagcgaggcagtgtggctggagaactggcttacgtaacgagcatggtaaagaaggatgttctccgcacggaccgcctgcatccattttatgcaggcagcgacgacaatcagaacatcgctgcgcttttcaatatcctcaccacatatgcactaaaccatccatcggtctcatattgtcaaggcatgtcggacattgcttccccgctactggttaccatgaacgacgaggcacaggcctacatctgcttttgtgcgataatgtcacgtatgcgtggaaacttcatgctggatgggattgcaatgactcagaaatttgctcacctaacggaggcgctaagtttttatgatcctgacactttttccagctcctacagcgctacgccgaccagtccttcctatctgctgacaaaaccgcgtgaaagtccctacaccaaggtatgcgctttgcgccgtcagagctcttcagcctccttgagctcactaagttcttcggtgggaaccagtcacggattggacaatacaaaacggctgaatcacagcctagacgacaatatgtcgcgtcatgcgacagccgctgctcgccgccaaagacggacttcggccaaggtccatcaaagtctggacgagtcaaaaatgctggcgcttattgagggcgctttggataataggaatgtcaagttggaacaaaacttgtccgccggcgaggaaaccgaagatgatgatgtatttgataggaaggagtcgccaagctttttggagacaaatccgtttaaggatgatgctcagagagcaccagaaagagaaaccacacctcctgtttcaccaggacgagcctttctgtgtagttcgtcttcctcgaatctggacgaggaccccagtgacaggaaggccaagctgcagcacaaaaacattatgaccgtgagcaatatcatcgccaaacagctagctactaatgctagtcaagtgagtgaaagtatgaagcgagtaagcacttctagtggtggccattttaaggatctcaaggaaaagctggcggcaagcagtcgtattggtatctcttttgatggagaaggagaagatgatggtgatcggaagatgccgccaaagcttgtaaaaaacttcaatgaattcctaaattttgcaactattaataagaatcgtatatccgatcgttttgccactcagccgcaacaaacatccggtccaatttcggttactaagcccgtggtacagctaaccaagagtgggatgggtagctccctggacgaatctgattcttcctcacttccggaaaccagttggagcgcttcaacggctgcgacgaccattcagcaggcacaggaactgagcagttacaatctacagctagatttggaaagcaatcacccatgcgaccccgacgattcaaacacaccggatcaagatcccgaccaggagtactaccccatgacgacggccataacgcgtgagctgcgcctagaggccgagaatctagatcgacaagtttttgggctgccttttacggagagcgagaaacgggaagacatcgagtacgagaagctggacaaggacgccctggacttagtggaggatctcaaggagaacgagatcataacctgtcccgatgtcagtgagctacatatgcgtcgtcgacagcgactggcggctaagagtaacagcgttcagcaaaacgagtcgcatgcctttaatccattcatcgacgaaagccaacttatggatgggcacagtccattgggaatgcgcaacagcaacagtttgcccgaagtcatcctgcccatttccactgagccgagtctagtggaggtttcgcctttggtggagatcgccacgaatgcagatgacgagagcgcctatacgcgatccccccagcgttcaacccatcttaatggagtcagtgcagtgaataccactgcggccgcattgcctccacctacagaattcggtggaggtaatgcattcctcatgtttctctgtctaacacttttgctacagcaccgaaacacgatcatgaaggcaggcatggactacaacgagattgccatgcactttgataaaatggtgaggaaacacgacgtcactcgggttctcaatcaggccaggcgtatgttcgtggactaccttaaggcacaaagcagcccacagcgccagagatcgcccagcgggactgtctccactggttccacgggcgcgagcttgacttcatcaatgcctgcttaa

SEQ ID NO: 15726 - protein, 1022 aa, DROSOPHILA
MAGICPREAVRVKKCEPTARPEWRKFSVDPQITTLEVLYSLLAKAFDVKSDFSIKYKAFDPAGNEIYLAVRSDWDLDAAFLRIHNISIQTASEPCLTLQIDVKPFTVVRECETEASPGRSITGAPAPATPAPFVPARELMSPLQSLGVSQKYVQHMQTKLGSSILNQMEKTFSIVQKAFNLSEEHMANLPPRPPMCDSEFRLFLDALGQIQRKDELHRVIFLGGIDPSLRRVVWKHLLNVYPGGANGLALDGHQRMEFMRRKSEQYCRLRDTWKAAVKRGSVAGELAYVTSMVKKDVLRTDRLHPFYAGSDDNQNIAALFNILTTYALNHPSVSYCQGMSDIASPLLVTMNDEAQAYICFCAIMSRMRGNFMLDGIAMTQKFAHLTEALSFYDPDTFSSSYSATPTSPSYLLTKPRESPYTKVCALRRQSSSASLSSLSSSVGTSHGLDNTKRLNHSLDDNMSRHATAAARRQRRTSAKVHQSLDESKMLALIEGALDNRNVKLEQNLSAGEETEDDDVFDRKESPSFLETNPFKDDAQRAPERETTPPVSPGRAFLCSSSSSNLDEDPSDRKAKLQHKNIMTVSNIIAKQLATNASQVSESMKRVSTSSGGHFKDLKEKLAASSRIGISFDGEGEDDGDRKMPPKLVKNFNEFLNFATINKNRISDRFATQPQQTSGPISVTKPVVQLTKSGMGSSLDESDSSSLPETSWSASTAATTIQQAQELSSYNLQLDLESNHPCDPDDSNTPDQDPDQEYYPMTTAITRELRLEAENLDRQVFGLPFTESEKREDIEYEKLDKDALDLVEDLKENEIITCPDVSELHMRRRQRLAAKSNSVQQNESHAFNPFIDESQLMDGHSPLGMRNSNSLPEVILPISTEPSLVEVSPLVEIATNADDESAYTRSPQRSTHLNGVSAVNTTAAALPPPTEFGGGNAFLMFLCLTLLLQHRNTIMKAGMDYNEIAMHFDKMVRKHDVTRVLNQARRMFVDYLKAQSSPQRQRSPSGTVSTGSTGASLTSSMPA

SEQ ID NO: 15727 - DNA, 2789 bp, DROSOPHILA
gggcttttcgtggatggggatgggtgagtggtgggcagaggggccaaatgcaaacgatgtgtttttaagttcgcttacatttggcaggctcgtgaaggagctgttgagtgtgtgttcgggtttaaaagcatgtgtgcaccggaatggatggggcttgcacggatttacctctactttttttccattttttttcaccaagtggacaacggtaacgggtcaattaaagtggacccggctgattgttattaaggtggctgcgggaaaagggctgtaatccaatccgttttaaggtgtttcgctactaattatcttaatacttaagggaaattccgtgaaaatcgtttttccgcatcgagcaaatcaaattgtatgcaatccaagcgccaaagaaaataaaacgcaagcaaataaacgaaacaaagctcaagttcggtgaatggagataaaaagtttgagaagcacttgcgtacagtttggaggctagctgcggcgccatctggcgggcgaacataacgtggcaacgccaacggcgttgtagtttgaatcttgagttcattaacatgcaatgaaaataagaaatcgttaaactatatttaacataaaagttcctgcttatctgtactactgtttaatatattttcatgatatgcttttatatataatttcaatccaagtattgtcataattatcactatagcttatattattttttatttttagcgtaagctgaaaatacttagcatgatatttatttttccagtaaaatatatattatatctataaattcttatcaacaatattgcgctgctgttcatattgcgctgttgtcataattatcactatagcttatattattttttatttttagcgtaagctgaaaatacttagcatgatatttatttttccagtaaaatatatattatatctataaattcttatcaacaatattgcgctgctgttcagactgcagcataggaattcacatttagtgcattataaacgttcgtctaaagaggttcaatttgctaagcatgttccagctgaaagttctcctatattacgcaattatcgcaatagttataaatgcatcaccttcaggatgcgaggagacagatcgtgtcgaagcctcgaagcgctgatgccattgatcggtcacattgcccagcaccaggaacagtggaaaacctgcaagttgcaagaaatacaggcccaacagagggatattgaaaaagaaattgaaagccagaagacatcgctaacggaatcgtggaagaagatcattgcagaggatatcgagaacagaaccaataggtcagaacttaagatggagggtcaactatctgacctacaggaagcattgactagtataacgacgtcgctgaagaatatgtctgcgaaaataaatattttacataggttcaagcgaatcggatcgagatatttgcacatcgaagacatagtccaacaaaattggaccagtgctttgagcgcatgtcaaaagatgggaggtaatctagcctcaattataaatgaagcagactttaatgctatcgtttcgcaactaagcaaagacaacacttatatgattggcattagtgatctggctgaaaagggcgttttcatatctgtgtcctccggaaagagagcaccttttttgaaatggaatcctggagagccactatacgaacatgtagatcagcgttgcgtttctatacataacggtggcatgtgggttgcttcttgtacttctgatttcaaatacatttgcgaggcaaatgaaaatgtatagtaaacagatatatataaatatatgtacacatatgttaagacttgcaatgtgaaacatacaaaaagaaatccatcttgtacagataattcgttaaacttttatttagccattgatgttttgtgtttttaacattatatacttgagtatcattttaatcttcatttttttttgttgcatttcgagtgcttcgcacattctatttaatgacaaatcgtgtgcgaaatgtgcaatatgaaattggaataaattgcctacttgaaaatgcgtttgtgatgaaaatcatgtaccacgtatatatcgttaatcggtatcaggatcgatatctctatcgataactaaggctagctcgcagtgagtgtttcgagtgttttgtgtgagtgtataacgcatcgttcgcttaaagacctagacttaagactaaacaaacaatttgaaacaaacagcctagatggaaaacatacttctcgtacatcaggtagaaacaacatcagagataagaattactcatctataggagtaataatcctatgagctgggtgtggagaggggatgggggagattcgttgcttggtaaactttgtcacgcgttaaggtccttgaaacagaaaataatacaatacacataagatatgcagtttgccatgagttgggttgagataagcaaatcggtattcgggttggactggatcgcctagtgggatggtgccccatacgagctgctgggagcagagggtgcgggcggggcagctggagctccgtactcgggcgctggaggcgccacactgttgggatagggtccggtctcctccttctgggtcttgtagcggatgaagtacacctccggcttgctgggttgggtgggagctggcgttgggataatgatctccggctgctcctccggcttcttgactagcacgtacaccagggtcttctcttcgttctgtgggaactgcggtattacaggggcggtcggtactggtggagatggcgccttgatgaa

SEQ ID NO: 15728 - DNA, 789 bp, DROSOPHILA
cgttcgtctaaagaggttcaatttgctaagcatgttccagctgaaagttctcctatattacgcaattatcgcaatagttataaatgcatcaccttcaggatgcgaggagacagatcgtgtcgaagcctcgaagcgctgatgccattgatcggtcacattgcccagcaccaggaacagtggaaaacctgcaagttgcaagaaatacaggcccaacagagggatattgaaaaagaaattgaaagccagaagacatcgctaacggaatcgtggaagaagatcattgcagaggatatcgagaacagaaccaataggtcagaacttaagatggagggtcaactatctgacctacaggaagcattgactagtataacgacgtcgctgaagaatatgtctgcgaaaataaatattttacataggttcaagcgaatcggatcgagatatttgcacatcgaagacatagtccaacaaaattggaccagtgctttgagcgcatgtcaaaagatgggaggtaatctagcctcaattataaatgaagcagactttaatgctatcgtttcgcaactaagcaaagacaacacttatatgattggcattagtgatctggctgaaaagggcgttttcatatctgtgtcctccggaaagagagcaccttttttgaaatggaatcctggagagccactatacgaacatgtagatcagcgttgcgtttctatacataacggtggcatgtgggttgcttcttgtacttctgatttcaaatacatttgcgaggcaaatgaaaatgtatag

SEQ ID NO: 15729 - protein, 229 aa, DROSOPHILA
MRGDRSCRSLEALMPLIGHIAQHQEQWKTCKLQEIQAQQRDIEKEIESQKTSLTESWKKIIAEDIENRTNRSELKMEGQLSDLQEALTSITTSLKNMSAKINILHRFKRIGSRYLHIEDIVQQNWTSALSACQKMGGNLASIINEADFNAIVSQLSKDNTYMIGISDLAEKGVFISVSSGKRAPFLKWNPGEPLYEHVDQRCVSIHNGGMWVASCTSDFKYICEANENV

SEQ ID NO: 15730 - DNA, 6865 bp, DROSOPHILA
cctccacctccaccgccaccaccaccaccactaccgctgttcgcactgctggtgctaatggtgcgagttttctgcttggatcccttggtcaggttctcggcaatccgttcgcgtggcacccactcatcgtagcgattgttccagcctgtgtaatgtaccaggtacatgggcactccgcgctggacactgatctcgatgaccttggcctcgtaagtgctgccatgcgagctgggcgacttcttctcgtggtagttcaccttcagcttatccccgatgcccaccacaaagtcgccggtgtcgatcttctccacgctaatcttctccttctttcgcttgccgctgctcgcctgcttctcctccttgtccttgtccttctccttgtccgcctgcttgctccgctggtgcttctccttcttgttggacgcggtctgggcggtggccgctgctccggatgtgcttgcgccagcagacggcggtgcagcaactgaaagtaagacatatttattaataaacgtcgattcttcaaaatctgttttatttattaatcatcaaaatgcccttattcctaactcgttacttgtggttattaataaactattattgttactttttatttggtggttttaatgaattttatagggtgatatatatagattatacataattaaacatttttaaaaatacttttcacaacattatgatcttaatcattcaactactttaatgtttcatctaacaaaaactattcaatccaacgaaatgaagagcagaacaattaataattatttacacacgccctcgcgcattttcgcattttatttataaacatttctgagacatcttggttcgaaagagagggaagatgccttcaaagacaataaacaactaatcaacatgaaagcataatcgtgcttgcattactacagatatgtatatccacgaaatacacgaaaatttatttgattaaaaagcgttttaaaaagctccaccagttagaaagagtgcggtgataaataaatcaccattttcacattagtgaggattaaaaaacaaaacaaactttctggtgttaagcaaaaagagaatttataagatattcgtacaagtttaaacgtttttctttttgctattcatattttctcatgagctctccctcgaattagagggagagggaagatgaaagcatatcttatcacattatcatacccataaaaataaacaaagcaacaagtgcttttgtcagagctttttatctgcaaatatccgtgttttaacgagcttaatttctctattagcgtacattttagttattcactcttggccgacaacttttgcccaagtatcgatactgggaatcgatactttcaggtgggctggcgagtacttcgcgcatgttgaaaataggtaaaattagagtcgaattgcacatactctttacctacaaccatacttaatgtatatactgccacttggtgcaattttcaatatgtattttcgatacatattataactatggtaaatttttgatatttcaagcagcatttatagatagaaactactttatagttacatatggttatagtgcattatctacaaatgattaaatgattataactattttcacaattaataatgttaatgtttagtttatctcatcaccaagtacactgtctgtactcttcataaagtttgatatacaccaacgagatggtgaagtgtagctaccctctggaaagggtatagcaaacaacacgaaacagggttgcctactgcgggaaatatcgcatgggggcatggatacagtgtgttttgttgtcgaggagcggctggtaaacagccgaattagcgctcccaagattgcttatcaattaaaccaacgccgattgggggccagaggctgctggggccaatgacgccactggacaaaccacaagacatatcacttaggaggccacataaatcagcagcgaaacagattcaccggagcggcaagaagcagagcggggaagcttgagattggtttggatttctttcgaaacgaatcgactgatttaccggtgatcagttacataacaatgcgcttgctcaggcccagctgggcggggttgctgcgcggaaggcaccaccagcaccagcgacatcaccggcgtctcctgctgaccaccagtcgcggtagcaatggagaaagggaggagcagcagcacagccaatggagttctcccggcagcaggtcggagcaactgttctatgctgccttttgggcaggtggcctgaccctaggctaccactggctgaccgacaagaagaaccatgtgctgctcgagggacagaaggtggccagcgaggaggaactagaggcaacggcccgactgtggcacgtgaccaacagaagggagttgcccacctacagggcagaagaagtggagcagcacaacagcgtagagaaacgcatttgggtcacctacggcctgggcgtatacgatgtcacggactttgtcgagaatcatcccggtggcgataagatcttgatggccgccggcagtgccatcgatcccttttggggcatctaccagcagcacaatacgctggaggttctggagctcctagagggctttcgcattggcaatctggagggactggtggtgaccaacgtggacgatgagctgggctcaccctggtcacaggagccgcagcgccacgccctgctcaagccagcctccaagagaccattcaacgctgagccacccattggattgctggccgagcagttttacacgcccaacgagctattctatgtgcgcaaccacctgccagtgccagtgataaatccggaggattacgagctggaaatcgaaggtggcgccaaggacaagaccctcactctggacgggatcaaggccctgcccaagcactcggtcacggcggccatcatgtgcggtggcaatcgacgctctgagatgaccaaagtcaaggccgtaaagggtaagtcgtctggttaggtatctctctgatgattcccttaggtccatttgtccctattccgaggtctttcatggggagctggtgcagtgggcaatgccaagtggtcaggagctcgactgtgcgacattctaagagagcagggcgtgcagccggatgagaccaagcacgtgatcttcgagggtgccgacctggatcccacttcccacccgtatggagcatcgataccactcgccaaggcgctcgatcccaggggagatgtcatcctggcctacgagatgaacgatgagccgctgagcagagaccatggcttccccatccgcgtaattgttcccggcacagtgggcgctcgcaacgtgaagtggctaacgcgaatcgtggtggcggacaaggaatcggactcgcactggcagcagaacgactataagggctttagccctagcaccgattgggacacggtagacttcagcaaatcggatgccatccaggccatgccggtgacatcggccatctgtacgccacagccaggggccagggtgaaagtggacgacgacgagggtcacatcacggttaggggatacgcgtggagcggcggcggcaggaaaatcgtaagggtggacctaaccaacgatgagggtgttagctggcacgtggccgaactggagcaggaggagatgcccgatggcagacactacggctggtccctgtggaccgcacgtctgcccgtttccgaggcccaaaggagagccggcgacgtggagatttgggccaaggccgttgactcggcgtacaatgtgcagccggagaaattcgagcacatctggaatctgcgtggcgtcttggccaacgcgtatcacaaagtcaaagtgaagattatctgaaggggagatttctggcaatactcaagatagaaggagacatagatagaaactaagaagacagcttgtccacaacaaaataaagaaaaaccgattttggaaatcagtggttaaccccaaaaccccttctacttcgttctcacttacccgatggtgaggcatcccgactgcgctgcatctccgcggaattggccttgctggaagcggaggcactactgcccgaactgatgttggtctccttttccatgctatgcctggtggatgcggccgccactgccgctgccttgatcttggccaagggcagatccgattcggcatctttgttcattgccgtggtcgcaatggttgctgagccacccgaagtggctgatgacaagttggtcgccgtggaagcagctgccgaagtggttggcatggctgcagctgatgcgctggctcccgatccggccactgttccggacgatgtggcttgaaccgcagtcgacttctcctcgtatttctccaccagactcttgaccttgccctgttgactgctggccgctgatcccttcctctgcttcttgggtggctccactaccacgctggattcgctggtattgcccgactcctcagctgcggactgcgaggcggtggacacggctcttgccggcgtagaagaagccgccactgatgctgctgctgcactgctcgatgtggaagccaccacgtttgtctgattgggctgggccagcttgctgatggtctccgtcttcatggtctccatgggcttgggcgaggccactgaattggctcgcaccaggctcctacccttgctgcggttcgagttgcgcgaagtcatcagcatggagcagcctagcttccgatgaaaatcgccgtatggttgcagaaacttcttgtacgcctgcttcaccagattcatcacactcacagtgcagggcgtgaagcccaggcgcatggcgatgagcttccactgattctgcgaggtaacgcggttgtaaccacctcgcttctgcaccgcacggaacagacgatacagatcgacgtcccggctgagaatggagggcaccttgtttagcggtgtgccccgatcatccatatacttgtagagctgggccacgaaccgatccttctcctcgtgcggctcatcgtcggaggagtccgagtcaatctcgccctcgtcatcgctcgagatgttcgtcagcccgaacagcgaatccctgtcccaatgggcaggcagaacactgctgtccagaaactcaagggccgcctgcacagcaggcacatcttgcttgctcgccacttcgcgggtgaactcggtggcctccttcttgggcaccgtatagtagcggccatccttgaacgagcgcaccaggtattcgtctttcacgcgaatgcgaacggtggcctgcgcggtaggcgccaccaccagtgcagggaaccacttctccttgtccttcttcttggactccgtctccacgcacaccaccttgccgatgttctcctccttctcgttcaccacttccttggcatcgctttcgtcgtcgtcctcggaactatcctcgttcaggtgaccacgccgtctgccccttcgaccacccaccacgggattgccaaagtgctccggatgggtgagtggcagctggtctagcgtctcgctctcgttaaaatgcctgccgctcttgaggcacagagccgttcgcctgagcgtggtgatgtctccatcgtcgaagaccaccgtgtactgcgaacaatcctggatcttcgtaatggtagcctccacgagttccttgcgatctggatgacgcacctccacaaccgcaccgacgcgcagttggcccgttggcgctttgatggcatcatcggagacaatgccggagcctaggccctgcttgtaggccaccttcaccttgatattgcgcaccaccttgctgaccttcgcctcgcagaaggcgcccttgtacttggcactcacctccgtgcccacgggcagcgaaggcggatcgtccatttgctgaaatgataaagaaatttcagttttgaataagttaacgagagcagcttatgctgatgggaatgggtaccattttcttctcctgctccttattcttctgtcttcgataatatgatatcatagtggttcgcgaattgctttgatacatttcgaatgctttgaacttagtcgtttgcaggaacaattttcttaactagctttctaaatgaagcacttcgttggaataaagccgataactgaacggagcagacattctaagtgacgttagatgttacaaatgactagggatcctaactgggaattatcgagtagagtgtagaagatggtcccacttcaaccacttgtatgatttaatacggaattatgtatatattatgaaatatttcgcaataactatcaataattggatcaactggctggcgcacctttggtgctttgttttggctcatcccacttacctgcatcttaatttggagatttctgtgctgcttctggaccaagtgttaggatcgatcctactacctttcgcctgacatcttcttcaggtgaccgatttaatccttttttttatgagtttttaatccttttgtttatcaaatggagtgcagcgttgtcgttcttcttcttcctgcgcagctgtaccacccactcagtggaaattgcgttatcccagtctcctgagcgcaggattcactgcagcagttttcgaaatctggtggcaccggtcttagtttcggtttgcgcagtttattggccaactggtcatctgcggcattagcttattttgaaagatactcgtttagtttacgtttttggcggatgaaattttcgtgaaattctagagatgatcggataccgatagcctatatcggcggctgttggtaatagggttgttgcctatcgataggcaacagctgagagcgccagatggcgctaataccaagttattaatagttactactcataggtggagctgtgctcatacatttttaattgc

SEQ ID NO: 15731 - DNA, 2281 bp, DROSOPHILA
atggacgatccgccttcgctgcccgtgggcacggaggtgagtgccaagtacaagggcgccttctgcgaggcgaaggtcagcaaggtggtgcgcaatatcaaggtgaaggtggcctacaagcagggcctaggctccggcattgtctccgatgatgccatcaaagcgccaacgggccaactgcgcgtcggtgcggttgtggaggtgcgtcatccagatcgcaaggaactcgtggaggctaccattacgaagatccaggattgttcgcagtacacggtggtcttcgacgatggagacatcaccacgctcaggcgaacggctctgtgcctcaagagcggcaggcattttaacgagagcgagacgctagaccagctgccactcacccatccggagcactttggcaatcccgtggtgggtggtcgaaggggcagacggcgtggtcacctgaacgaggatagttccgaggacgacgacgaaagcgatgccaaggaagtggtgaacgagaaggaggagaacatcggcaaggtggtgtgcgtggagacggagtccaagaagaaggacaaggagaagtggttccctgcactggtggtggcgcctaccgcgcaggccaccgttcgcattcgcgtgaaagacgaatacctggtgcgctcgttcaaggatggccgctactatacggtgcccaagaaggaggccaccgagttcacccgcgaagtggcgagcaagcaagatgtgcctgctgtgcaggcggcccttgagtttctggacagcagtgttctgcctgcccattgggacagggattcgctgttcgggctgacgaacatctcgagcgatgacgagggcgagattgactcggactcctccgacgatgagccgcacgaggagaaggatcggttcgtggcccagctctacaagtatatggatgatcggggcacaccgctaaacaaggtgccctccattctcagccgggacgtcgatctgtatcgtctgttccgtgcggtgcagaagcgaggtggttacaaccgcgttacctcgcagaatcagtggaagctcatcgccatgcgcctgggcttcacgccctgcactgtgagtgtgatgaatctggtgaagcaggcgtacaagaagtttctgcaaccatacggcgattttcatcggaagctaggctgctccatgctgatgacttcgcgcaactcgaaccgcagcaagggtaggagcctggtgcgagccaattcagtggcctcgcccaagcccatggagaccatgaagacggagaccatcagcaagctggcccagcccaatcagacaaacgtggtggcttccacatcgagcagtgcagcagcagcatcagtggcggcttcttctacgccggcaagagccgtgtccaccgcctcgcagtccgcagctgaggagtcgggcaataccagcgaatccagcgtggtagtggagccacccaagaagcagaggaagggatcagcggccagcagtcaacagggcaaggtcaagagtctggtggagaaatacgaggagaagtcgactgcggttcaagccacatcgtccggaacagtggccggatcgggagccagcgcatcagctgcagccatgccaaccacttcggcagctgcttccacggcgaccaacttgtcatcagccacttcgggtggctcagcaaccattgcgaccacggcaatgaacaaagatgccgaatcggatctgcccttggccaagatcaaggcagcggcagtggcggccgcatccaccaggcatagcatggaaaaggagaccaacatcagttcgggcagtagtgcctccgcttccagcaaggccaattccgcggagatgcagcgcagtcgggatgcctcaccatcgggtaattgctgcaccgccgtctgctggcgcaagcacatccggagcagcggccaccgcccagaccgcgtccaacaagaaggagaagcaccagcggagcaagcaggcggacaaggagaaggacaaggacaaggaggagaagcaggcgagcagcggcaagcgaaagaaggagaagattagcgtggagaagatcgacaccggcgactttgtggtgggcatcggggataagctgaaggtgaactaccacgagaagaagtcgcccagctcgcatggcagcacttacgaggccaaggtcatcgagatcagtgtccagcgcggagtgcccatgtacctggtacattacacaggctggaacaatcgctacgatgagtgggtgccacgcgaacggattgccgagaacctgaccaagggatccaagcagaaa

SEQ ID NO: 15732 - protein, 678 aa, DROSOPHILA
MDDPPSLPVGTEVSAKYKGAFCEAKVSKVVRNIKVKVAYKQGLGSGIVSDDAIKAPTGQLRVGAVVEVRHPDRKELVEATITKIQDCSQYTVVFDDGDITTLRRTALCLKSGRHFNESETLDQLPLTHPEHFGNPVVGGRRGRRRGHLNEDSSEDDDESDAKEVVNEKEENIGKVVCVETESKKKDKEKWFPALVVAPTAQATVRIRVKDEYLVRSFKDGRYYTVPKKEATEFTREVASKQDVPAVQAALEFLDSSVLPAHWDRDSLFGLTNISSDDEGEIDSDSSDDEPHEEKDRFVAQLYKYMDDRGTPLNKVPSILSRDVDLYRLFRAVQKRGGYNRVTSQNQWKLIAMRLGFTPCTVSVMNLVKQAYKKFLQPYGDFHRKLGCSMLMTSRNSNRSKGRSLVRANSVASPKPMETMKTETISKLAQPNQTNVVASTSSSAAAASVAASSTPARAVSTASQSAAEESGNTSESSVVVEPPKKQRKGSAASSQQGKVKSLVEKYEEKSTAVQATSSGTVAGSGASASAAAMPTTSAAASTATNLSSATSGGSATIATTAMNKDAESDLPLAKIKAAAVAAASTRHSMEKETNISSGSSASASSKANSAEMQRSRDASPSGNCCTAVCWRKHIRSSGHRPDRVQQEGEAPAEQAGGQGEGQGQGGEAGEQRQAKEGED

SEQ ID NO: 15733 - DNA, 7100 bp, DROSOPHILA
aatgcaattggaatcttatcccaccttagtgtgtccctcgaagcgacgggtggtcttgccggcggccaaatcccacaggcgaagggtctgatcccaggatccggacagggcgtagttgccatcggaggagagcaccacgtcgctgatgaagtgcgagtgtccgtagagacgcttctgggggtagccgtagttggtgtcctcgtcgcgggtcagcttccacacgatcagggtcttgtctgcgaatcgagatggtggccattaatatacgcacgtgctaccagataaatccgaagaatttcaatggcgattacttaccacgggaggccgaaattatggtgtcgggatccttggggttggtggcgatctgggtgacccatccattgtggccaatgagggtaccgcgcaattgcagggtctcggacatcttgagtttatattatttgctacggagcgcgaaggaaacacgtccaaaggcgctgcaagctggcagaaaaagaggcagttccggttccagtgctcgctaagatgccaactgtcagcgagcgttcagtgttggacaggacaaaactatcgatagtttgaattttctgttacaaataatacgtgtaaaatgtaacgtcaaataataatatcaaaaactttaaaatatatataaaaaaaataaatacttttacaccaagtattaatattattatatctaaagaaccccagaaatattgaagtttagttttaaaacaaattgtgctattatttaagaaataatcgacgctaatgcacatctatgaaaagactactaaaggattttaaaacaatcccaatatcttgttgcccaaatgcctatgtacatacttttattttgtcactatcacgtaataatgtaaaaaaaacggtgagcgttgatcccactttattttctagttttacttggtaactgttggccaaatagtaaggataccatccacaagttttagtcggtatttttgtagaaatgtcaagcatgcatcgctaatcgatacacacacacacagcgcgttcttaagcgtttcgcggcaatcggtcacaccgagggcagtctttcccttcgtatatcgtgtcgtcgtctcttttgtgaacaaaaaatacgaagaaaatcgcccaaatcgagttgattcgattggcaattgtgtggagataaacgagtgaatacgcggttggcaatcgaacgcaacagtagttgctaattttcctgcacccctgagttataataaaagccgtcaaaattgaatcgacaaagattgacgagactttttcttccaccacaactgcgatggaggataaagcaacaacaaaagatcttgatcaatggattgagcagttgaacgaatgcaatcagttgacagagacacaagttcgcaccctctgcgacaaggtaaggcccggtccttgcccattttccccatgcgaattaggagatgttataaaaataattttcgtcattgcatgcgagcgagcgatttttttttgcaaatggtgctccaacgctgcgtgtctctggccctctcgctctttccaatggggagaggcgctgagcggagagcgcgagagcatgattcatgtcgtgccctcttgctcgcacagtagcggcggcttgcgtcgccatattggaatattggtaaattccaacagccaagcgccgcattgccgcgcacaagtgcgagcgggacaacgggacgggcaagtgcgtgcgtgaatgcgacagctagaacagcgctttggtctaatgggctaaacctgggcaaaaagagatatttctttttgtattattgtacaatttgattgtttaactaaagtgcattgtgcgtgtttaatgttgttgttattgtgtccaccggaaactgagcacccccgctccgtgcaacctcatgcgcgttttgtcgttgctgagtaaatattacttaatgtttttgtgcgtcggtgtgtgcgcgcccctagaatatgtatctatgtaccgtcgtatctcaattctagaataatgcacttgcattggtgtttgtgttcctttttttatgaccaaccatgttcaattaaacacttttgatatcaattgtttttaatttgccgattttaccgttcatcaggcgcgtcgcgcacacaaacaaacagacaagcaaaaagagtgcaagagagggagagaaaaagagagggtgaacagataacgattcattgatttaggagtaagtggggttatgtttgcgtcacccaaatatttgtcagtgttcccattagaatcttgaatctccgttctccctccgagaagaacgttcttcgctcttctcgggtgcgtcttctgcggcctctctccatccttcccgttgctacgaaaagaaaagcggagagtacgcggagagagcacaagctgcatcagtgtttgtgcatgcatctgtatgggtgcgctggcctcgtcatgagttcaaaaattatttttctttttttttttttttcgatttctggccaagcggaagcaacagcctccaaggtaatgctgtgcatatggcaaaaaatctaattggctcacgcacaaatcgctcatttgcgccgccggattctacccccggaacttgttgtcatgtcccatttcgtcagctgataaatataagaattcgcaaagaacacggcggaatggtcaaaataaatgtgcaatttttgtttgctcattttggcacatttatgtttgtaaaaaccggtttttttgatgctgtatattgacgcccatcgggaatttttgaatcgaccttcatattttattttactaaagacgatagaatactttccagaatcgtgaatttgttatgtttatacggacaactttttatcgtacgttcatcttatctcaacttattaaaaagctttgcttcctttgttttgattttcatacagcttatattagcaacttaaacttgtttgcaactgacgcaaaattcgatgagaaaatagttgaggttcttcgcttgttgaccaaatcttgacggataaccttggcctttgacaaggttttatcatccgcacatgcggatcactttcggttttctcagtactttctgtttcgcagatattctgtcatgtcattcaccattcaccgaattatggcaggtgaaaaaatagaacatcaaagtttccatattactttcatttggttaactatttacacacaaacgtaacaaaaatgttttgtaatttccggaaattttgctacatgtttatgtttttcttataggaagtagcaatgtttaggtacacagttttatagggttttgcgggaagctattttcagaattacccaagagattgagttttgatgccattaaaatttcttgtgggatgtttaaagagaacaagtgatatttatttccctcgattctctgtaaaaaaacgcatgcacttatccaatatatttgttttaatttctcttctagttacaagctatttttagagtacactttgagtgttggcgttgagtcattaagtatagtgaataatgtacaaagtactaatcgttttatttatcttttctgaccctggaaacgatttgggctagattatgttaatcagtattttaatattggtattcaaagttgtttattcggttattcgaatagggaggtaacattaaaacgtatctccctaaaaatatccataaataaattgctgattggtctactgtttccatttctttacaggccaaggagattctctccaaggagtccaatgtgcaggaggtaaaatgcccggtgacagtgtgcggagatgtccacggtcagtttcacgacctcatggagctcttccggataggcggcaagtctccggacaccaactacctgttcatgggcgactacgtggaccgtggatactactccgtggagaccgtgacccttctggtggccctgaaggttcgctatcgcgagcgcatcaccatcctgcgcggtaaccacgagtcgcgccagatcacacaggtgtacggcttctacgacgagtgcctgcgcaagtatggcaatgccaacgtttggaagtacttcacggatctgttcgactacttgccactgacggcactcgtcgacgggcagatcttctgcctgcacggaggcctcagtccctcgatcgacagtctggatcacattcgggccctcgatcgcttgcaggaggttccgcacgagggtcccatgtgcgatctgctctggtccgatcccgatgacaggggtggctggggaatctcgcctcgtggcgccggttacacctttggccaggtgagtgttgtctgcatgttggctatttctcaataaaattcggagctgatttgcctagcttggatacttggaaatttattctttaatcacattgtaaaattgttaagtgaaatacatctgaagacccgattaaaactaagctgaacaaaaattgtctgctcaaaagcatgcaaatatattctagataaattttttattgatcttaataggaaattttatcggggcatgcacttgatgaaaatcaataatcagtaatcgaagtctactgctgatataggcccaactgataacgcaatcaatggaaagagctttcgttataaattgttttgacatttcaaaccgtcaactacaaaacaaattttaactatccaaatcgaatttcattgagaaagagccaattacttctataagcatttttactaatatttccattttatttgaaggatatttcggaaacctttaacaacacaaacggcctgacactggtgtcgcgcgcccatcagctggtgatggagggctacaactggtgtcacgatcgcaatgtggtcacaatattctcagcgccaaactattgctaccgctgtggcaaccaagcggctcttatggaactggatgattcacttaaattttcattgtgagtggcaattcgcttgagctgcctttaaatgcggcatgtctgactaatctaatcgtttgcatttattttagcctacaatttgatccagcacccaggcgcggggagcctcatgttacgcgaagaacacccgattatttcctttaagctggattgctcgcacctacgcagcttacatttacacatattacatcgcattataacaacaagaagaaccgaaacaatatataatatatacaaatccaaccagcagcaacaaaataaacaaaatggcaagtgctgtcgaaaaaaaaactaccataaaaaacaacccaaaactaaaaacctcgatgcatttgttttgtggaggtcgttttaaacagagagcagtggaagagatattgtataaacaaagaaaaaaaaagtaaccataacagtcgagaacacaaaaatgcattgaacagttattgttgttggccacagtttaaaagaaaaggaaaaaaccggaaatgtcgccagcgggggcggcaggcagaaaatttatatcaaagataaaggggaggagcagaaggagaagcagtatacagaaatgatacaatccaatcgaacctaccaaccaacccagaaaccaagcaacaaaaccgcaagcaacaagaagaactacaactacttagctaaatttgttaatttataaaaataacgaactaagcgtcgcagcagaaagccagggagcaggagtgatggatggatggactcatggattatgacgtgatgtgtgtgtgggcggaaggggctgacaaaggactaaacgggacgaaaggacgaacgccaggacgtagcagcataagcaagcagcagcggtagcagcagcagaagcagaagcagacgacccacgaccgacaaagcaggaagataacgatgaagcagcagcaaaaaagtaggagcagtatgtggcaggagcagcagcgaacgccattgcgatgggggaagcgcggggcgggccagcgatttatataaaaacaaaaattataaaaaagaaaataaggaaatacaacaaatttaatattactgattaaaattaaataaaaaaaagcgaataaaactattaaaaaacaaacaaaaaagcaaagaaaaatgattaaaaaaaattcattatcaattaagttcatatgtaactttaataataataaaagaaagaaaaaaaaaacaaacaaacaattcccacctgccgacgaagagagccatcgaagagcgcgcgttcaagggagaaagtcctttaagagagacccatgcgaacgattttggtttttcgttctggcaatgacgctcccttttggcctgcgggctcctttggtagtgtgtatgcgaacatggccaagttaacacgaggccaccacgacgagcggaagtcgagcctcaaacgggccacctaattgagaccacaaaggaggcgatatgggtgtgggggaggtgatatatggatggatggcagagggcagatagaagggacggaggtcgtggtgccagccaaccaatgatgcccaagtcaaaatctaaatcagagccgggctgcctttgattcccagcgaaagcgaaagcaaaaatcttgccaactttgtataaatttttgcatattttagcagccgcccacacgaactgtcaaaagtcatgtacagtggtcgctctctattgtttctgtttacaaagtattttggaaactatttcgattggatttgatgttcctgataatttagttggttatttaactttagcatacgaatgaaaagtatattaagagcaagaaagtaaacgatatataaataataaacatttggcaatagtagaaaccctagaatatatggattattctgagataagcagttcgtgcaccgccagttggcactgtatccacatgagttttggtctggatgaaaatctaaatttgagaacatgctggatcgaggatggggactctcaagtgcccaagaacttggcgagcaaacaaccatacccatacgtacacctaccgagacttgtcatctatcatgccccaacaaacccgaaaccagaacaggagctccacaggatgctggggggaggtaattgtcgccctggctgctgtggagaggccatggagttggggctggattttcagttgtaaaagaggggagcgtggaggggggggggttcagttggaggccctggag

SEQ ID NO: 15734 - DNA, 2105 bp, DROSOPHILA
catcgctaatcgatacacacacacacagcgcgttcttaagcgtttcgcggcaatcggtcacaccgagggcagtctttcccttcgtatatcgtgtcgtcgtctcttttgtgaacaaaaaatacgaagaaaatcgcccaaatcgagttgattcgattggcaattgtgtggagataaacgagtgaatacgcggttggcaatcgaacgcaacagtagttgctaattttcctgcacccctgagttataataaaagccgtcaaaattgaatcgacaaagattgacgagactttttcttccaccacaactgcgatggaggataaagcaacaacaaaagatcttgatcaatggattgagcagttgaacgaatgcaatcagttgacagagacacaagttcgcaccctctgcgacaagtccatttctttacaggccaaggagattctctccaaggagtccaatgtgcaggaggtaaaatgcccggtgacagtgtgcggagatgtccacggtcagtttcacgacctcatggagctcttccggataggcggcaagtctccggacaccaactacctgttcatgggcgactacgtggaccgtggatactactccgtggagaccgtgacccttctggtggccctgaaggttcgctatcgcgagcgcatcaccatcctgcgcggtaaccacgagtcgcgccagatcacacaggtgtacggcttctacgacgagtgcctgcgcaagtatggcaatgccaacgtttggaagtacttcacggatctgttcgactacttgccactgacggcactcgtcgacgggcagatcttctgcctgcacggaggcctcagtccctcgatcgacagtctggatcacattcgggccctcgatcgcttgcaggaggttccgcacgagggtcccatgtgcgatctgctctggtccgatcccgatgacaggggtggctggggaatctcgcctcgtggcgccggttacacctttggcgatatttcggaaacctttaacaacacaaacggcctgacactggtgtcgcgcgcccatcagctggtgatggagggctacaactggtgtcacgatcgcaatgtggtcacaatattctcagcgccaaactattgctaccgctgtggcaaccaagcggctcttatggaactggatgattcacttaaattttcattcctacaatttgatccagcacccaggcgcggggagcctcatgttacgcgaagaacacccgattatttcctttaagctggattgctcgcacctacgcagcttacatttacacatattacatcgcattataacaacaagaagaaccgaaacaatatataatatatacaaatccaaccagcagcaacaaaataaacaaaatggcaagtgctgtcgaaaaaaaaactaccataaaaaacaacccaaaactaaaaacctcgatgcatttgttttgtggaggtcgttttaaacagagagcagtggaagagatattgtataaacaaagaaaaaaaaagtaaccataacagtcgagaacacaaaaatgcattgaacagttattgttgttggccacagtttaaaagaaaaggaaaaaaccggaaatgtcgccagcgggggcggcaggcagaaaatttatatcaaagataaaggggaggagcagaaggagaagcagtatacagaaatgatacaatccaatcgaacctaccaaccaacccagaaaccaagcaacaaaaccgcaagcaacaagaagaactacaactacttagctaaatttgttaatttataaaaataacgaactaagcgtcgcagcagaaagccagggagcaggagtgatggatggatggactcatggattatgacgtgatgtgtgtgtgggcggaaggggctgacaaaggactaaacgggacgaaaggacgaacgccaggacgtagcagcataagcaagcagcagcggtagcagcagcagaagcagaagcagacgacccacgaccgacaaagcaggaagataacgatgaagcagcagcaaaaaagtaggagcagtatgtggcaggagcagcagcgaacgccattgcgatgggggaagcgcggggcgggccagcgatttatataaaaaaaaaa

SEQ ID NO: 15735 - protein, 313 aa, DROSOPHILA
MEDKATTKDLDQWIEQLNECNQLTETQVRTLCDKSISLQAKEILSKESNVQEVKCPVTVCGDVHGQFHDLMELFRIGGKSPDTNYLFMGDYVDRGYYSVETVTLLVALKVRYRERITILRGNHESRQITQVYGFYDECLRKYGNANVWKYFTDLFDYLPLTALVDGQIFCLHGGLSPSIDSLDHIRALDRLQEVPHEGPMCDLLWSDPDDRGGWGISPRGAGYTFGDISETFNNTNGLTLVSRAHQLVMEGYNWCHDRNVVTIFSAPNYCYRCGNQAALMELDDSLKFSFLQFDPAPRRGEPHVTRRTPDYFL

SEQ ID NO: 15736 - DNA, 8638 bp, DROSOPHILA
ccaaatcctccggtagatccacaaagaagtcctcgtagatgttgacagcattgttggccgaactgatgtccattgcggcgtgcatcaattggttcacctcgatgccccaggagtcatcacgctcgacttttttgcgatagcgcattgtggactcctcgtccataatgttcacctccttgacgttccagccgccttcgtagtgattcaagccatgggaatccagggtcacgttgtgtgtcaacactgaagatgctgcatactgttcgctcagctgggtccgttcgttgatcggattgcgcagtatgtacttgaggcgcaaccgtccactcggctgcacactgaggatcatctcgttgcggtctgtgaagaggcactgcctcccgaaccggcgacgctcccgcgagaggatgaactgattgcccaaggttcccattgcaatcgactatatatataatatatatatcaaatatatataatttttttttatataacagatatcataagaattgggaagatagtgattatccctgagtgctactttttggaacgattgtaggtattagggcttaaataatgtcactggataaaaaacgaagtaattttaacgtgtttgcttcttgaacaaatctatgaaattgaatgaaaccgtgggtagagatatacttttatatctgacttattagtcatggataacgtgtattttaaatatatgtacactttcaaagcttgtaactaaatactattaagaaatatagtctacaatataaaattaaatttattagttacaatagcatttttacgtatttatcttgtagttcctgcgaaatttcttaaaatagtgcaacttatttttatattacattaaatatattttaaatccaaaaatgttaattaacagtgaaataacagtttccggtgtgtaattttacagcagtcgggtgaccattttctaaacgcgttagtgtgcctgttgcgggtagtaacaggtagccaagatgcggtcacatcgcattgttagaacgcggaaaacattcaactttttcgaaagcaacgcctaatttatccaattaaatagtgcgtaaaaagtacagagcaagctttgttgcgttggcattgaatgtgcgaaagcgaattgaagcattttgcaatatggtgagttgcaggctatgccaattggattatgtactttgtctattttgataagcctgtgcacaaatctgttgatttagaaatggatctgcaagaattcctttccctggaacgccaacaactggagaaggatcgccagcggctgggcacccaaaatccctgccccgccgtccagctaatgaagtccaacgactttaaagtgcaatgtcgcagggccaaggagtttaaggagtccacggagtccaatgaactcgccacacaatcgtcttccttggcaaccggcggccaaaacgaagaacttcacttggacttgcacgaggaggaggagcaaccgcaggatgacgagcagggtgtgctgccctcccacccctcgaagtccaccaaggagctcgcgaatcagcgccagctgctcgtcggcagcgctcgtccgtataagtcgccagatgcgtcgatgcgacgcaatttggagaacgagcggccgctcagtgagaaccgcttcccaattcatcgttcggtaagtgcactgaaagaaaagagtattgaatataattttatttaagatagtacccatttttctagtccacaaaagagttcatattaaaagtattaaaattgttttaacttacgcatgccatgcgttattcatatgaaattgtatgcactgaaatataaatgtatgttgaaaaagtttatataggatgtatgtacgtttgagtttgttttcagtgcagatccactgaatcagcgttgaagatcgagctctagaatgtgcgttgcgcttcactggcgcctcttaccgcatcgcatcgccaatttgtctagcgattggccataaatgtgcgaaatgggtttctctacgcctcgttgcgctgttcacttatgttcaagcttttccaaactcaattttttaggaatcatcgccttagttgcaaaaaaggtttcacagtgctcttagtcttaactagctgcttgtgggcaatttggtgagttctggacatttagaaagccttaagtataaaatatattactatttatgtcgctgttggttaaaatataaaaatttacatactttcgaacaatttaaaatttaaatttagcctttactgaaaagggccttctataatgcttcctaaaattttgtttaaaataacaataagcaaaagatttgtgttttaagtgtatttattagttccttgtgatttgcgagcacctgtatgctcatgagcatcaagcatttacaatttgataatttatatcaaaacaattcccattacaattgcaaatccttaagattttcttcgttacttagttataagcatagaaaactttccggttttcaatttgcattatttaaatgctttgagttctcggagggctgctaaataattgctggccaaatcgctcaccctaccgcttggattgcatagcctattagtttgcagcctacctaccgcgtgtgtgtggattagagagcagcgcaattagttggacattttaattattcacattatttcgttagacttgtccgtgttttgttgcgttttgagtgtggcctcgtttccttccgctatcaatgttgcatggcccgtttctagttgctactattttctactgtggcaagtcgattccgtgctccagttaccaaccattttggctctgtgtgaacaggcgaccattcgcctaatgaatttgctggcaccgctctcagttgtaacttgaagctcgtttgttgcgcttgcttttgtttggcctgaacttgaaattaccaagtgccaattcggttctccatagcaaacaaaccctatatacccacaaaatacagctttatgaggtgaggcgtgccgctgatggccggcaaatcaaaatcaacgaacggaacgccataaaaaaggcagtctaattgacttcatttgcaaaccggcgagcgccagaagttaacccaaaaatcagagtgacgtaaagcaaatattgaacgatttctaaaaatgtacaagctcaccaataatatatacatagttatacatagttagatttattaagaaactgtctgttgggctgctagacagcttgttataaagcaatattttttcatatttcaacttatatcttctaccatattttctaaaatgtttcattttgtcgactcatatccctttttaaggtgcattggtgtgaaagtgcacaatttttaattgtcaggaacgcccatatgcaattgcaatgatttttataaactgctaatgataatggatatggaagttatgaatatgaagtatgaatttaaatgcagctcggtcacacaaagccagagaaagtagtttactccataaattttataggaatagtcaaactatttaagccaaaatgaagcacgaaagtcgattaccaataggtgtttacaaatgtactgtgaacaaaagtcatgacctggacaaggacgtgagcagacaagtggtgattaaaaaggttgttagcgatggctggactaatagttatgatgtattttgaattaaattgaggtcatctggttgtcgaagaattaaaaatacctttcatatttcggttaaatgtccttgaacttagagagatgcgtgacaacatagggattccatacccgttcagctttcatacgcattttcattaattttcgcgcttttcgtacacaaactacctggcacttagttaacccaattttgatgcgacacgcaatcagatccgatgaatggacgtagtaagccgggtcgttaaagttcgccacagtgggtgcccgaagtttaaataaggtggttttaaatataaaaaaaaaatttggaatggctatgtcgaaaaggtgaaaggaataaaataatatatgtaggtttctttataattaatttgttgatgtctgaaaacctcaatatgaaattgtaaaccacagtttctgggctcttgacttcggttaatgggacaaaaaaaactgagcccacctcttcccccacctgagatgaactgcttgaccccgtaattcgggttccttcttgccaccacttactcttccgttttgcagtcttcattttgatagttcccttgacctgaattactggaaaggctttgcttttacagctttcatcgctgaacagaacgctctgccaactattaactatcatattcataaattatacttaattatgcaacgcagaaacgttactcggatatcctcagaccattcaggcacttgcctgaaatgatgaaaacgttaaaacccactttaattaaggcgcacatcatcagggctaatagtgagtgaagcgtagtaatgcatgcagctaataaattgaagtgcaggttcccttcgactaaaggaacaccagtgggctgaaacagctgggttttgttgataacctggcgtggaaaggcgtctcagccgagtgctcaaggcgccttcagtcgttttacgaagcgcctcgtcctttatgtttactatttttgttacccttcacaaaacaaagcatttgtatttgtgtatgaaggtagtcagtcaaaaacatgatgacagccctctaaatacttaataacgacacagaaatgatttcacgttatatatattgtgttccacaaatagaaaatgatactggatcctatagtacagatatagtatagtatagtaagacatgtaaatgggtactagcttagtcgaccccttgtcttaagtttgatgtttgtattatatataattttgttgatgccatcggtgcacgcgatttgcgccgtcgacggcataaaaattatgtgcaaaaatggcagtaggcattgtggagtgttcgctggagcagctcctggtgaagtgctggtgctgctgaccccaaaagcagaggaggaacgaagtcagaataatttgtggcccatgccacatgtaaaaatgtatacgagcttcttgctggtggttagtgtcgccgaagggaacacagggaattagaaacaaaaatgggcgcgataagaaataaggaatatggggatatatacatatgtatatacttatccctcaaaggaaccactcacaagtaaggacgacggcccactcacgttcgttttctctctcgcacgcaggatgatatggagcaatgggttacggacacattttattcgtacttccccggctttaacaatgaaaatcagaagcggcaaaattatttgcgtgagcgacagcgcgagaaccagcagaactttctcaagcaccaggtaagcgtttcaatattaccatgaaaatagtttgattatgtgcaaacattcacgacgccccgcagtgttagatttacgagcttacaatatatgtttctcatgttgcttttactcctgtagatgctccatccgccggctagcaagcatcataaagctgaacaagtgaggaagacaacacaaccaactgcggttacagcaccaaaccgctccagccaatccagcaccagcacctcgaaccacagcacaacggataagactgacctagagttaattgtaaatagtaatcccaactatgtgccgcccaaaattcggccaggcacaacacgtcataaacttctccaggatctgggacatgtggagctgtcgaacattgtaacaggagatggtattatggagcgcaacctgcggagtgccgagctggaaacagctcggaagaaggactaccagcgggatctgatgcagcaaatcgatgagaaacgtcgctccatagaattgctaagggaaaaagagcgtcgacaggaggaggctttgactaggtaatataagatagaatttttgtagctcatcttagtattttactatgaatattttcgtacaggcgactggaggcacaattaaagacaatacagttggaggagcagttagaaaaagagcgcgtgagagctgaaaaggtaatttatcatttgattaaattactgctgtaattaaaagcaatttttcatgtattcaaactaaaattgtcatagtttctataacctaggatacgtttgtattgatcgaccagttaacttgtaaatcgtagaaccttgagtttatttatataactagattaagatcacatatcagaaaattcgattacgcgctattgtcgttcattggtattaccattatgtttgtgcccaaaataaatggtgtaggttattagttgtaattgataggaatattagggtctctgatttcgtttatccacatctaatgatagctaattgcattcgagtccagcgttattaattgaataaaattcctcttacttttcttcattatgctgacaggctcgcattgactcggaacaaaaccgcttgatgcgcgagcaattgttggccaagctggaacaggatgcccagttgctgaacgctaaggagaccaacaatctagccgagacgcccaggacgtcccgcatcaaaggcaaaaccaacaacgccaccaatataagcacgaatagcaacaccaatcgggtctacaaatatttcagtaactctgcacatcacgagtacagacgcggtcagcctttaccgccggccgttgagttggactttgaggtgcctcaaatggccaaaatagagcgcgagtgcttccatctgtgcgacaagatatgtccgctatgcgatgaaccgctgaagagctacgagagctgctgtctgcgatgccagcggaaactggccctaaaactaaaacaaaaggacagcaagcatattggagagaatggggaaaaaccgagcgaagactcagaggagagtaaggaggaacaagatcggggtgattttcgggaggaagatcccgaccataactgccagagcagctacgctctggtgtgtcacaagtgcgagcgactgtacgccatgtgcccccagtgcctgaccaaaagcgatgtctgccgggcatgccagcgggaacggaatgtctgcatgaactgtcgccggaatctatgctcgttttgcctggaggaagttgcctgcggcagggacacagagcgcacgcatgttaatgacaaggaatcctttgcagatccgccctcaaacaattcatttcaagttctagaactaaactatgctgtgccaccagccaaggactctacgtcgagtaatctgaccgatgtgtcgccaccatattccgttaacatagcgcggaactcggtattccatgccgactacaaggcaacgccggtgaagccgtctatcctcgaacaactgccagcgacttcgggtagtgcaaacaccagtttcgagctggacagcgccgatgagcaggctatggagcgggtgcgacgtcagacggatcagcgcttgtcgcgctatctcaagaactacggcgatctggccaccaagcagcaacaaaaattaaagcagtcggagctgcatcgtagcaagagtgagtcccgtcatcggggcactcaaacgacaccgcagtcattggccaggagagatgttgttcttagggaggctgccggccccaatctatcgatgccgctgctgcgcgagatgcccaaaatgacgcgacaggagacaggtggacccttggctgaaaacagcggacagcggaagattgaaaatctaaaaaagcgttgggaagcgttcggcattccacagtcttcgggtggagacgtgtttctttcaagctacgaatagcaagttctaaaaactacaacagtatagtgaaagttaaacacaaagtgtaaagtgcagtttgcacaactaacaattattgactatagtaattatttactaaaataaataattattccatattgttctggtaattgttatatgtggacttagaacaatgaatcaaaacgacatacgttctcagcgacaatgtgaacaagacgagcgccggctctctttacaacgcaacaatgcatacttttctttcgtctcaccgcaaatcggtgatcgagcaccctcaccttcaactaactcgaaacttttgccctcagcgaacgacagaccgcgttcttgctctccctctctgcctgcttcggctcacaagtcgtggagcgaagagaccgcctctcctaccccggctcctctcgcagcgccaaacgaccgtcccgggtaactgtaacactgcaataactgagtgcagtgacctcactggcaactgccacaacatcaacttcgtcagcggcccaactaattattcgctgtgccagctgtaaataattcagcagcactgaccgtttgcaacaacaataatgcaccgtaaagaagaatcaaaacaaaagcagaagtcgatttcgactgtgcagactggcatggatcgctacatccaaatcaagagaaagctcagccctcaaaacaataagggcaggtagtcaacccaaaatcaatcgaaccaacaacggcaatgaaaactctgcagtaaataattcaaaccgatatgctatcttggctgattctgcgaccgaacaacccaacgaaaaaacggtaggggaaccaaaaaagaccaggcctccaccaattttcataccgagaacaaagtacaaatgcacttg

SEQ ID NO: 15737 - DNA, 2377 bp, DROSOPHILA
gtcacatcgcattgttagaacgcggaaaacattcaactttttcgaaagcaacgcctaatttatccaattaaatagtgcgtaaaaagtacagagcaagctttgttgcgttggcattgaatgtgcgaaagcgaattgaagcattttgcaatatgaaatggatctgcaagaattcctttccctggaacgccaacaactggagaaggatcgccagcggctgggcacccaaaatccctgccccgccgtccagctaatgaagtccaacgactttaaagtgcaatgtcgcagggccaaggagtttaaggagtccacggagtccaatgaactcgccacacaatcgtcttccttggcaaccggcggccaaaacgaagaacttcacttggacttgcacgaggaggaggagcaaccgcaggatgacgagcagggtgtgctgccctcccacccctcgaagtccaccaaggagctcgcgaatcagcgccagctgctcgtcggcagcgctcgtccgtataagtcgccagatgcgtcgatgcgacgcaatttggagaacgagcggccgctcagtgagaaccgcttcccaattcatcgttcggatgatatggagcaatgggttacggacacattttattcgtacttccccggctttaacaatgaaaatcagaagcggcaaaattatttgcgtgagcgacagcgcgagaaccagcagaactttctcaagcaccagatgctccatccgccggctagcaagcatcataaagctgaacaagtgaggaagacaacacaaccaactgcggttacagcaccaaaccgctccagccaatccagcaccagcacctcgaaccacagcacaacggataagactgacctagagttaattgtaaatagtaatcccaactatgtgccgcccaaaattcggccaggcacaacacgtcataaacttctccaggatctgggacatgtggagctgtcgaacattgtaacaggagatggtattatggagcgcaacctgcggagtgccgagctggaaacagctcggaagaaggactaccagcgggatctgatgcagcaaatcgatgagaaacgtcgctccatagaattgctaagggaaaaagagcgtcgacaggaggaggctttgactaggcgactggaggcacaattaaagacaatacagttggaggagcagttagaaaaagagcgcgtgagagctgaaaaggctcgcattgactcggaacaaaaccgcttgatgcgcgagcaattgttggccaagctggaacaggatgcccagttgctgaacgctaaggagaccaacaatctagccgagacgcccaggacgtcccgcatcaaaggcaaaaccaacaacgccaccaatataagcacgaatagcaacaccaatcgggtctacaaatatttcagtaactctgcacatcacgagtacagacgcggtcagcctttaccgccggccgttgagttggactttgaggtgcctcaaatggccaaaatagagcgcgagtgcttccatctgtgcgacaagatatgtccgctatgcgatgaaccgctgaagagctacgagagctgctgtctgcgatgccagcggaaactggccctaaaactaaaacaaaaggacagcaagcatattggagagaatggggaaaaaccgagcgaagactcagaggagagtaaggaggaacaagatcggggtgattttcgggaggaagatcccgaccataactgccagagcagctacgctctggtgtgtcacaagtgcgagcgactgtacgccatgtgcccccagtgcctgaccaaaagcgatgtctgccgggcatgccagcgggaacggaatgtctgcatgaactgtcgccggaatctatgctcgttttgcctggaggaagttgcctgcggcagggacacagagcgcacgcatgttaatgacaaggaatcctttgcagatccgccctcaaacaattcatttcaagttctagaactaaactatgctgtgccaccagccaaggactctacgtcgagtaatctgaccgatgtgtcgccaccatattccgttaacatagcgcggaactcggtattccatgccgactacaaggcaacgccggtgaagccgtctatcctcgaacaactgccagcgacttcgggtagtgcaaacaccagtttcgagctggacagcgccgatgagcaggctatggagcgggtgcgacgtcagacggatcagcgcttgtcgcgctatctcaagaactacggcgatctggccaccaagcagcaacaaaaattaaagcagtcggagctgcatcgtagcaagagagagatgttgttcttagggaggctgccggccccaatctatcgatgccgctgctgcgcgagatgcccaaaatga

SEQ ID NO: 15738 - protein, 740 aa, DROSOPHILA
MDLQEFLSLERQQLEKDRQRLGTQNPCPAVQLMKSNDFKVQCRRAKEFKESTESNELATQSSSLATGGQNEELHLDLHEEEEQPQDDEQGVLPSHPSKSTKELANQRQLLVGSARPYKSPDASMRRNLENERPLSENRFPIHRSDDMEQWVTDTFYSYFPGFNNENQKRQNYLRERQRENQQNFLKHQMLHPPASKHHKAEQVRKTTQPTAVTAPNRSSQSSTSTSNHSTTDKTDLELIVNSNPNYVPPKIRPGTTRHKLLQDLGHVELSNIVTGDGIMERNLRSAELETARKKDYQRDLMQQIDEKRRSIELLREKERRQEEALTRRLEAQLKTIQLEEQLEKERVRAEKARIDSEQNRLMREQLLAKLEQDAQLLNAKETNNLAETPRTSRIKGKTNNATNISTNSNTNRVYKYFSNSAHHEYRRGQPLPPAVELDFEVPQMAKIERECFHLCDKICPLCDEPLKSYESCCLRCQRKLALKLKQKDSKHIGENGEKPSEDSEESKEEQDRGDFREEDPDHNCQSSYALVCHKCERLYAMCPQCLTKSDVCRACQRERNVCMNCRRNLCSFCLEEVACGRDTERTHVNDKESFADPPSNNSFQVLELNYAVPPAKDSTSSNLTDVSPPYSVNIARNSVFHADYKATPVKPSILEQLPATSGSANTSFELDSADEQAMERVRRQTDQRLSRYLKNYGDLATKQQQKLKQSELHRSKREMLFLGRLPAPIYRCRCCARCPK

SEQ ID NO: 15739 - DNA, 3011 bp, DROSOPHILA
ggtgccttgtgatcgctgctgggaagagggggaatgaaaatttcaaaatgtaccagagcaatggacccttatcccgttctcaccctctttttcccgctacagcggaggatcgtccactggagcccgctgctcctccctccgcctggagctcatcgaaatcgctgtcatcatcgtcggaggactcgcctcccttgacgtccttgctcggcttccattcatcctcgctggccgagaagccctcggacacggaatcctcctcctcgtcggacatcttcctttttatctggggcgttttacatttatgtatcgatgcgtgctacttagttattgatttttactgcgcagttattcagggcacgcgttacacaagaatatcctaagttcgttctcctgatttgatatttgattatggatgttggggggcaagtttaatcctgcctgatctcggttttggacagtttaaatgaattgcgaaattcacattttcgcgcttggtagaaaacagacaaaaagcagaggccgagaacagtagagatgcgcgcccacccacgatggtatcgatactttcggcttatcgggacaatttatcacctaaacgaagatagtgttaataaaataatgtttactagccttataaaaatttttatttttcatttcatttttgagtgactctgggatttctttaattttatttttattacttaatataattacttaattaatattatttttgtattttatattatttattttttcaagaacgcaaaagaagcttaagaaacttcacatagagcggtattaatagatttttgaccgacagtgttgactaaataatttcaacagtgtcattcattttttatctcctaaaatcaccatctctatattcgattagtttggctatcgacttatctccaaacgatatttttgagcactacgcagctctgacgcacatctgcgaaatgtttatttacaaaacgagttagcatcattattgtcaaaaatgaattctcaaaacgaattgcatccaaattggctggctctaacaacattgccactccaactgaagcgattcgtccgagcaggagatccggattttatcgccgagtccccgaaagcagtaaagcaccaaatcgatggcttaaacggagcagaagctcgtgagttctacaaggaggtgttggatgcgcccacaacctgccaacctaaccttccaagtacccacaaaactgcacaaacaagaagagagccagaaaggatcctagtccccttcgacaaaagcaaatttttccgtttggccactagcaacaaagtagaggagctgtctcaaatgaaggcctcagaagaggatttaaattctcgggattcctttggctggactgccttgatgatggctgcctgtgaaggagccacggaggcagtgagttggctcgtgcagagaggggtccaagtagagacctcagacaaatccggaaacacagctctgaaactggcccaacgaaaaggtcacttagatgtagttcatcttttggaatccctacccattttagaggaaactagcgaagaggatgagtcagttgatggcaacaaccccttttactgtgaaatctgtaagagggactacaaagaaaccccctggccaattcatcaaacatccacagtgcatcagttcaatctaaaggctctgcccgctcataagctccacaaatttaacatatctgccaaaaatcgaggactccagctgatggtgaaacagggctgggaccaggagcacggattgggaccgagtcaaagtgggcgattgtatcccgtcaagactgttcttcgaaagcaacgcactggactgggaattgaacagcagtcggcaagggtctcccactttggtgccttcgatttaaacgctgttaggagaagggatcccatatatcagccgagaaggacgcgaagcgatatgcagagggaaaaggtgcgcgaatggaagcgagaacggtacctccgcagggtactaagttaaagatggcttacagagaaagctaacaagaattgtactataaattataaatggagccagcctaagatgttttttaagagcaaaataataaatttaattattaataatggtgatttatgaatagtagatttataaatttctcattagaaggaatacaatattagttattccttcttaagaggtacccaataaaacaactgatgttcagccgtacccaaattatattataaattatatatgaaattattgagtacaacaacatggactagcacacttacttaaaaatttaaacaattttttgaaactctatttaaagttgaaattttgtttcgaaagttggacgagggaatcacttgctaaatacacaaattgttaggtttatacgcacaaattaagcaacatattagtaaaaacacatagtacacacctgaagaatgactattaattttaaatgtgatggatttaggccttgtgattgaaaatatatttatttttgtaagcactaaaaacagaaacaaccgatggaaagtgctttatgtttgcaacagctgttaatttttaacattggactgttaatttacatttgcgaaacttccaattggaacattggaatatttctgagagagaaaatagtgaaaacggtatataaggaacttctccgaattcctgcgctcagtcgtattcggactgttgtaccgtgaggtcgttcccgtctttttataccgcggagtgcaataaaactaagtaagcagtgcgtgttttaaagttctactcgcatgctcggcaattaaaagtgaaaaagtgggagtgcgcccacaaggtcaccaacagcagtcgtttcccttaggtaaacagctaaaaaagtgaagcattaaagtgtctggaaaaccgttgctcgacggcaaagtaatttctagattcaaatgattgaattccgaattttgatgcggtggcaaccctggcggccgatcaacaagaacagctgattggtctgagtgtgtat

SEQ ID NO: 15740 - DNA, 1011 bp, DROSOPHILA
atgaattctcaaaacgaattgcatccaaattggctggctctaacaacattgccactccaactgaagcgattcgtccgagcaggagatccggattttatcgccgagtccccgaaagcagtaaagcaccaaatcgatggcttaaacggagcagaagctcgtgagttctacaaggaggtgttggatgcgcccacaacctgccaacctaaccttccaagtacccacaaaactgcacaaacaagaagagagccagaaaggatcctagtccccttcgacaaaagcaaatttttccgtttggccactagcaacaaagtagaggagctgtctcaaatgaaggcctcagaagaggatttaaattctcgggattcctttggctggactgccttgatgatggctgcctgtgaaggagccacggaggcagtgagttggctcgtgcagagaggggtccaagtagagacctcagacaaatccggaaacacagctctgaaactggcccaacgaaaaggtcacttagatgtagttcatcttttggaatccctacccattttagaggaaactagcgaagaggatgagtcagttgatggcaacaaccccttttactgtgaaatctgtaagagggactacaaagaaaccccctggccaattcatcaaacatccacagtgcatcagttcaatctaaaggctctgcccgctcataagctccacaaatttaacatatctgccaaaaatcgaggactccagctgatggtgaaacagggctgggaccaggagcacggattgggaccgagtcaaagtgggcgattgtatcccgtcaagactgttcttcgaaagcaacgcactggactgggaattgaacagcagtcggcaagggtctcccactttggtgccttcgatttaaacgctgttaggagaagggatcccatatatcagccgagaaggacgcgaagcgatatgcagagggaaaaggtgcgcgaatggaagcgagaacggtacctccgcagggtactaagttaa

SEQ ID NO: 15741 - protein, 336 aa, DROSOPHILA
MNSQNELHPNWLALTTLPLQLKRFVRAGDPDFIAESPKAVKHQIDGLNGAEAREFYKEVLDAPTTCQPNLPSTHKTAQTRREPERILVPFDKSKFFRLATSNKVEELSQMKASEEDLNSRDSFGWTALMMAACEGATEAVSWLVQRGVQVETSDKSGNTALKLAQRKGHLDVVHLLESLPILEETSEEDESVDGNNPFYCEICKRDYKETPWPIHQTSTVHQFNLKALPAHKLHKFNISAKNRGLQLMVKQGWDQEHGLGPSQSGRLYPVKTVLRKQRTGLGIEQQSARVSHFGAFDLNAVRRRDPIYQPRRTRSDMQREKVREWKRERYLRRVLS

SEQ ID NO: 15742 - DNA, 4045 bp, DROSOPHILA
ttatttataaacatttctgagacatcttggttcgaaagagagggaagatgccttcaaagacaataaacaactaatcaacatgaaagcataatcgtgcttgcattactacagatatgtatatccacgaaatacacgaaaatttatttgattaaaaagcgttttaaaaagctccaccagttagaaagagtgcggtgataaataaatcaccattttcacattagtgaggattaaaaaacaaaacaaactttctggtgttaagcaaaaagagaatttataagatattcgtacaagtttaaacgtttttctttttgctattcatattttctcatgagctctccctcgaattagagggagagggaagatgaaagcatatcttatcacattatcatacccataaaaataaacaaagcaacaagtgcttttgtcagagctttttatctgcaaatatccgtgttttaacgagcttaatttctctattagcgtacattttagttattcactcttggccgacaacttttgcccaagtatcgatactgggaatcgatactttcaggtgggctggcgagtacttcgcgcatgttgaaaataggtaaaattagagtcgaattgcacatactctttacctacaaccatacttaatgtatatactgccacttggtgcaattttcaatatgtattttcgatacatattataactatggtaaatttttgatatttcaagcagcatttatagatagaaactactttatagttacatatggttatagtgcattatctacaaatgattaaatgattataactattttcacaattaataatgttaatgtttagtttatctcatcaccaagtacactgtctgtactcttcataaagtttgatatacaccaacgagatggtgaagtgtagctaccctctggaaagggtatagcaaacaacacgaaacagggttgcctactgcgggaaatatcgcatgggggcatggatacagtgtgttttgttgtcgaggagcggctggtaaacagccgaattagcgctcccaagattgcttatcaattaaaccaacgccgattgggggccagaggctgctggggccaatgacgccactggacaaaccacaagacatatcacttaggaggccacataaatcagcagcgaaacagattcaccggagcggcaagaagcagagcggggaagcttgagattggtttggatttctttcgaaacgaatcgactgatttaccggtgatcagttacataacaatgcgcttgctcaggcccagctgggcggggttgctgcgcggaaggcaccaccagcaccagcgacatcaccggcgtctcctgctgaccaccagtcgcggtagcaatggagaaagggaggagcagcagcacagccaatggagttctcccggcagcaggtcggagcaactgttctatgctgccttttgggcaggtggcctgaccctaggctaccactggctgaccgacaagaagaaccatgtgctgctcgagggacagaaggtggccagcgaggaggaactagaggcaacggcccgactgtggcacgtgaccaacagaagggagttgcccacctacagggcagaagaagtggagcagcacaacagcgtagagaaacgcatttgggtcacctacggcctgggcgtatacgatgtcacggactttgtcgagaatcatcccggtggcgataagatcttgatggccgccggcagtgccatcgatcccttttggggcatctaccagcagcacaatacgctggaggttctggagctcctagagggctttcgcattggcaatctggagggactggtggtgaccaacgtggacgatgagctgggctcaccctggtcacaggagccgcagcgccacgccctgctcaagccagcctccaagagaccattcaacgctgagccacccattggattgctggccgagcagttttacacgcccaacgagctattctatgtgcgcaaccacctgccagtgccagtgataaatccggaggattacgagctggaaatcgaaggtggcgccaaggacaagaccctcactctggacgggatcaaggccctgcccaagcactcggtcacggcggccatcatgtgcggtggcaatcgacgctctgagatgaccaaagtcaaggccgtaaagggtaagtcgtctggttaggtatctctctgatgattcccttaggtccatttgtccctattccgaggtctttcatggggagctggtgcagtgggcaatgccaagtggtcaggagctcgactgtgcgacattctaagagagcagggcgtgcagccggatgagaccaagcacgtgatcttcgagggtgccgacctggatcccacttcccacccgtatggagcatcgataccactcgccaaggcgctcgatcccaggggagatgtcatcctggcctacgagatgaacgatgagccgctgagcagagaccatggcttccccatccgcgtaattgttcccggcacagtgggcgctcgcaacgtgaagtggctaacgcgaatcgtggtggcggacaaggaatcggactcgcactggcagcagaacgactataagggctttagccctagcaccgattgggacacggtagacttcagcaaatcggatgccatccaggccatgccggtgacatcggccatctgtacgccacagccaggggccagggtgaaagtggacgacgacgagggtcacatcacggttaggggatacgcgtggagcggcggcggcaggaaaatcgtaagggtggacctaaccaacgatgagggtgttagctggcacgtggccgaactggagcaggaggagatgcccgatggcagacactacggctggtccctgtggaccgcacgtctgcccgtttccgaggcccaaaggagagccggcgacgtggagatttgggccaaggccgttgactcggcgtacaatgtgcagccggagaaattcgagcacatctggaatctgcgtggcgtcttggccaacgcgtatcacaaagtcaaagtgaagattatctgaaggggagatttctggcaatactcaagatagaaggagacatagatagaaactaagaagacagcttgtccacaacaaaataaagaaaaaccgattttggaaatcagtggttaaccccaaaaccccttctacttcgttctcacttacccgatggtgaggcatcccgactgcgctgcatctccgcggaattggccttgctggaagcggaggcactactgcccgaactgatgttggtctccttttccatgctatgcctggtggatgcggccgccactgccgctgccttgatcttggccaagggcagatccgattcggcatctttgttcattgccgtggtcgcaatggttgctgagccacccgaagtggctgatgacaagttggtcgccgtggaagcagctgccgaagtggttggcatggctgcagctgatgcgctggctcccgatccggccactgttccggacgatgtggcttgaaccgcagtcgacttctcctcgtatttctccaccagactcttgaccttgccctgttgactgctggccgctgatcccttcctctgcttcttgggtggctccactaccacgctggattcgctggtattgcccgactcctcagctgcggactgcgaggcggtggacacggctcttgccggcgtagaagaagccgccactgatgctgctgctgcactgctcgatgtggaagccaccacgtttgtctgattgggctgggccagcttgctgatggtctccgtcttcatggtctccatgggcttgggcgaggccactgaattggctcgcaccaggctcctacccttgctgcggttcgagttgcgcgaagtcatcagcatggagcagcctagcttccgatgaaaatcgccgtatggttgcagaaacttcttgtacgcctgcttcaccagattcatcacactcacagtgcagggcgtgaagcccaggcgcatggcgatgagcttccactgattctgcgaggtaacgcggttgtaaccacc

SEQ ID NO: 15743 - DNA, 1982 bp, DROSOPHILA
tcgaggagcggctggtaaacagccgaattagcgctcccaagattgcttatcaattaaaccaacgccgattgggggccagaggctgctggggccaatgacgccactggacaaaccacaagacatatcacttaggaggccacataaatcagcagcgaaacagattcaccggagcggcaagaagcagagcggggaagcttgagattggtttggatttctttcgaaacgaatcgactgatttaccggtgatcagttacataacaatgcgcttgctcaggcccagctgggcggggttgctgcgcggaaggcaccaccagcaccagcgacatcaccggcgtctcctgctgaccaccagtcgcggtagcaatggagaaagggaggagcagcagcacagccaatggagttctcccggcagcaggtcggagcaactgttctatgctgccttttgggcaggtggcctgaccctaggctaccactggctgaccgacaagaagaaccatgtgctgctcgagggacagaaggtggccagcgaggaggaactagaggcaacggcccgactgtggcacgtgaccaacagaagggagttgcccacctacagggcagaagaagtggagcagcacaacagcgtagagaaacgcatttgggtcacctacggcctgggcgtatacgatgtcacggactttgtcgagaatcatcccggtggcgataagatcttgatggccgccggcagtgccatcgatcccttttggggcatctaccagcagcacaatacgctggaggttctggagctcctagagggctttcgcattggcaatctggagggactggtggtgaccaacgtggacgatgagctgggctcaccctggtcacaggagccgcagcgccacgccctgctcaagccagcctccaagagaccattcaacgctgagccacccattggattgctggccgagcagttttacacgcccaacgagctattctatgtgcgcaaccacctgccagtgccagtgataaatccggaggattacgagctggaaatcgaaggtggcgccaaggacaagaccctcactctggacgggatcaaggccctgcccaagcactcggtcacggcggccatcatgtgcggtggcaatcgacgctctgagatgaccaaagtcaaggccgtaaagggtctttcatggggagctggtgcagtgggcaatgccaagtggtcaggagctcgactgtgcgacattctaagagagcagggcgtgcagccggatgagaccaagcacgtgatcttcgagggtgccgacctggatcccacttcccacccgtatggagcatcgataccactcgccaaggcgctcgatcccaggggagatgtcatcctggcctacgagatgaacgatgagccgctgagcagagaccatggcttccccatccgcgtaattgttcccggcacagtgggcgctcgcaacgtgaagtggctaacgcgaatcgtggtggcggacaaggaatcggactcgcactggcagcagaacgactataagggctttagccctagcaccgattgggacacggtagacttcagcaaatcggatgccatccaggccatgccggtgacatcggccatctgtacgccacagccaggggccagggtgaaagtggacgacgacgagggtcacatcacggttaggggatacgcgtggagcggcggcggcaggaaaatcgtaagggtggacctaaccaacgatgagggtgttagctggcacgtggccgaactggagcaggaggagatgcccgatggcagacactacggctggtccctgtggaccgcacgtctgcccgtttccgaggcccaaaggagagccggcgacgtggagatttgggccaaggccgttgactcggcgtacaatgtgcagccggagaaattcgagcacatctggaatctgcgtggcgtcttggccaacgcgtatcacaaagtcaaagtgaagattatctga

SEQ ID NO: 15744 - protein, 573 aa, DROSOPHILA
MRLLRPSWAGLLRGRHHQHQRHHRRLLLTTSRGSNGEREEQQHSQWSSPGSRSEQLFYAAFWAGGLTLGYHWLTDKKNHVLLEGQKVASEEELEATARLWHVTNRRELPTYRAEEVEQHNSVEKRIWVTYGLGVYDVTDFVENHPGGDKILMAAGSAIDPFWGIYQQHNTLEVLELLEGFRIGNLEGLVVTNVDDELGSPWSQEPQRHALLKPASKRPFNAEPPIGLLAEQFYTPNELFYVRNHLPVPVINPEDYELEIEGGAKDKTLTLDGIKALPKHSVTAAIMCGGNRRSEMTKVKAVKGLSWGAGAVGNAKWSGARLCDILREQGVQPDETKHVIFEGADLDPTSHPYGASIPLAKALDPRGDVILAYEMNDEPLSRDHGFPIRVIVPGTVGARNVKWLTRIVVADKESDSHWQQNDYKGFSPSTDWDTVDFSKSDAIQAMPVTSAICTPQPGARVKVDDDEGHITVRGYAWSGGGRKIVRVDLTNDEGVSWHVAELEQEEMPDGRHYGWSLWTARLPVSEAQRRAGDVEIWAKAVDSAYNVQPEKFEHIWNLRGVLANAYHKVKVKII

SEQ ID NO: 15745 - DNA, 6765 bp, DROSOPHILA
cggatccgagttgtcgagggacccatcgagttatagtgtgggcaaacgagctcgcttgacgcccgaggacacaagtggatcggagaccattacccaggagatggagcaatccaaccagacactccagtcccatgtgatagtggaaagtcacccgaatcacagcgaaagtgagagcgaagcggagcagcaggtgtcctgctttggagccgtagcccagcggcccaagaggcgtcatcggggtcatgtgaggagccgatcctttagcaatgccagaggtggcagtgccggaaggaggcgtctcatgcagcgcagctcgtcggccgatcttttgatgaactacgcgacaatggcggtatcgacgccacaaaaaacgagcgaggcaatgcagcgattgttcttcatctgagcgggagattcaaaatggaagagtggacaagtggaacgatagtattaaagcctggtgtgattctggtcggattctagtcacatataaataaataagcctgtttcttactcgaatgttattagcttattgaaattcttaataaataattaacttcaacttcatcaagacttatccaaaaggtcgcaacgtttgtattctttataatatgtaccataccgcaaaaagaaatgaataattacattatgaattagcattttttgttaatttatttatttatagccgttatacgtgtagcatttgccagagcagatcaatatgtgccccagatcagatcacaaaaaacaacaacgaacatccatcgcccaagattcacttcaacccactaattgatccggggcacatcctgaccagcactgactttcgggtgcctcaaagtgcaaaataataaaaatctattactcgcgtatatatggaaatcaaaatgcacgtttttatatgtatatatagacgaatatgataaataataccagacgtagtcaatgccgtaggtctgcctgctatccagatcctcctacgttgtagctgtatcgtttcctactgctgcagctgttgcttgagattctcggctagcgttttgccagtgtccaggggcactactatattgcgcagactatcgatgctgttgcgcagcttggtggcctggaatttgctgggcaacttcggtgaccctcccaccgacgcaaatgcaaaggtcttgtactcctgggcagccattcgagggaccaaaagattcaaattcagtatgttatatacacggggttttatttgcaacgcaaaatatcaataaaatcataagcaacccgggttttagggtactaacagaaacagcagaggggttcaatgcctgcatagagtcgactaaataaagattctcaatgtgtgtcatggtgtgaggttaagcgcgtaattaaattaatcaatgataagtaatgggtattaataaagtatttcgaaaacattcctggagctcagctcgtgggctgataacccatatcttaatcatagaaataatacataaaaaacttaaaaataataaactgaagatctttcagtcataacagttggccggatcactggactctaggttacctgattgccgctgggggagctggcctcgcttagggtagttggcgcctggcccatgtaggattggaatgagggcatcggtccgccactaccattatcccgatggccgcctcgcgtggttaccttctcctgcagcgaattgaaggtcttcgatagccagggctgccagctgttgcggttggtttgcagctcactgagcgtattgctgagctgatggttcaggtcctggttcttgcactcggcttccacttgagctagcttggcctgggccagctccagctctagttcgcggatgcgttgcgaggcagcgtttagcggatcaagtggacccagtggatgctcattggcattccgcatggcatcggtttgccccctgttcttgccgtcatctgacttagcgttgtcattgccggcgtcgatctgctgctgacaatcctggcaattggaaaccatgtgctgaaagagagttgaaaaatgaatatcccgtcaaattcatattacaatacaatactcaccatcacttttcctagagtctcgcttagtgtgttcatgtcctgctcttggcgctggatgatctgcttgtattcctgtataatgcctgtgtgcttcttctccttctcaacagctcgctccttggcggaagtcagttgtttgttcaatgcgtcgatttccgcctgcattttgcgcctctcctcgccgaaacgattctcgtaaatctgtgcctccttctccaggcgctccttgtgctgcttcttcagcaggaactcctcctcgtactgcttcagtttttttatcttacgttcgcaggcttgcttcatcaccttgcgtgcctgactggagctgcggcactttttcggcaacgttacccggaaatactttagaatgccctcaaaatcgagttgccgcaagtcggattcacagattgataagagagtaacggccacctggaagagcacaggtagtccgtccagtagaaacacatccagcacgtggaacacaaaacacaatgggaatcgcgctgtatataaggttaggaaccattgggaggcgtacatgtgcgtctcaatgccgcaggccgtgaagtgttcgtgcagcttgggcagctgatccttgatcagtcgctccagttggtagagacgaaggtaaaggacctcgaatccggctttgtagagatcacggagcccatagtcgtacataagcgctaccagaacacagaacgcatcctcctcaggcatctgaaaatgtgtgtgtaagcaatcattcttagatgtagattgtcatcatcattacttacatgaaggagcagactagctgctatgaaacttagaccctgacaatatccaacctcgctgtcatgaacggcatacgctttggacaccttaaaaagtgcatcttggccagaaccgccaatttctttgaagcatttgtgcgccgggaaagtgcgatggatgtcccgctggataacggtctcacatttggtttcctacaagtaaatttccaattaatttcttttcacatggatagcgtctatactcactttggtgattaagatcttgtacttgtcgttcatttccattctgccctcgacgttggctagcttctgccagatcttttcacgcagtgcttctggaacgccgaggcgtactaaaggtgccagatttttcggtctcttctcggaatcccactcacgcagaatgggatcccattcgtcgagcgtgtcctgcgagcaatccttagatacctcaccagtgccactcagcagcggctcatccccatcgctgctgtagtccgagggacaatcatcctcaatcgaggcaatggacgaactgcgcacaatgcgcgatagattattcatacccatcttgagcagggaagagctttgctggtggcccggctgctccgttatttcctcagagggatcaatgctattcactttccagttggactcttcggtccgctttagatgcaaatagaatcgtaacgtcatgggtcgctttgacataaaatggtccataatacgcatttcgctggccgactgaatggtcactggggtctcaatgacgaacctaaccggttcctgtatacgtcgcatcacaatgtctacggccacagtgagattggtctttgacgactcaagatttaactgctcaaaggccttttcctgggctttccactcagctcgaattgtatagggccaggaggagctctgctgggcattgctgtccgattcggttgctactcctgttccgccgggctgaatgtaacccatgctgtgcatgtcgatcaaatgcatatccttttggactactagttttccgggtgccactagaacaccgaaacatcgttcgatatgcaatggttgaagaacatttgacggagtctgtttgactgtgatgcacacttccttatctgtgttcgcccttagcttaaagcatcccctatcgcgaggcactgcggcataggagttctttgccactcgctcacggatctctaaggagactatgaactcatacccagccgtgtttaaaggatttccgcttacatcggaggttaccgagttggccatgtcaacggccgaattaaggctgcaactcatgctgggcggataagtctggaatgccttctggaagcaggctgcgggcgaagattttgaataaatcggtgggatgaaatcactgtatgatctgactcaccgctgacttgattaaccgcttcgggaatatggcaccgaaacacatggcactgaaacaatgcatcgccgtgaagccaagtgaatgcaaagcatccgttttccaccgtatccactggtcctcgatagtacaagataatgctggatatctcataggtggcaataatagtattgctctcggcatcgtggaggctgtaatagcagcatgatgacgctcagtgagtaattcaaggggcagtaaaaactttactcacacaaccaggccttctgagcaattgggtatgctcacagtgatcttcaggcccaccgactttgagccactatttagctcgcccatgatgcgataaacctccgtctcggattttggggcattaatgttggctgcgcccaggtaggtgactccggaaaatatggtgcagccctgatcgatttcagaaactgaaagtgaaaaacacatggtcaattaaatttcaataattacactaaacatagatttcagctttaggagcctaggaacacaatatagaacaaataataaagaactctgtgagtatataggctttcgtaaaatgaacagaatttataggcaaatgtaccccttaatttttgggattttaactaacttaagagatctactcaccctcctcgtcggtggtgtcgcccttctccggcttcatggcatcctgtttttcctccacgcaggcggggctagcgtctatgcagtcatagaacactgaatgacccactctgtttgagctggatgcatcgtcgagggtctcctcgcttttgggcgtgaacaaggtgcaggggaaacgcatctcgggatcgacagatcccccgccggagcccgtgagcggtagggtcagggacttttgctgatgactcgggagacgttgcgctgacttctccccactggcagctgcaaatatgttaattgtcaattacgcgacgagcaataacaaatgccgaattatgcggaattttgtttaaggaaagtattattattcggtttgtttgtcgttgtttccatgacagcgtagcactacggctctgcgccgataagattgcagctggttaggcttagcaatcgtttgatgtttccaatagtggagcgaccgcgacgttgtgtgcacagctggcgttgggcaacgactgagtttactttaggctacccagggcaacccaattcaccctctcagttgtgtttctttactcacctacgccgcgttccaactccagatctttgagggcgtccgtcatctcgtgctgcatgtcgcttaggttgcgattgtgggccatgtccagagtgggcgagcgatctcccccagcctcgggggaggacagagccagagcactcagcgaagtgggcggtttgccacccacttcaggctgagttccctcctggttgacaacctgcttcacctgctccatgggactggccacattgctgtcggtaactatttcgtactccccgctggttgttatcgaggattccgaggacttggtgctcagattatcatccattccgaacactcaaggttgcctcagttccaggcactcccaaatgggttactctttgttgtgtgtgtgatatattcggactttctttattcttaagccctacgaattgcgcattttcagggcaggtaaacaaatcaatttctgttccaaggccacgcactcgtactcgcactcgcttttaatagatttcgttttcaatttgtccaattttcagcggagtcgcattgtttggcttggttccgccgtaaatcgatgacgaatcggtacggtttgcttggcgttttgggggcgtacacacacgcgcatgtatgtcacacagtgcccaattcgcgtgggaactggaggggttgggccttcaagggggtggtggacggtggggtcggcggggtcaacagtttgtctctgtagcctctgcgcttggattcctatggatttttttgttattttagtgcgtgcagctgctttgagcttacactttggtttttatattatagcctacactccgcagaactgtagtacattgttttgaccctttattgttgtgtttttatcgggtttttagcaattttcttgcaattttccgtctgttttgtttacatatttttttgctagtgatgacctgcagtaggtcgattcctatcgaaaggaaacagctgctttaacgttattcaatacttcttttgaaagtgttaataagtgtacctatcgacttaatcgactagttattttcttttctatgcatattgccatatgcttatatggcaatctaaataatccaatagcattacaaagttgtctttgactgaaatgacttgtcttgaataaatttaaataaatataaataaatttttaaattgtaattcaaagaaccaaatctataaaggtatgtgatgtatggaaaatattgagaacatattaaacatatagtacatatcgaaaaagtgtcatcgccgtgacataataccccgccagtgttgccaaatactctgctacacaacactac

SEQ ID NO: 15746 - DNA, 3585 bp, DROSOPHILA
atggatgataatctgagcaccaagtcctcggaatcctcgataacaaccagcggggagtacgaaatagttaccgacagcaatgtggccagtcccatggagcaggtgaagcaggttgtcaaccaggagggaactcagcctgaagtgggtggcaaaccgcccacttcgctgagtgctctggctctgtcctcccccgaggctgggggagatcgctcgcccactctggacatggcccacaatcgcaacctaagcgacatgcagcacgagatgacggacgccctcaaagatctggagttggaacgcggcgtagctgccagtggggagaagtcagcgcaacgtctcccgagtcatcagcaaaagtccctgaccctaccgctcacgggctccggcgggggatctgtcgatcccgagatgcgtttcccctgcaccttgttcacgcccaaaagcgaggagaccctcgacgatgcatccagctcaaacagagtgggtcattcagtgttctatgactgcatagacgctagccccgcctgcgtggaggaaaaacaggatgccatgaagccggagaagggcgacaccaccgacgaggaggtttctgaaatcgatcagggctgcaccatattttccggagtcacctacctgggcgcagccaacattaatgccccaaaatccgagacggaggtttatcgcatcatgggcgagctaaatagtggctcaaagtcggtgggcctgaagatcactgtgagcatacccaattgctcagaaggcctggttgtcctccacgatgccgagagcaatactattattgccacctatgagatatccagcattatcttgtactatcgaggaccagtggatacggtggaaaacggatgctttgcattcacttggcttcacggcgatgcattgtttcagtgccatgtgtttcggtgccatattcccgaagcggttaatcaagtcagcgcctgcttccagaaggcattccagacttatccgcccagcatgagttgcagccttaattcggccgttgacatggccaactcggtaacctccgatgtaagcggaaatcctttaaacacggctgggtatgagttcatagtctccttagagatccgtgagcgagtggcaaagaactcctatgccgcagtgcctcgcgataggggatgctttaagctaagggcgaacacagataaggaagtgtgcatcacagtcaaacagactccgtcaaatgttcttcaaccattgcatatcgaacgatgtttcggtgttctagtggcacccggaaaactagtagtccaaaaggatatgcatttgatcgacatgcacagcatgggttacattcagcccggcggaacaggagtagcaaccgaatcggacagcaatgcccagcagagctcctcctggccctatacaattcgagctgagtggaaagcccaggaaaaggcctttgagcagttaaatcttgagtcgtcaaagaccaatctcactgtggccgtagacattgtgatgcgacgtatacaggaaccggttaggttcgtcattgagaccccagtgaccattcagtcggccagcgaaatgcgtattatggaccattttatgtcaaagcgacccatgacgttacgattctatttgcatctaaagcggaccgaagagtccaactggaaagtgaatagcattgatccctctgaggaaataacggagcagccgggccaccagcaaagctcttccctgctcaagatgggtatgaataatctatcgcgcattgtgcgcagttcgtccattgcctcgattgaggatgattgtccctcggactacagcagcgatggggatgagccgctgctgagtggcactggtgaggtatctaaggattgctcgcaggacacgctcgacgaatgggatcccattctgcgtgagtgggattccgagaagagaccgaaaaatctggcacctttagtacgcctcggcgttccagaagcactgcgtgaaaagatctggcagaagctagccaacgtcgagggcagaatggaaatgaacgacaagtacaagatcttaatcaccaaagaaaccaaatgtgagaccgttatccagcgggacatccatcgcactttcccggcgcacaaatgcttcaaagaaattggcggttctggccaagatgcactttttaaggtgtccaaagcgtatgccgttcatgacagcgaggttggatattgtcagggtctaagtttcatagcagctagtctgctccttcatatgcctgaggaggatgcgttctgtgttctggtagcgcttatgtacgactatgggctccgtgatctctacaaagccggattcgaggtcctttaccttcgtctctaccaactggagcgactgatcaaggatcagctgcccaagctgcacgaacacttcacggcctgcggcattgagacgcacatgtacgcctcccaatggttcctaaccttatatacagcgcgattcccattgtgttttgtgttccacgtgctggatgtgtttctactggacggactacctgtgctcttccaggtggccgttactctcttatcaatctgtgaatccgacttgcggcaactcgattttgagggcattctaaagtatttccgggtaacgttgccgaaaaagtgccgcagctccagtcaggcacgcaaggtgatgaagcaagcctgcgaacgtaagataaaaaaactgaagcagtacgaggaggagttcctgctgaagaagcagcacaaggagcgcctggagaaggaggcacagatttacgagaatcgtttcggcgaggagaggcgcaaaatgcaggcggaaatcgacgcattgaacaaacaactgacttccgccaaggagcgagctgttgagaaggagaagaagcacacaggcattatacaggaatacaagcagatcatccagcgccaagagcaggacatgaacacactaagcgagactctaggaaaagtgatgcacatggtttccaattgccaggattgtcagcagcagatcgacgccggcaatgacaacgctaagtcagatgacggcaagaacagggggcaaaccgatgccatgcggaatgccaatgagcatccactgggtccacttgatccgctaaacgctgcctcgcaacgcatccgcgaactagagctggagctggcccaggccaagctagctcaagtggaagccgagtgcaagaaccaggacctgaaccatcagctcagcaatacgctcagtgagctgcaaaccaaccgcaacagctggcagccctggctatcgaagaccttcaattcgctgcaggagaaggtaaccacgcgaggcggccatcgggataatggtagtggcggaccgatgccctcattccaatcctacatgggccaggcgccaactaccctaagcgaggccagctcccccagcggcaatcaggagtacaagacctttgcatttgcgtcggtgggagggtcaccgaagttgcccagcaaattccaggccaccaagctgcgcaacagcatcgatagtctgcgcaatatagtagtgcccctggacactggcaaaacgctagccgagaatctcaagcaacagctgcagcagtag

SEQ ID NO: 15747 - protein, 1194 aa, DROSOPHILA
MDDNLSTKSSESSITTSGEYEIVTDSNVASPMEQVKQVVNQEGTQPEVGGKPPTSLSALALSSPEAGGDRSPTLDMAHNRNLSDMQHEMTDALKDLELERGVAASGEKSAQRLPSHQQKSLTLPLTGSGGGSVDPEMRFPCTLFTPKSEETLDDASSSNRVGHSVFYDCIDASPACVEEKQDAMKPEKGDTTDEEVSEIDQGCTIFSGVTYLGAANINAPKSETEVYRIMGELNSGSKSVGLKITVSIPNCSEGLVVLHDAESNTIIATYEISSIILYYRGPVDTVENGCFAFTWLHGDALFQCHVFRCHIPEAVNQVSACFQKAFQTYPPSMSCSLNSAVDMANSVTSDVSGNPLNTAGYEFIVSLEIRERVAKNSYAAVPRDRGCFKLRANTDKEVCITVKQTPSNVLQPLHIERCFGVLVAPGKLVVQKDMHLIDMHSMGYIQPGGTGVATESDSNAQQSSSWPYTIRAEWKAQEKAFEQLNLESSKTNLTVAVDIVMRRIQEPVRFVIETPVTIQSASEMRIMDHFMSKRPMTLRFYLHLKRTEESNWKVNSIDPSEEITEQPGHQQSSSLLKMGMNNLSRIVRSSSIASIEDDCPSDYSSDGDEPLLSGTGEVSKDCSQDTLDEWDPILREWDSEKRPKNLAPLVRLGVPEALREKIWQKLANVEGRMEMNDKYKILITKETKCETVIQRDIHRTFPAHKCFKEIGGSGQDALFKVSKAYAVHDSEVGYCQGLSFIAASLLLHMPEEDAFCVLVALMYDYGLRDLYKAGFEVLYLRLYQLERLIKDQLPKLHEHFTACGIETHMYASQWFLTLYTARFPLCFVFHVLDVFLLDGLPVLFQVAVTLLSICESDLRQLDFEGILKYFRVTLPKKCRSSSQARKVMKQACERKIKKLKQYEEEFLLKKQHKERLEKEAQIYENRFGEERRKMQAEIDALNKQLTSAKERAVEKEKKHTGIIQEYKQIIQRQEQDMNTLSETLGKVMHMVSNCQDCQQQIDAGNDNAKSDDGKNRGQTDAMRNANEHPLGPLDPLNAASQRIRELELELAQAKLAQVEAECKNQDLNHQLSNTLSELQTNRNSWQPWLSKTFNSLQEKVTTRGGHRDNGSGGPMPSFQSYMGQAPTTLSEASSPSGNQEYKTFAFASVGGSPKLPSKFQATKLRNSIDSLRNIVVPLDTGKTLAENLKQQLQQ

SEQ ID NO: 15748 - DNA, 3610 bp, DROSOPHILA
agcaatgaggaggcctgcacttttgcgttggagcatctgaaagagccggactttggcgccaaatcacttgccatggagtcgtataaacgtggctccgtggacaacatcaccgtgctggtgatcgtcttcaagaacgatgtctacaagattggcagctcagcgggaaaagcgggagaagaatccctaaaagtcccagccaaatctcaaccagttgcgcctgcagttgtgcaacgctcgaattcaatcaaaaccaaatgaaaaacgatagataagagtgcctgctaagaaatgctcttcagcttttctcctaaaaatttccttctccccaagaaaaacaaacgaaagtgcccgaatttttctagttaggcattttgctaaataccttttgacctttttgttacttgtccaaaggcagcgttcattcatcccattacagacatgcatacacattcatcactcgaaaatgcgttcatcatttgtcttaatattaaggttgtttgttagtcaatgttgttttgtttaaacaaaatatgtttgcatccgccgccacattgccgtgcactccgtttttccaattcgcacacgaaaatcatcacagtcactgactcagtcagggtaacatcatcacgtaactatttatttaatttatttgttatacgtgtaaaagaaaacattttctaaatgtcgaaatgtttttacgaataaaacaatgcatacgaaacgagaacatttcgttttgctacttaaattcaatttctaattgtttttctcaacattattcgttttggatttcaatgaaatgatctggtttgtagtttagggattaaaaacatccactttcgattaaagtttatataaaatgttttctttattaacatttacttatcttctgcctaaactaaattgtcccactgtttatactattcccatctatccggagaaaactctatagcccaaagcctaaagttaaaactaattcagccgctacaagatacacaaatttcagttaaggacgcttaaattttatttttgttttagctaaacaaatttgacgcccgttacaaaggtcagtagcttagtgagccgaaacagacacctgccagacgcggatggtgttgtcggagtagccggcgaacagagtctggccgtcggtggaccaggccagggacaggcactggggctgatcggccttcgacgtgggcgaaacgacctcggggcgcagctcctcaacggtcttcttgcatgccagatcccagatcttgatcgagggtccgtaggccacgcacagccagtagcggttgggcgagaagcacagggcgttgatgatgtcgttgtgctccagagtgtacaggttcttgccgtcattgaggtcccacagcagggccttggagtccttgccacctgaggtgcacagggagccatcgggcgagacggtcaccgtgttcaggtagccgttgtggccgtggtggttgttcttcaacttgcagttagccaagttccagaccttgacggtgcgatcccagccgcaggacacgatgatcgggttggagtggttgggcgagaagcgcacgcacgacacccagtcggtgtggccatcctcctggatggtgaacttgcactcagccagggtgttccacagcttgatggtcttgtcccgagagccggacacgatctgacggttatcggccgagaaggcaaccgacaaaacgtcctagaaagcgaacaagcatttgacgattagctaatggtattggtatggttttcataaaaataatatatttactggatatttcactgaccaactgaatgggcatagtcccaactcaattagtcagtgaacggaatccagatgggtttcttgcaactaattaggaatcaatgggtatcagagattgtttgcctacttacgatggagcttcaagcaatttatagccgagactcgagcgaagggtgaagcgtacgtcgtacagatgtcaaccagtaattctgcctcgcataggcgcaatatatattttttcgatttgtacgcggcaaaggcgggcctaacctcactcctaaccttacatttagccttttgccggtacagatcggttcaaaatctcagttccctaaacgaactaaatgcaattggaatcttatcccaccttagtgtgtccctcgaagcgacgggtggtcttgccggcggccaaatcccacaggcgaagggtctgatcccaggatccggacagggcgtagttgccatcggaggagagcaccacgtcgctgatgaagtgcgagtgtccgtagagacgcttctgggggtagccgtagttggtgtcctcgtcgcgggtcagcttccacacgatcagggtcttgtctgcgaatcgagatggtggccattaatatacgcacgtgctaccagataaatccgaagaatttcaatggcgattacttaccacgggaggccgaaattatggtgtcgggatccttggggttggtggcgatctgggtgacccatccattgtggccaatgagggtaccgcgcaattgcagggtctcggacatcttgagtttatattatttgctacggagcgcgaaggaaacacgtccaaaggcgctgcaagctggcagaaaaagaggcagttccggttccagtgctcgctaagatgccaactgtcagcgagcgttcagtgttggacaggacaaaactatcgatagtttgaattttctgttacaaataatacgtgtaaaatgtaacgtcaaataataatatcaaaaactttaaaatatatataaaaaaaataaatacttttacaccaagtattaatattattatatctaaagaaccccagaaatattgaagtttagttttaaaacaaattgtgctattatttaagaaataatcgacgctaatgcacatctatgaaaagactactaaaggattttaaaacaatcccaatatcttgttgcccaaatgcctatgtacatacttttattttgtcactatcacgtaataatgtaaaaaaaacggtgagcgttgatcccactttattttctagttttacttggtaactgttggccaaatagtaaggataccatccacaagttttagtcggtatttttgtagaaatgtcaagcatgcatcgctaatcgatacacacacacacagcgcgttcttaagcgtttcgcggcaatcggtcacaccgagggcagtctttcccttcgtatatcgtgtcgtcgtctcttttgtgaacaaaaaatacgaagaaaatcgcccaaatcgagttgattcgattggcaattgtgtggagataaacgagtgaatacgcggttggcaatcgaacgcaacagtagttgctaattttcctgcacccctgagttataataaaagccgtcaaaattgaatcgacaaagattgacgagactttttcttccaccacaactgcgatggaggataaagcaacaacaaaagatcttgatcaatggattgagcagttgaacgaatgcaatcagttgacagagacacaagttcgcaccctctgcgacaaggtaaggcccggtccttgcccattttccccatgcgaattaggagatgttataaaaataattttcgtcattgcatgcgagcgag

SEQ ID NO: 15749 - DNA, 1098 bp, DROSOPHILA
ctgccagcttgcagcgcctttggacgtgtttccttcgcgctccgtagcaaataatataaactcaagatgtccgagaccctgcaattgcgcggtaccctcattggccacaatggatgggtcacccagatcgccaccaaccccaaggatcccgacaccataatttcggcctcccgtgacaagaccctgatcgtgtggaagctgacccgcgacgaggacaccaactacggctacccccagaagcgtctctacggacactcgcacttcatcagcgacgtggtgctctcctccgatggcaactacgccctgtccggatcctgggatcagacccttcgcctgtgggatttggccgccggcaagaccacccgtcgcttcgagggacacactaaggacgttttgtcggttgccttctcggccgataaccgtcagatcgtgtccggctctcgggacaagaccatcaagctgtggaacaccctggctgagtgcaagttcaccatccaggaggatggccacaccgactgggtgtcgtgcgtgcgcttctcgcccaaccactccaacccgatcatcgtgtcctgcggctgggatcgcaccgtcaaggtctggaacttggctaactgcaagttgaagaacaaccaccacggccacaacggctacctgaacacggtgaccgtctcgcccgatggctccctgtgcacctcaggtggcaaggactccaaggccctgctgtgggacctcaatgacggcaagaacctgtacactctggagcacaacgacatcatcaacgccctgtgcttctcgcccaaccgctactggctgtgcgtggcctacggaccctcgatcaagatctgggatctggcatgcaagaagaccgttgaggagctgcgccccgaggtcgtttcgcccacgtcgaaggccgatcagccccagtgcctgtccctggcctggtccaccgacggccagactctgttcgccggctactccgacaacaccatccgcgtctggcaggtgtctgtttcggctcactaagctactgacctttgtaacgggcgtcaaatttgtttagctaaaacaaaaataaaatttaagcgtccttaactgaaa

SEQ ID NO: 15750 - protein, 318 aa, DROSOPHILA
MSETLQLRGTLIGHNGWVTQIATNPKDPDTIISASRDKTLIVWKLTRDEDTNYGYPQKRLYGHSHFISDVVLSSDGNYALSGSWDQTLRLWDLAAGKTTRRFEGHTKDVLSVAFSADNRQIVSGSRDKTIKLWNTLAECKFTIQEDGHTDWVSCVRFSPNHSNPIIVSCGWDRTVKVWNLANCKLKNNHHGHNGYLNTVTVSPDGSLCTSGGKDSKALLWDLNDGKNLYTLEHNDIINALCFSPNRYWLCVAYGPSIKIWDLACKKTVEELRPEVVSPTSKADQPQCLSLAWSTDGQTLFAGYSDNTIRVWQVSVSAH

SEQ ID NO: 15751 - DNA, 3446 bp, DROSOPHILA
tccccccaattaaatacgtgatttgtggatagttgtgccccgtgcacgaaacatcttaatgcagctggagtgcatcttgggatgccccgcaggatgccacatgacgccgattagtgtatgctaatgagttcgccgcgaggcaaacttcactttgtcgctaatgtcgcaggcaactcatttgggtgcgagtaccatttcattccggcacacaaagcccgctaattgaatccctctcaggttgctcaggtaccagaatctcatctccagttcatctggtttcgggatgccttttgttgcctgccattaaaggcgaattgctgtcggatggttgcataaattgaaaggggctgtctgtgccacaacttctgctgatgctgctgctgctgctgctcgattcatagaaaattacgtatacgcattcgcacatgtcctcgcactgggaaaactgactaacatccgacgtgtgggtggctgtggaggcaaatgtgaatgtagatgtgggtgtatgctgccggtatactcctaaatttattgctgctgttggtgctcccattgtcgttatggcagcatttgttgcgctactttcagtcttccaatttgtcgttggctaactttgtgccgatatacatcaatgtttactttactgccccgtttgtgcctatgatttttgggctagaaaactcgtttaaaaaggatttcggtataaatactgtttagatctggccttcaatttctaattttagcccaaatttgaataaaatgaacatgactcaaaccacccgcagcctacatttttcacacaaactgatagacatatttaaattttgagaaatagacagcaaactgacacatattgttaataaatcgattggatatctaatagaaagtttaaagatcttaaaacttaaattattaaacatttcttgacaacactgtcagtccagattctaattttcaaatagtaggcatacacagaacatctcttttttaagacgacaaaatgttgcggcagaagcttaaaaactatttaccgtctgtttgggaacagcaactgcgtctcgtccaaactgccaagaaagcgggaggtagcaaaaagctgggtcccgataggcctcccattatcgatccgcccaagggatatgagcccaattgcaagaccaaatttggtccgctggacgattgtgatcgtgtgtttcagaatctctatggacgccacgattggcgcttgcatggagcatgccaacgtggggattggcatcgcaccgctgagttgctggagcagggtcccgaatggatcatgaagcaggtaagcaagagtggattgcgcggacggggaggagctggcttctatgccggactgaagtgggaatttctacgccagaccaagtccgagaaggtgcccaaaatggtcatcgtgaactgtgcagagggagagcccggaacctgcaaggaccgtgatatcctgcgacatgaaccccacaaactgatagaaggtatccttctggtaggtgtggccatgggatgcggtagagccattgtgtacattcgaaatcgcttctacaacgaggcctgcaacctgcactttgccttggcggaggcctatcatcatggtttgttgggaaacagtgtctgtggcacgggcatcaaattcgatgtgatggtccagcgtggagatcgttacttatgtggcgaggaaaccgccatgatcaactgtttgatgggtaaactgggaagaccacgacgtcgtccgcccttccttacggaaaagggctacttcgagcatccctgtttggtgatcaatgccgagtcgattgcagtagtgcccacaattctgcgaagaggttcccagtggtgggctggattgggtcgcagttacaacacgggaaccaaactttactgtctcagcggtcaggtgaataatccctgcactgtggaggaagagatgtccatacccctgaaagaccttatagaacgacatgctggtggagtaaaaggtggttgggacaatctcgcagcagtatttccaggtggtttgtccacaccattgttggatccatcaacagccggaaaggttctcatggatttcgatagtttgacggatgcaggcagtggtttcgggtgcggagcggttattgtgatgaccaaggactgtgatcctctggcaataatgttgcgatcaattcagtttttcgagaagcacacttgcaaacagtgctcctattgtcgcgatggtgccatatggctgccggagatattcgcccgctttgttaagggtcagacacatccccacgagatcgattggacgctggtcattgccgataaaatgaggaatagtaagcccatttgcgcactcgcttatagccaagtcagcgtggccgagagtttggttcgaatgtttagccggaagatcgaggaacgccttttaaaatatgccaagggttcttaatataagcagactatagaaattcgtattcatttattgattttaggtaaattgaaataaattcttaatatcttggaagttgcttatattgctaagcaagtaaaaatatgaaatgcgaaaaatatttaataatttaatccttgcctctttataactttggttaactttatgaagactaaataatcaaattattattcatacacaatcacagcttaccgaagcctaattctatttgccgtaattttgtgttcacattttaatttgtacgtaatgatatacattagccggttgtacaatataaatgaaatgataaatgcattattgtccattgagctttagcgttatgtgtacatttggcatttgctctggaaaccattttaaaaataagcatttaagcagctgttgcgaatgcaaaaggccacaaagtccatttgtccgacgacagatagagatttaattaagatgaatgggtctaaaaaagctctggctaatgcggtcaaagagaaataaatctttggctactttcaatggtcagtatttggaaaacgtttcggtttgaatctcgcaaatcattgatggcacacggcgaatgatgacagtttaaacgactattcaatcctcggggttgtggcagtcggtgctactcgttagttagctgtttactcttggatttcagtttgcggctgatgagatccattatgttggtgatgtcctggcaacaagaaaaaaaacagagaaacgctctgggaaatggggaaaaatcgtgtggaacatgaaaggcatgtgagaacgtgtgggtcaaagtggcagaggcacaatgttgacataaacaaacactagggcatttgtctgcgcttgaatgattgcagagacaacagcagcaaacacacaaagatttaacccaacaccgggctctgtccttggtctctttaatcgtgtttgtgggtcagcttacccttgccattatcctttctccaataatcagggctcgccatatatactc

SEQ ID NO: 15752 - DNA, 1446 bp, DROSOPHILA
atgttgcggcagaagcttaaaaactatttaccgtctgtttgggaacagcaactgcgtctcgtccaaactgccaagaaagcgggaggtagcaaaaagctgggtcccgataggcctcccattatcgatccgcccaagggatatgagcccaattgcaagaccaaatttggtccgctggacgattgtgatcgtgtgtttcagaatctctatggacgccacgattggcgcttgcatggagcatgccaacgtggggattggcatcgcaccgctgagttgctggagcagggtcccgaatggatcatgaagcaggtaagcaagagtggattgcgcggacggggaggagctggcttctatgccggactgaagtgggaatttctacgccagaccaagtccgagaaggtgcccaaaatggtcatcgtgaactgtgcagagggagagcccggaacctgcaaggaccgtgatatcctgcgacatgaaccccacaaactgatagaaggtatccttctggtaggtgtggccatgggatgcggtagagccattgtgtacattcgaaatcgcttctacaacgaggcctgcaacctgcactttgccttggcggaggcctatcatcatggtttgttgggaaacagtgtctgtggcacgggcatcaaattcgatgtgatggtccagcgtggagatcgttacttatgtggcgaggaaaccgccatgatcaactgtttgatgggtaaactgggaagaccacgacgtcgtccgcccttccttacggaaaagggctacttcgagcatccctgtttggtgatcaatgccgagtcgattgcagtagtgcccacaattctgcgaagaggttcccagtggtgggctggattgggtcgcagttacaacacgggaaccaaactttactgtctcagcggtcaggtgaataatccctgcactgtggaggaagagatgtccatacccctgaaagaccttatagaacgacatgctggtggagtaaaaggtggttgggacaatctcgcagcagtatttccaggtggtttgtccacaccattgttggatccatcaacagccggaaaggttctcatggatttcgatagtttgacggatgcaggcagtggtttcgggtgcggagcggttattgtgatgaccaaggactgtgatcctctggcaataatgttgcgatcaattcagtttttcgagaagcacacttgcaaacagtgctcctattgtcgcgatggtgccatatggctgccggagatattcgcccgctttgttaagggtcagacacatccccacgagatcgattggacgctggtcattgccgataaaatgaggaatagtaagcccatttgcgcactcgcttatagccaagtcagcgtggccgagagtttggttcgaatgtttagccggaagatcgaggaacgccttttaaaatatgccaagggttcttaa

SEQ ID NO: 15753 - protein, 481 aa, DROSOPHILA
MLRQKLKNYLPSVWEQQLRLVQTAKKAGGSKKLGPDRPPIIDPPKGYEPNCKTKFGPLDDCDRVFQNLYGRHDWRLHGACQRGDWHRTAELLEQGPEWIMKQVSKSGLRGRGGAGFYAGLKWEFLRQTKSEKVPKMVIVNCAEGEPGTCKDRDILRHEPHKLIEGILLVGVAMGCGRAIVYIRNRFYNEACNLHFALAEAYHHGLLGNSVCGTGIKFDVMVQRGDRYLCGEETAMINCLMGKLGRPRRRPPFLTEKGYFEHPCLVINAESIAVVPTILRRGSQWWAGLGRSYNTGTKLYCLSGQVNNPCTVEEEMSIPLKDLIERHAGGVKGGWDNLAAVFPGGLSTPLLDPSTAGKVLMDFDSLTDAGSGFGCGAVIVMTKDCDPLAIMLRSIQFFEKHTCKQCSYCRDGAIWLPEIFARFVKGQTHPHEIDWTLVIADKMRNSKPICALAYSQVSVAESLVRMFSRKIEERLLKYAKGS

SEQ ID NO: 15754 - DNA, 3574 bp, DROSOPHILA
ggcattctggcaaacgcgcagtttgcatgggttttaccatttgacggacgtggcgtgctgatgatcctaaccagctggtcgtcgtccaacggcctcagattggaagactttggcgtgtgcttactttctccaccgagcgacatattgtgttctttaacatttgatttctaggaagtactcatttattttgtatttcaataggcaatctgacttagaggtggagaaacatcgatgacatcatcgatatcatcgatcttttcaaacaatcacaagcatcgatgtttttcgaggaatcatcgatgttcttccatacatcggaggacaaaagtatataaattgggggtataaattaaattcggatataactttgttatgatttatttaaaatactccttatttatataagcaatatttttttttaattattatttattaagtgaagtaataagaaatattaaaaatgaaaataatcttaaattaaacagaaacaatgttttgtttttatttaaagcataaatgtttatgttcaaattaatttaagttataaaccataaaataaattaaatgagtatatgtaattctacggcatacattttggcgtggaagctaaatacgaattcatacaatgaatagcttataactaaaatttactgtaataatctatagcataagttgttttaagccattgaatttgaatagctaaagatttcatttataaagacttgaatgctgccaccttaattgttgcaaaaacatgttcttgaaataataagttgccaagttagttagcttgccaaataaaatcttcactgtttgcctgctcgaggtaatttatatttaaaagttctttcaaaatcttgcaaattaattgcttggtaataaacaaattgatttaaatttaaatttaaaaaaaaactcaaaatttaaaagctaagccaatgataggagccccctaaccggtaggcagtattttcaagcggcgcacatacggtcacactgcacggtttcgaatcgcttaacaagtttttgcttaaaaagctttgccgagcactaagtaaccaccgcctttcgcacccacaacacaacgccaccagccagaacaatgatcaaggtacgtggggtgctgtaaataaggatcacactgcgattagacgggaattagtgcagcaaaagcggccgatgactgcgcggccggggtgcaaagtccaattgggatgtgaactcgtgtctattataaacatggagtcccataaataactgtatctctgcccacagcgatgtaccttgtacccagccaacaattagcattacttccccaccgagttatacaataatacaatgcggcttatcgggaaactggacaccgaacgcatcggtcagctgctttcgaaataataagataaaccggcatcggattataagtttatctgcaaattgaggatcgtgctatttctatactaactttaacggacaacttctcaatgttgttaaagataaggatctcagtcctacagatcgtatattttgcattctatatgcttattctgttaagatctctaaacattgatgttgtagttgggatgaaatggaatggagtgcatttttagaatctatttccttggatatatacatatatatatagtttctaaccccatgcctttcccacccccagaacgccgtttccctggtgaccggaggagcctctggactgggccgcgccaccgccgagcgcctggccaagcagggcgccagcgtgatcctggccgatctgccctcctccaagggcaacgaggtggccaaggagctgggcgacaaggtggtcttcgtgcccgtggacgtgacctccgagaaggatgtgagcgccgctctgcagacggccaaggataagttcggtcgtctggatctgactgtgaactgtgcgggcacagccaccgcggtaaagacgttcaacttcaacaagaacgtggcgcaccgcctggaagacttccagcgggtgatcaacatcaataccgtgggcacgttcaatgtgatccgtctgtccgccggactgatgggcgccaatgagcccaatcaggatggacagcgcggcgtgatcgtgaacaccgcctcggtggctgcctttgatggccagatcggccaggcggcctactccgcctccaaggcagccgtggtgggcatgaccctgcccattgcccgtgacttgagcacccagggcatacgtatctgcaccattgcaccgggtttgttcaacacgcctatgctggccgccctgccggagaaggtgcgcaccttcctggccaagtccataccgttcccgcagcgcctgggcgagcccagtgagtacgcccacctggtgcaggccatctacgagaatccgctgctcaacggcgaggtcatccgtatcgacggtgctctgcgcatgatgccctagatccggctgagcactgtcttggacctgtggaagtggctcgatcagtttgcatttatctattgtctagtggttaagctgaaaagttttattatctgtcccgaaattatgtaataattgctattaaacacacaatgtcacatttcaaattttggaggcgcgtctgcctgctgttcttcaacactggttatatataagggatagctggggtgtattggctgcacaggtcgttgcaacaggtggattaattttttgtaagtcaattttattactgacttactatttgtgcaattaattcttaagcaaccatgtatttataataagaaaatagtttactatcatatttacaaagttggtctgagcttaaatatttattgaataaaagggtatttctaagtcgctagcccttaagatttccctgttgttcccgcaagttggcagttccgtttcaaaatgtaaacaacgaacatttgaaaatcgctcttcagaagataatgccatatcagcgctgctgagccgggaacttcgtagggcagctggcggggatcaggagaatgtaccccctgtccagcaaacggatcgcttgggaacacaagacgcagagcaatttaagtggaaggaatccccggcaggagatgatgcactggtggtcaatgaggatgcattttaagtgaagaagaacgaaatggacactgtgctggactgtctatacagcgatagctagagcagtccagcaaaaatgggggaactgtgagtcagcaatatatttcaatgttttcccaactttagtttccgctttccagcctgctgcgtcgactgatgctccagtttctccatgtggaacagcagtctaagctctggaatttggacggaaggaaccaccgaaaatatcgcaatgtaaatctgctaaatgaggtacaaatattttggggaaaatctacgtccagagcagatcatagattcatcagccatccaacgagcgttttcagtgtcggcatctccagatgatttgggacatgcagaggatatcctgtcaccgaaactggatcggctgaagctgtggcgcaataaaatgaaaatctccgctcgattcctcgcagctttaatgtttcatttgcctcttgaggaccacttcccaccagaaga

SEQ ID NO: 15755 - DNA, 1013 bp, DROSOPHILA
acggtttcgaatcgcttaacaagtttttgcttaaaaagctttgccgagcactaagtaaccaccgcctttcgcacccacaacacaacgccaccagccagaacaatgatcaagaacgccgtttccctggtgaccggaggagcctctggactgggccgcgccaccgccgagcgcctggccaagcagggcgccagcgtgatcctggccgatctgccctcctccaagggcaacgaggtggccaaggagctgggcgacaaggtggtcttcgtgcccgtggacgtgacctccgagaaggatgtgagcgccgctctgcagacggccaaggataagttcggtcgtctggatctgactgtgaactgtgcgggcacagccaccgcggtaaagacgttcaacttcaacaagaacgtggcgcaccgcctggaagacttccagcgggtgatcaacatcaataccgtgggcacgttcaatgtgatccgtctgtccgccggactgatgggcgccaatgagcccaatcaggatggacagcgcggcgtgatcgtgaacaccgcctcggtggctgcctttgatggccagatcggccaggcggcctactccgcctccaaggcagccgtggtgggcatgaccctgcccattgcccgtgacttgagcacccagggcatacgtatctgcaccattgcaccgggtttgttcaacacgcctatgctggccgccctgccggagaaggtgcgcaccttcctggccaagtccataccgttcccgcagcgcctgggcgagcccagtgagtacgcccacctggtgcaggccatctacgagaatccgctgctcaacggcgaggtcatccgtatcgacggtgctctgcgcatgatgccctagatccggctgagcactgtcttggacctgtggaagtggctcgatcagtttgcatttatctattgtctagtggttaagctgaaaagttttattatctgtcccgaaattatgtaataattgctattaaacacacaatgtcacatttc

SEQ ID NO: 15756 - protein, 255 aa, DROSOPHILA
MIKNAVSLVTGGASGLGRATAERLAKQGASVILADLPSSKGNEVAKELGDKVVFVPVDVTSEKDVSAALQTAKDKFGRLDLTVNCAGTATAVKTFNFNKNVAHRLEDFQRVININTVGTFNVIRLSAGLMGANEPNQDGQRGVIVNTASVAAFDGQIGQAAYSASKAAVVGMTLPIARDLSTQGIRICTIAPGLFNTPMLAALPEKVRTFLAKSIPFPQRLGEPSEYAHLVQAIYENPLLNGEVIRIDGALRMMP

SEQ ID NO: 15757 - DNA, 5803 bp, DROSOPHILA
caactaggaaggcgacagttattatgtaaccactgttaagttaccgttacgttttgtactctaagcgaaaaccaacactgcaatgttaattttaaaaattgagcgaaagaaatcgatgccttcacttttaatgtgtacacactgagctaagtttttcttatactatccctataccattttgtaatgcaattaatgtaattaaataaaactacttaaatgtggaaatgtctagcatttgtttgggctcgatcgggagaggaatgagataatggtcatttaaatggagagcgacaggtgagagtatttttgcaacacagttctatttcccaacaataaatctttttcgctgaacaaatgcaactacttttaagtataataacagaaatatattatttacaaacgttgaataaaacaatattaataacgttggaaatgaagcctaaaagcttaatatagataaaaagtatttaaacagaagtttgttggagttcaaatatatacaaaaattcggcttatgctattttcactgtacttcgatttctatactattgtatacttatgctgccataaacattgccaatttattccattttccgttttgttttagttcttctgcgcgtcgcgtgcggcttgtttttgtttttaattttcgtccaaataattttccacatttttttttcgggggccagaggttcttttaaaaccggaagttgttacgaatggatcaccgttacagaagatcgttaaggagctcagcaggtatttaataacaattaaaaaattaataatgcagttggcacagttgcagagaagcccacttcaagcacaaaggtcaaggtaatgcaaaaaatgcaaaagtgcttgaaatcatgcaatttctagttatccctgcctgctcgaaaatcactaaagttttgcatgaaaagagtacccctgctggctatcgataagagttatcgcttcggcccctatcgatatttcaaaagttcatcaatttcagctgaaatctcaacaagtgcaagtttcgagctctgttttaattaaacacagacgtgtcgccgaacaagtcggcattgtttggatcggttttcaggttgcagtgcgtgaaaatatatatatattttttatttatttattgcgacatccgtgcggccactcacacacacaggcgcgattgacagatgtgcgacgtgcatacgtataaagagcacacactcgcacacacgcacgcagtgcggatgttctgattttatgcaagaaactgagtttatttttaaaataagaagaacatccgaaaatataatgccaacgaaaggcgacgggcgagcgacaaaagagcgtttgtaagcgcagaaaaaagggacacggcgaaaaggaacggggacggacgataaaccaaaataacgggaacatcggcggcggtggaaaattcagaaaataagaaaatcaaaacaaaagcaaaataaaacgacatctgacgtgcagcttcaagtgctttgcccccagagtacgttttccccaaatggactgggtttttcattttgcgagcaatctgcaatctttcccattcaattgaggtcgcgtcggaatctgcataagtgcataaaaaaaaatagtaaaaattttaaaaattctgaattcgaaacaaataatttcatacagttttctgaaaagcttttaaagttgatcaatatattgttaccgttaaaatttttataaaaagatatcgtttttattaataaattaatcgcattcattttaaattattaatcaacagtgtaataaactatttgctataatactaaaacttgcgttcaactacatataaaaataatttaaaattttaacattataaaatgtttttcgaaatgatcttaagcagagttctttgaaaccataaagtaaataatgatctcagacatcgaaaaatgggaaattatattacttccgattccgtccgagtctgagagaatttaaacgggaaagtcttgcatattaaaatgcccaacccctttgttgtttactttaatttcgttttttattccttgcatatacacccactgacacccacatcaacatttaccgctgacagtttcgcatgcgatttgcttgaaacacattgacagagccgaaatcaagcgccagcagagtatacagatagcccggcatttcccatggacgacgaactggaagacaaggtgttctatcagacatacgtatcgcacatgaaaatcctgtccaaatttgcggtgggcttctcgtccatcaactccccgctggcctacatatggaagctgtgccgactgtatgtccttcggccggaggtcatcttctgcggcttgatcctcttcgtcctgttgctctatttgcaagcggtagatgtgtggagtcgcagcatcctgggacgcatccaggcaaccctcggtcgccagaaggccgtcaagatgatggagctgtcggccagtgctggtgatcaccagagctgggaggagatgaagcagcagagctcggccttcgcggtcctgggacgcaggccaagaatggaggataggttcgtatgaagtcacaattcccagggataaactatattgtagatagcacttacatagtagctgaaatatacaaagatctgtcacgatcgacagcattttaggatttacaaattggctaagagtgtttttattagatttaaatgatctattgaggaataaattcttggcaacactcattttcattcattaaatagcattgcaacactttatagctatataaatcttttccatatgtcaaatttagactagataataataatttgggtctttagaaacaacttagtgacatctctattcaaatgtacacattccaagaaactaaagactaaagacttttatttacatcttaggtttattatcgaggagaacatcaacaacaacactggtatctccttctttgccgtatttgacggtcatggcggcgagtttgccgcagacttcgccaaggatgtgctggtgaagaacatctacaataagatcatcgagatgtccaagcttctgaagacggaaggaaattccggagattacgataagagtccctatttagcgcgcaagcagagtcgcaaggatgcaaacaaggagaacacagaaccgacggcaggggtgatgcgaaaggatagtctaaggaaggcccacagcaccacggcggattgtagtgctattaagcaaaagacaaccgaggcatccattgccgacatctacacagtccaattaaactcggcgatgagagccagtgggaatttgggagccgccaaggattccttcctcaacaacaacaacaacggacagaacggagcagccaatgcgccacctccaaactacgaagccaagtgctacatcgaacacggacgtattaactttggtaaactgatcacggacgagatcatgtcggccgactacaagcttgtggagcaggccaagagagcggtaagggaacctctttttacttaatcttaagagacaattctaactgatcttaattgcagaccaacattgcgggaaccaccgctctaatagcgatagttcagggctcaaagctgattgtggccaatgtgggcgactcccgcggagtcatgtacgactggcgtggaatcgccataccgctttcattcgatcacaagccgcagcaagtgcgagaacgaaagagaatccacgatgcaggcggattcatcgccttccgaggcgtttggcgtgtggccggggtgttggccacgtcacgtgctctaggggactatccgcttaaagataaggtgggaaaaatgggatggttccaacgagttactaacgaggctaatcttgacactatttttaaccacacgcttacagaatctggtgattgctacgccggacattttgaccttcgaactaaacgatcacaagtgagtgaacaacactttgcaacaacaatccaaacgaccatttgatagttgtaaagtgcattacattagacctgtatttaatgaaatactttcttatagaccccattttctgatactggcatccgatgggctgtgggacacgttcagcaatgaggaggcctgcacttttgcgttggagcatctgaaagagccggactttggcgccaaatcacttgccatggagtcgtataaacgtggctccgtggacaacatcaccgtgctggtgatcgtcttcaagaacgatgtctacaagattggcagctcagcgggaaaagcgggagaagaatccctaaaagtcccagccaaatctcaaccagttgcgcctgcagttgtgcaacgctcgaattcaatcaaaaccaaatgaaaaacgatagataagagtgcctgctaagaaatgctcttcagcttttctcctaaaaatttccttctccccaagaaaaacaaacgaaagtgcccgaatttttctagttaggcattttgctaaataccttttgacctttttgttacttgtccaaaggcagcgttcattcatcccattacagacatgcatacacattcatcactcgaaaatgcgttcatcatttgtcttaatattaaggttgtttgttagtcaatgttgttttgtttaaacaaaatatgtttgcatccgccgccacattgccgtgcactccgtttttccaattcgcacacgaaaatcatcacagtcactgactcagtcagggtaacatcatcacgtaactatttatttaatttatttgttatacgtgtaaaagaaaacattttctaaatgtcgaaatgtttttacgaataaaacaatgcatacgaaacgagaacatttcgttttgctacttaaattcaatttctaattgtttttctcaacattattcgttttggatttcaatgaaatgatctggtttgtagtttagggattaaaaacatccactttcgattaaagtttatataaaatgttttctttattaacatttacttatcttctgcctaaactaaattgtcccactgtttatactattcccatctatccggagaaaactctatagcccaaagcctaaagttaaaactaattcagccgctacaagatacacaaatttcagttaaggacgcttaaattttatttttgttttagctaaacaaatttgacgcccgttacaaaggtcagtagcttagtgagccgaaacagacacctgccagacgcggatggtgttgtcggagtagccggcgaacagagtctggccgtcggtggaccaggccagggacaggcactggggctgatcggccttcgacgtgggcgaaacgacctcggggcgcagctcctcaacggtcttcttgcatgccagatcccagatcttgatcgagggtccgtaggccacgcacagccagtagcggttgggcgagaagcacagggcgttgatgatgtcgttgtgctccagagtgtacaggttcttgccgtcattgaggtcccacagcagggccttggagtccttgccacctgaggtgcacagggagccatcgggcgagacggtcaccgtgttcaggtagccgttgtggccgtggtggttgttcttcaacttgcagttagccaagttccagaccttgacggtgcgatcccagccgcaggacacgatgatcgggttggagtggttgggcgagaagcgcacgcacgacacccagtcggtgtggccatcctcctggatggtgaacttgcactcagccagggtgttccacagcttgatggtcttgtcccgagagccggacacgatctgacggttatcggccgagaaggcaaccgacaaaacgtcctagaaagcgaacaag

SEQ ID NO: 15758 - DNA, 2633 bp, DROSOPHILA
ctgaaatctcaacaagtgcaagtttcgagctctgttttaattaaacacagacgtgtcgccgaacaagtcggcattgtttggatcggttttcaggttgcagtgcgtgaaaatatatatatattttttatttatttattgcgacatccgtgcggccactcacacacacaggcgcgattgacagatgtgcgacgtgcatacgtataaagagcacacactcgcacacacgcacgcagtgcggatgttctgattttatgcaagaaactgagtttatttttaaaataagaagaacatccgaaaatataatgccaacgaaaggcgacgggcgagcgacaaaagagcgtttgtaagcgcagaaaaaagggacacggcgaaaaggaacggggacggacgataaaccaaaataacgggaacatcggcggcggtggaaaattcagaaaataagaaaatcaaaacaaaagcaaaataaaacgacatctgacgtgcagcttcaagtgctttgcccccagatttcgcatgcgatttgcttgaaacacattgacagagccgaaatcaagcgccagcagagtatacagatagcccggcatttcccatggacgacgaactggaagacaaggtgttctatcagacatacgtatcgcacatgaaaatcctgtccaaatttgcggtgggcttctcgtccatcaactccccgctggcctacatatggaagctgtgccgactgtatgtccttcggccggaggtcatcttctgcggcttgatcctcttcgtcctgttgctctatttgcaagcggtagatgtgtggagtcgcagcatcctgggacgcatccaggcaaccctcggtcgccagaaggccgtcaagatgatggagctgtcggccagtgctggtgatcaccagagctgggaggagatgaagcagcagagctcggccttcgcggtcctgggacgcaggccaagaatggaggataggtttattatcgaggagaacatcaacaacaacactggtatctccttctttgccgtatttgacggtcatggcggcgagtttgccgcagacttcgccaaggatgtgctggtgaagaacatctacaataagatcatcgagatgtccaagcttctgaagacggaaggaaattccggagattacgataagagtccctatttagcgcgcaagcagagtcgcaaggatgcaaacaaggagaacacagaaccgacggcaggggtgatgcgaaaggatagtctaaggaaggcccacagcaccacggcggattgtagtgctattaagcaaaagacaaccgaggcatccattgccgacatctacacagtccaattaaactcggcgatgagagccagtgggaatttgggagccgccaaggattccttcctcaacaacaacaacaacggacagaacggagcagccaatgcgccacctccaaactacgaagccaagtgctacatcgaacacggacgtattaactttggtaaactgatcacggacgagatcatgtcggccgactacaagcttgtggagcaggccaagagagcgaccaacattgcgggaaccaccgctctaatagcgatagttcagggctcaaagctgattgtggccaatgtgggcgactcccgcggagtcatgtacgactggcgtggaatcgccataccgctttcattcgatcacaagccgcagcaagtgcgagaacgaaagagaatccacgatgcaggcggattcatcgccttccgaggcgtttggcgtgtggccggggtgttggccacgtcacgtgctctaggggactatccgcttaaagataagaatctggtgattgctacgccggacattttgaccttcgaactaaacgatcacaaaccccattttctgatactggcatccgatgggctgtgggacacgttcagcaatgaggaggcctgcacttttgcgttggagcatctgaaagagccggactttggcgccaaatcacttgccatggagtcgtataaacgtggctccgtggacaacatcaccgtgctggtgatcgtcttcaagaacgatgtctacaagattggcagctcagcgggaaaagcgggagaagaatccctaaaagtcccagccaaatctcaaccagttgcgcctgcagttgtgcaacgctcgaattcaatcaaaaccaaatgaaaaacgatagataagagtgcctgctaagaaatgctcttcagcttttctcctaaaaatttccttctccccaagaaaaacaaacgaaagtgcccgaatttttctagttaggcattttgctaaataccttttgacctttttgttacttgtccaaaggcagcgttcattcatcccattacagacatgcatacacattcatcactcgaaaatgcgttcatcatttgtcttaatattaaggttgtttgttagtcaatgttgttttgtttaaacaaaatatgtttgcatccgccgccacattgccgtgcactccgtttttccaattcgcacacgaaaatcatcacagtcactgactcagtcagggtaacatcatcacgtaactatttatttaatttatttgttatacgtgtaaaagaaaacattttctaaatgtcgaaatgtttttacgaataaaacaatgcatacgaaacgagaa

SEQ ID NO: 15759 - protein, 524 aa, DROSOPHILA
MDDELEDKVFYQTYVSHMKILSKFAVGFSSINSPLAYIWKLCRLYVLRPEVIFCGLILFVLLLYLQAVDVWSRSILGRIQATLGRQKAVKMMELSASAGDHQSWEEMKQQSSAFAVLGRRPRMEDRFIIEENINNNTGISFFAVFDGHGGEFAADFAKDVLVKNIYNKIIEMSKLLKTEGNSGDYDKSPYLARKQSRKDANKENTEPTAGVMRKDSLRKAHSTTADCSAIKQKTTEASIADIYTVQLNSAMRASGNLGAAKDSFLNNNNNGQNGAANAPPPNYEAKCYIEHGRINFGKLITDEIMSADYKLVEQAKRATNIAGTTALIAIVQGSKLIVANVGDSRGVMYDWRGIAIPLSFDHKPQQVRERKRIHDAGGFIAFRGVWRVAGVLATSRALGDYPLKDKNLVIATPDILTFELNDHKPHFLILASDGLWDTFSNEEACTFALEHLKEPDFGAKSLAMESYKRGSVDNITVLVIVFKNDVYKIGSSAGKAGEESLKVPAKSQPVAPAVVQRSNSIKTK

SEQ ID NO: 15760 - DNA, 5787 bp, DROSOPHILA
agttattatgtaaccactgttaagttaccgttacgttttgtactctaagcgaaaaccaacactgcaatgttaattttaaaaattgagcgaaagaaatcgatgccttcacttttaatgtgtacacactgagctaagtttttcttatactatccctataccattttgtaatgcaattaatgtaattaaataaaactacttaaatgtggaaatgtctagcatttgtttgggctcgatcgggagaggaatgagataatggtcatttaaatggagagcgacaggtgagagtatttttgcaacacagttctatttcccaacaataaatctttttcgctgaacaaatgcaactacttttaagtataataacagaaatatattatttacaaacgttgaataaaacaatattaataacgttggaaatgaagcctaaaagcttaatatagataaaaagtatttaaacagaagtttgttggagttcaaatatatacaaaaattcggcttatgctattttcactgtacttcgatttctatactattgtatacttatgctgccataaacattgccaatttattccattttccgttttgttttagttcttctgcgcgtcgcgtgcggcttgtttttgtttttaattttcgtccaaataattttccacatttttttttcgggggccagaggttcttttaaaaccggaagttgttacgaatggatcaccgttacagaagatcgttaaggagctcagcaggtatttaataacaattaaaaaattaataatgcagttggcacagttgcagagaagcccacttcaagcacaaaggtcaaggtaatgcaaaaaatgcaaaagtgcttgaaatcatgcaatttctagttatccctgcctgctcgaaaatcactaaagttttgcatgaaaagagtacccctgctggctatcgataagagttatcgcttcggcccctatcgatatttcaaaagttcatcaatttcagctgaaatctcaacaagtgcaagtttcgagctctgttttaattaaacacagacgtgtcgccgaacaagtcggcattgtttggatcggttttcaggttgcagtgcgtgaaaatatatatatattttttatttatttattgcgacatccgtgcggccactcacacacacaggcgcgattgacagatgtgcgacgtgcatacgtataaagagcacacactcgcacacacgcacgcagtgcggatgttctgattttatgcaagaaactgagtttatttttaaaataagaagaacatccgaaaatataatgccaacgaaaggcgacgggcgagcgacaaaagagcgtttgtaagcgcagaaaaaagggacacggcgaaaaggaacggggacggacgataaaccaaaataacgggaacatcggcggcggtggaaaattcagaaaataagaaaatcaaaacaaaagcaaaataaaacgacatctgacgtgcagcttcaagtgctttgcccccagagtacgttttccccaaatggactgggtttttcattttgcgagcaatctgcaatctttcccattcaattgaggtcgcgtcggaatctgcataagtgcataaaaaaaaatagtaaaaattttaaaaattctgaattcgaaacaaataatttcatacagttttctgaaaagcttttaaagttgatcaatatattgttaccgttaaaatttttataaaaagatatcgtttttattaataaattaatcgcattcattttaaattattaatcaacagtgtaataaactatttgctataatactaaaacttgcgttcaactacatataaaaataatttaaaattttaacattataaaatgtttttcgaaatgatcttaagcagagttctttgaaaccataaagtaaataatgatctcagacatcgaaaaatgggaaattatattacttccgattccgtccgagtctgagagaatttaaacgggaaagtcttgcatattaaaatgcccaacccctttgttgtttactttaatttcgttttttattccttgcatatacacccactgacacccacatcaacatttaccgctgacagtttcgcatgcgatttgcttgaaacacattgacagagccgaaatcaagcgccagcagagtatacagatagcccggcatttcccatggacgacgaactggaagacaaggtgttctatcagacatacgtatcgcacatgaaaatcctgtccaaatttgcggtgggcttctcgtccatcaactccccgctggcctacatatggaagctgtgccgactgtatgtccttcggccggaggtcatcttctgcggcttgatcctcttcgtcctgttgctctatttgcaagcggtagatgtgtggagtcgcagcatcctgggacgcatccaggcaaccctcggtcgccagaaggccgtcaagatgatggagctgtcggccagtgctggtgatcaccagagctgggaggagatgaagcagcagagctcggccttcgcggtcctgggacgcaggccaagaatggaggataggttcgtatgaagtcacaattcccagggataaactatattgtagatagcacttacatagtagctgaaatatacaaagatctgtcacgatcgacagcattttaggatttacaaattggctaagagtgtttttattagatttaaatgatctattgaggaataaattcttggcaacactcattttcattcattaaatagcattgcaacactttatagctatataaatcttttccatatgtcaaatttagactagataataataatttgggtctttagaaacaacttagtgacatctctattcaaatgtacacattccaagaaactaaagactaaagacttttatttacatcttaggtttattatcgaggagaacatcaacaacaacactggtatctccttctttgccgtatttgacggtcatggcggcgagtttgccgcagacttcgccaaggatgtgctggtgaagaacatctacaataagatcatcgagatgtccaagcttctgaagacggaaggaaattccggagattacgataagagtccctatttagcgcgcaagcagagtcgcaaggatgcaaacaaggagaacacagaaccgacggcaggggtgatgcgaaaggatagtctaaggaaggcccacagcaccacggcggattgtagtgctattaagcaaaagacaaccgaggcatccattgccgacatctacacagtccaattaaactcggcgatgagagccagtgggaatttgggagccgccaaggattccttcctcaacaacaacaacaacggacagaacggagcagccaatgcgccacctccaaactacgaagccaagtgctacatcgaacacggacgtattaactttggtaaactgatcacggacgagatcatgtcggccgactacaagcttgtggagcaggccaagagagcggtaagggaacctctttttacttaatcttaagagacaattctaactgatcttaattgcagaccaacattgcgggaaccaccgctctaatagcgatagttcagggctcaaagctgattgtggccaatgtgggcgactcccgcggagtcatgtacgactggcgtggaatcgccataccgctttcattcgatcacaagccgcagcaagtgcgagaacgaaagagaatccacgatgcaggcggattcatcgccttccgaggcgtttggcgtgtggccggggtgttggccacgtcacgtgctctaggggactatccgcttaaagataaggtgggaaaaatgggatggttccaacgagttactaacgaggctaatcttgacactatttttaaccacacgcttacagaatctggtgattgctacgccggacattttgaccttcgaactaaacgatcacaagtgagtgaacaacactttgcaacaacaatccaaacgaccatttgatagttgtaaagtgcattacattagacctgtatttaatgaaatactttcttatagaccccattttctgatactggcatccgatgggctgtgggacacgttcagcaatgaggaggcctgcacttttgcgttggagcatctgaaagagccggactttggcgccaaatcacttgccatggagtcgtataaacgtggctccgtggacaacatcaccgtgctggtgatcgtcttcaagaacgatgtctacaagattggcagctcagcgggaaaagcgggagaagaatccctaaaagtcccagccaaatctcaaccagttgcgcctgcagttgtgcaacgctcgaattcaatcaaaaccaaatgaaaaacgatagataagagtgcctgctaagaaatgctcttcagcttttctcctaaaaatttccttctccccaagaaaaacaaacgaaagtgcccgaatttttctagttaggcattttgctaaataccttttgacctttttgttacttgtccaaaggcagcgttcattcatcccattacagacatgcatacacattcatcactcgaaaatgcgttcatcatttgtcttaatattaaggttgtttgttagtcaatgttgttttgtttaaacaaaatatgtttgcatccgccgccacattgccgtgcactccgtttttccaattcgcacacgaaaatcatcacagtcactgactcagtcagggtaacatcatcacgtaactatttatttaatttatttgttatacgtgtaaaagaaaacattttctaaatgtcgaaatgtttttacgaataaaacaatgcatacgaaacgagaacatttcgttttgctacttaaattcaatttctaattgtttttctcaacattattcgttttggatttcaatgaaatgatctggtttgtagtttagggattaaaaacatccactttcgattaaagtttatataaaatgttttctttattaacatttacttatcttctgcctaaactaaattgtcccactgtttatactattcccatctatccggagaaaactctatagcccaaagcctaaagttaaaactaattcagccgctacaagatacacaaatttcagttaaggacgcttaaattttatttttgttttagctaaacaaatttgacgcccgttacaaaggtcagtagcttagtgagccgaaacagacacctgccagacgcggatggtgttgtcggagtagccggcgaacagagtctggccgtcggtggaccaggccagggacaggcactggggctgatcggccttcgacgtgggcgaaacgacctcggggcgcagctcctcaacggtcttcttgcatgccagatcccagatcttgatcgagggtccgtaggccacgcacagccagtagcggttgggcgagaagcacagggcgttgatgatgtcgttgtgctccagagtgtacaggttcttgccgtcattgaggtcccacagcagggccttggagtccttgccacctgaggtgcacagggagccatcgggcgagacggtcaccgtgttcaggtagccgttgtggccgtggtggttgttcttcaacttgcagttagccaagttccagaccttgacggtgcgatcccagccgcaggacacgatgatcgggttggagtggttgggcgagaagcgcacgcacgacacccagtcggtgtggccatcctcctggatggtgaacttgcactcagccagggtgttccacagcttgatggtcttgtcccgagagccggacacgatctgacggttatcggccgagaaggcaaccgacaaaacgtcctagaaagcgaacaag

SEQ ID NO: 15761 - DNA, 2209 bp, DROSOPHILA
tgcaagtttcgagctctgttttaattaaacacagacgtgtcgccgaacaagtcggcattgtttggatcggttttcaggttgcatttcgcatgcgatttgcttgaaacacattgacagagccgaaatcaagcgccagcagagtatacagatagcccggcatttcccatggacgacgaactggaagacaaggtgttctatcagacatacgtatcgcacatgaaaatcctgtccaaatttgcggtgggcttctcgtccatcaactccccgctggcctacatatggaagctgtgccgactgtatgtccttcggccggaggtcatcttctgcggcttgatcctcttcgtcctgttgctctatttgcaagcggtagatgtgtggagtcgcagcatcctgggacgcatccaggcaaccctcggtcgccagaaggccgtcaagatgatggagctgtcggccagtgctggtgatcaccagagctgggaggagatgaagcagcagagctcggccttcgcggtcctgggacgcaggccaagaatggaggataggtttattatcgaggagaacatcaacaacaacactggtatctccttctttgccgtatttgacggtcatggcggcgagtttgccgcagacttcgccaaggatgtgctggtgaagaacatctacaataagatcatcgagatgtccaagcttctgaagacggaaggaaattccggagattacgataagagtccctatttagcgcgcaagcagagtcgcaaggatgcaaacaaggagaacacagaaccgacggcaggggtgatgcgaaaggatagtctaaggaaggcccacagcaccacggcggattgtagtgctattaagcaaaagacaaccgaggcatccattgccgacatctacacagtccaattaaactcggcgatgagagccagtgggaatttgggagccgccaaggattccttcctcaacaacaacaacaacggacagaacggagcagccaatgcgccacctccaaactacgaagccaagtgctacatcgaacacggacgtattaactttggtaaactgatcacggacgagatcatgtcggccgactacaagcttgtggagcaggccaagagagcgaccaacattgcgggaaccaccgctctaatagcgatagttcagggctcaaagctgattgtggccaatgtgggcgactcccgcggagtcatgtacgactggcgtggaatcgccataccgctttcattcgatcacaagccgcagcaagtgcgagaacgaaagagaatccacgatgcaggcggattcatcgccttccgaggcgtttggcgtgtggccggggtgttggccacgtcacgtgctctaggggactatccgcttaaagataagaatctggtgattgctacgccggacattttgaccttcgaactaaacgatcacaaaccccattttctgatactggcatccgatgggctgtgggacacgttcagcaatgaggaggcctgcacttttgcgttggagcatctgaaagagccggactttggcgccaaatcacttgccatggagtcgtataaacgtggctccgtggacaacatcaccgtgctggtgatcgtcttcaagaacgatgtctacaagattggcagctcagcgggaaaagcgggagaagaatccctaaaagtcccagccaaatctcaaccagttgcgcctgcagttgtgcaacgctcgaattcaatcaaaaccaaatgaaaaacgatagataagagtgcctgctaagaaatgctcttcagcttttctcctaaaaatttccttctccccaagaaaaacaaacgaaagtgcccgaatttttctagttaggcattttgctaaataccttttgacctttttgttacttgtccaaaggcagcgttcattcatcccattacagacatgcatacacattcatcactcgaaaatgcgttcatcatttgtcttaatattaaggttgtttgttagtcaatgttgttttgtttaaacaaaatatgtttgcatccgccgccacattgccgtgcactccgtttttccaattcgcacacgaaaatcatcacagtcactgactcagtcagggtaacatcatcacgtaactatttatttaatttatttgttatacgtgtaaaagaaaacattttctaaatgtcgaaatgtttttacgaataaaacaatgcatacgaaacgagaa

SEQ ID NO: 15762 - protein, 524 aa, DROSOPHILA; identical to SEQ ID NO: 15759

SEQ ID NO: 15763 - DNA, 6561 bp, DROSOPHILA
gcctagaaataggcttttttcgttttaaatatgttattttagcatttagatgcttaagagttaaagttattaacttttattgcgaaaaccaatttattttatttccttgccattttattccaaaaacaaacccccaaatgaaaacatgttggttttttttttcaatagttttctaaaaatatatttttttattattgtttaattttttttttagttttactgtgatgcgtcttgactgtgagaaaagtgtgtgagtgtctctcacacgcacgtacatataataaactatataggggatatgatcggattgtttatgttggatactctatgtttcatttcattataggcattgtcgtttatcatgtacatcgaacacgtttactcttatttacaaaatattaatcgataaaaatgcatcatttcatggttttcgttttcgtttttgtttcgtttttttttttttcggttactggtttgcctggccaataatttaaataaattaaaaaattgcataaaactaagctaaatgaagaattcatttcgagtgtttttcagtgtctgtttgtgggggagggggtataaataaatagttttgatggtttagatgagtagaataaatagtcgaaatgggggcgaagtgtgggtggggtggtggtgtgtcctttgtggcgtgtggtgtcatatgtggattggggttgtgcccagtggctcaattgacaaacatcactggctcaaagggaatctgggaaaaccccctttgatagcaaggtggcaattgggcgtggcaagggcgcagctaaggtcataataaataaataaataatttttaaatatccacttaaatgctaggcaaaaatcttttcgaatattgggttgggtaaagcgatagattcgaaggtttcggaagacaggagcgggtcaatcaatcagttgatttcgaaatggtgaccgcaagtggttggagtgcatatgctgtgagtggtgcaggtggcgcagtcgcctaccacagcggcatggggcgttgtcgggccaagaatgcgggcaggctggcagcagtcggggcgggacagcctaaaatatgataataaaaaaaaatattaattatagataaaataataagttgtgaaggttccaaagttcccttcggctacttacggcacacggagcaggtttgttcgtcggtgccatcaccgcaaccatcccgtccggagcagacgatggccgtggagcggcacagtccgttgctgcagcggtgcggacagtaggcgtccgcctcccgccgaccaccgccgagcaggccgcccgcctcgatgaggcgcatgaagaggttggggagggcgcgggatccacacagatgcggcggctcatcgctgccgtccttgcaggacacgatcgcgttacagtactcgtactccggcaggcactcgccgctgccgcagcggaaggtgtgttccggacaggcgttgccgcccttcacgctgccatcgcagcccagctcgtcctcgccatgtggacactgccgtcgtccgtcgcacagcgcagcgcgcgagatgcagcgaccgcttcgctggcagcggaaggattccgtggggcaggtctggttgaggcgggcgttgtgggtgcactcctcgtcggaggcgtcattgcagtcggcgcggccgtcgcacacaaagaaccacgagatgcacacgccactcgagcggcactggaatggaaataagatgcacatatattttataatgatttttataatctttgcctgtgtgatgactcacctggaaggttcccggactgcatccggttctctcggcgctgcactgtgatccctcttctccggcagcacaatcgcagactcctcgtctattgcacacggtgtggggatcagccaactggcactgacgatcactgctgcaggccaatccaagtgaaactgcttccagacccaaatccacgcgcttgcgcaactccgtaccgggtttgatggcagccagagaggcggaaggaatggctgctggagaaacgggttccggcgtgggttcatcggcggtcattaggggcattagcgtggtaacgacgggagcagcgggctccataagggtcacacgactggccaggcccaacatggtttgtgtggtgatctcgacaatgtcagcgggattgggtgtggcctcctcatgtggaatggcatgagctgctggctcctcttcctcaatatggttgttgtccagctcctgcagaccatcgatattggtagtggattccagaattagactttcggattgcagctcattgaagcggttcacatcggagtgatctgtaagatcgaagggcagttcctcgggcaacggagtgttaacttcttcgggctcgggctcctggaacttttctgtggtggcttcttctggcagggattcggtttctacttccttaaggggctcgtcctcatcctgctgatgttcctcctgatcctgctggtgctcttcttcatcatactggtgctcatcttccactggcgtttgctccgcttcactggcaatgtgctgctccacctccagagcgcttggttgttcggttttcgattcatcagattctgggagagctgggacatcttcttcatccttagctgcctctgcaaacagttcgggaatagcagttcctggctcgttaaccggttgcacttgctcggcatgttcctgggtctcatcggcttcagcctggagatccgaaatggcttcatgtgcttgttcctcctcgttttccgagttggcctccaccatgggaaccgtttgggcgggttgctgaccaaatggaacaggaggcacagtgctgtcagcctccaacatcaagtcgctgaggatatcagcaatgctctcgctctcatggaagttctgaggatcatgttcgggatcgcgttcctcgctcacaatggcaataggtgcatctggagcctctggagccagagtggattcgcgagagtcagattcttcagcttcaatagcagcagtcgtttcttctggccgggaaagttcctgtagatgctccacgctggtatagtccatttctggcttggtcaacttatgatcctccggaacagctgatgcttcctgttgaactggcaattcctcctcttctggcattggttgtggttccgggataagttcgtcctcttcattgggttcggctccctggataatgttgtcattctcgtttttatcgatcgcaacttcatcttgctctacgctaatctctggagatgtctgagcactttcactggcctcggtttccgtttccacttcgggagccacctccgtctgagcaggttcctcggcggcttcctccgcgatgtcggcatcgctcttaattggcagctctggctcggcctggtccgcatccacctgcgacacctcgtcattagtgggctcaatttctggctctggctctgcctcttgaatgcgctcggttatcgccactggctcctcctcaacatggtccgctgtctgtggttcgatctccttctcggtggctgacggggtttctagatccgcctggggctctgcaattgcttccgacacttcgggcgtcttaattgcatttgcattttcctcgggctccacctgctgcacctgctcctcatgtgcaagtgccgcctcttcaatctcctcctcatcctgctgctgttgctgttgctcgggcagctcggtggtgttctcagcgatttctggttcctctgtggtcagctctggttctatttccactggcgccaattcatcatcatttgttgggtatgtcaattgtccgtgctccgcttcggtgattgcctccacctcctcctggtcgtgatcttggactggtttctccgttgtggcttcatctgcatcttcatgcatatccaccacctgctcgggctctttttcttcgatctcctcctgttcaagagcggctggctcggtgacttggtcttgatttaattgattggcttcatttaaatcatcttcgccacttgtcggcttgatgtcggcgctttgttccacctgatcgatctcggattccatatctggtttggcttctgtggccggcagctccacttctgcggcttcggtcgctgccgtttcttctttttctttttctatttccatttcggcctgtggctcctctggttttcccacctcgtcgacgttttggctttcactctccacctgggctggctgttcgatcttcaacgcttctgttggctcctcctgcttgggcgtctccacctcatcatcgtggctggctgcagcaacatccagctcatgatctcccgaagccagatcctcaggtgtttcctcctccggtatctcctcggtctcgtcggctgccttcgtcacactttcggtttcaccttcattaaccgggatcagttcttcatcggccacagtctgcgatgtctctggctctccatcctcctgcagcagctgcgtctggatctggggctcggtgctagtctctgcatcagtctcgctttcggtatcaatgggcaccaccccctcattagtcgcttggtgtactgcctccgtctccttttcatcttctggcttggctggctcaacatcatccactgatgtttcataatcgaatttcatggtatcgtcgatgggcgatgaggcaatctcttgaccacccgaggcctcagcagcctcctcatccgcttcgataggcacgatttcagtggctactggggattcttcgtgctcaggttgatccactgtcagttctggagcttctggcttgtcattgtgctcctctgtgtactcctcatcgatcttgtatgggtaatcttcagtgggtccagcctcagtttcctgttccgcattaatggcatcctcggttggcacatcagcaggtgtgagcagctgttggactccagtggtggcatcttgggaggattgaggaagctctgcgtcgcttgcttggtctatgacctgctgctgatgctgctgctgctgctgctcctcctcttggttctgctgctgctcaatcctatgttgttcctcctcttgatgtttctgttcctcctcctgatgttgctgctcatctaattgattttgctgctgtgtcagttcggtttcctcatgagccaggtccacagcctccaatttttcaccattatcaacctcaacgacctcgggtctcagcttggtggtctcaccatcgtcttcctccagcgattgctcctccacgctggcgggcagctcatcttctaggagaatgggcgctggagttgtcgtagttgtggtcgttgttgttcttctggtggttgttggtggtgctgcagtggtggtcgtcgttgttctactcgtggttctagttgtgggcctaggagtggttgttgttgtcgtcgtggtagtggtactgctagctggctgctctaccttctccacggcctgttcctgcttctgatcctcctgatccgccgccggggccacacacagaccacccaccattttggctggacttgtgcactggcagcgtccgaagagattcgggatgaggaagtcacagtgggtgcgggtgtcgaacatttgacagtgggcgtggctgtagcaaacggcaccaggatgggcagctgcggatgggggataaagatcggtcgcaaaaagttctcatgagattcttgtatattttcctgctctgatctaagtgttgtgaatggatgggatatgttattaagctaaccgtaaaccgaactccaagcaccaaatgcatattaaaatctcatcatcatcatcatgaacagccacaccagaacaaggaggagctgaagccgccacaagaacaagaacaagaacaacatcaaaacattagcccgccttcgacaagcctaataaccgtcaataaagtcaactgcaactgcatcagacgcaacgcatggccgaaagacaagtgcaaagagtagccgagattggtacagagaaaaaaaaaactattacaaagataatttttcaaaaaagaaatgattttccttaatatctatttcactgccaaatacggtttctaagaaaggacttacattttcactttttttttagttgcaaggtcacatcgttttgttgttctttgatcagatcacacgttggccacacttaattaatgcctatgaatataataaggttgacacactttttttcaagcacttaaacccaattgttttgaaatactaagtatattttctttctctgcatcactgactaagaaggggatcagatggaaccagaagatgacgttgaaacgtcggtgacgtcgcccattcccattaccgttgctcatcagcattccactcgccgataactggctaaaaagagacggcgactcttggttgcaccgatgactgcgaagactgagccacctgcgtgtctgccactgtcctccgctggaatctcagctctgacccactttccggcctgccgctccaacttgttttcacttgtttcgtttttggcttgccagctagcaacttgcagctagcagcttgcaactagcaactggcaactggcgacatgccatttaccatttcactggcca

SEQ ID NO: 15764 - DNA, 4407 bp, DROSOPHILA
atgttcgacacccgcacccactgtgacttcctcatcccgaatctcttcggacgctgccagtgcacaagtccagccaaaatggtgggtggtctgtgtgtggccccggcggcggatcaggaggatcagaagcaggaacaggccgtggagaaggtagagcagccagctagcagtaccactaccacgacgacaacaacaaccactcctaggcccacaactagaaccacgagtagaacaacgacgaccaccactgcagcaccaccaacaaccaccagaagaacaacaacgaccacaactacgacaactccagcgcccattctcctagaagatgagctgcccgccagcgtggaggagcaatcgctggaggaagacgatggtgagaccaccaagctgagacccgaggtcgttgaggttgataatggtgaaaaattggaggctgtggacctggctcatgaggaaaccgaactgacacagcagcaaaatcaattagatgagcagcaacatcaggaggaggaacagaaacatcaagaggaggaacaacataggattgagcagcagcagaaccaagaggaggagcagcagcagcagcagcatcagcagcaggtcatagaccaagcaagcgacgcagagcttcctcaatcctcccaagatgccaccactggagtccaacagctgctcacacctgctgatgtgccaaccgaggatgccattaatgcggaacaggaaactgaggctggacccactgaagattacccatacaagatcgatgaggagtacacagaggagcacaatgacaagccagaagctccagaactgacagtggatcaacctgagcacgaagaatccccagtagccactgaaatcgtgcctatcgaagcggatgaggaggctgctgaggcctcgggtggtcaagagattgcctcatcgcccatcgacgataccatgaaattcgattatgaaacatcagtggatgatgttgagccagccaagccagaagatgaaaaggagacggaggcagtacaccaagcgactaatgagggggtggtgcccattgataccgaaagcgagactgatgcagagactagcaccgagccccagatccagacgcagctgctgcaggaggatggagagccagagacatcgcagactgtggccgatgaagaactgatcccggttaatgaaggtgaaaccgaaagtgtgacgaaggcagccgacgagaccgaggagataccggaggaggaaacacctgaggatctggcttcgggagatcatgagctggatgttgctgcagccagccacgatgatgaggtggagacgcccaagcaggaggagccaacagaagcgttgaagatcgaacagccagcccaggtggagagtgaaagccaaaacgtcgacgaggtgggaaaaccagaggagccacaggccgaaatggaaatagaaaaagaaaaagaagaaacggcagcgaccgaagccgcagaagtggagctgccggccacagaagccaaaccagatatggaatccgagatcgatcaggtggaacaaagcgccgacatcaagccgacaagtggcgaagatgatttaaatgaagccaatcaattaaatcaagaccaagtcaccgagccagccgctcttgaacaggaggagatcgaagaaaaagagcccgagcaggtggtggatatgcatgaagatgcagatgaagccacaacggagaaaccagtccaagatcacgaccaggaggaggtggaggcaatcaccgaagcggagcacggacaattgacatacccaacaaatgatgatgaattggcgccagtggaaatagaaccagagctgaccacagaggaaccagaaatcgctgagaacaccaccgagctgcccgagcaacagcaacagcagcaggatgaggaggagattgaagaggcggcacttgcacatgaggagcaggtgcagcaggtggagcccgaggaaaatgcaaatgcaattaagacgcccgaagtgtcggaagcaattgcagagccccaggcggatctagaaaccccgtcagccaccgagaaggagatcgaaccacagacagcggaccatgttgaggaggagccagtggcgataaccgagcgcattcaagaggcagagccagagccagaaattgagcccactaatgacgaggtgtcgcaggtggatgcggaccaggccgagccagagctgccaattaagagcgatgccgacatcgcggaggaagccgccgaggaacctgctcagacggaggtggctcccgaagtggaaacggaaaccgaggccagtgaaagtgctcagacatctccagagattagcgtagagcaagatgaagttgcgatcgataaaaacgagaatgacaacattatccagggagccgaacccaatgaagaggacgaacttatcccggaaccacaaccaatgccagaagaggaggaattgccagttcaacaggaagcatcagctgttccggaggatcataagttgaccaagccagaaatggactataccagcgtggagcatctacaggaactttcccggccagaagaaacgactgctgctattgaagctgaagaatctgactctcgcgaatccactctggctccagaggctccagatgcacctattgccattgtgagcgaggaacgcgatcccgaacatgatcctcagaacttccatgagagcgagagcattgctgatatcctcagcgacttgatgttggaggctgacagcactgtgcctcctgttccatttggtcagcaacccgcccaaacggttcccatggtggaggccaactcggaaaacgaggaggaacaagcacatgaagccatttcggatctccaggctgaagccgatgagacccaggaacatgccgagcaagtgcaaccggttaacgagccaggaactgctattcccgaactgtttgcagaggcagctaaggatgaagaagatgtcccagctctcccagaatctgatgaatcgaaaaccgaacaaccaagcgctctggaggtggagcagcacattgccagtgaagcggagcaaacgccagtggaagatgagcaccagtatgatgaagaagagcaccagcaggatcaggaggaacatcagcaggatgaggacgagccccttaaggaagtagaaaccgaatccctgccagaagaagccaccacagaaaagttccaggagcccgagcccgaagaagttaacactccgttgcccgaggaactgcccttcgatcttacagatcactccgatgtgaaccgcttcaatgagctgcaatccgaaagtctaattctggaatccactaccaatatcgatggtctgcaggagctggacaacaaccatattgaggaagaggagccagcagctcatgccattccacatgaggaggccacacccaatcccgctgacattgtcgagatcaccacacaaaccatgttgggcctggccagtcgtgtgacccttatggagcccgctgctcccgtcgttaccacgctaatgcccctaatgaccgccgatgaacccacgccggaacccgtttctccagcagccattccttccgcctctctggctgccatcaaacccggtacggagttgcgcaagcgcgtggatttgggtctggaagcagtttcacttggattggcctgcagcagtgatcgtcagtgccagttggctgatccccacaccgtgtgcaatagacgaggagtctgcgattgtgctgccggagaagagggatcacagtgcagcgccgagagaaccggatgcagtccgggaaccttccagtgccgctcgagtggcgtgtgcatctcgtggttctttgtgtgcgacggccgcgccgactgcaatgacgcctccgacgaggagtgcacccacaacgcccgcctcaaccagacctgccccacggaatccttccgctgccagcgaagcggtcgctgcatctcgcgcgctgcgctgtgcgacggacgacggcagtgtccacatggcgaggacgagctgggctgcgatggcagcgtgaagggcggcaacgcctgtccggaacacaccttccgctgcggcagcggcgagtgcctgccggagtacgagtactgtaacgcgatcgtgtcctgcaaggacggcagcgatgagccgccgcatctgtgtggatcccgcgccctccccaacctcttcatgcgcctcatcgaggcgggcggcctgctcggcggtggtcggcgggaggcggacgcctactgtccgcaccgctgcagcaacggactgtgccgctccacggccatcgtctgctccggacgggatggttgcggtgatggcaccgacgaacaaacctgctccgtgtgccgctgtcccgccccgactgctgccagcctgcccgcattcttggcccgacaacgccccatgccgctgtggtag

SEQ ID NO: 15765 - protein, 1468 aa, DROSOPHILA
MFDTRTHCDFLIPNLFGRCQCTSPAKMVGGLCVAPAADQEDQKQEQAVEKVEQPASSTTTTTTTTTTPRPTTRTTSRTTTTTTAAPPTTTRRTTTTTTTTTPAPILLEDELPASVEEQSLEEDDGETTKLRPEVVEVDNGEKLEAVDLAHEETELTQQQNQLDEQQHQEEEQKHQEEEQHRIEQQQNQEEEQQQQQHQQQVIDQASDAELPQSSQDATTGVQQLLTPADVPTEDAINAEQETEAGPTEDYPYKIDEEYTEEHNDKPEAPELTVDQPEHEESPVATEIVPIEADEEAAEASGGQEIASSPIDDTMKFDYETSVDDVEPAKPEDEKETEAVHQATNEGVVPIDTESETDAETSTEPQIQTQLLQEDGEPETSQTVADEELIPVNEGETESVTKAADETEEIPEEETPEDLASGDHELDVAAASHDDEVETPKQEEPTEALKIEQPAQVESESQNVDEVGKPEEPQAEMEIEKEKEETAATEAAEVELPATEAKPDMESEIDQVEQSADIKPTSGEDDLNEANQLNQDQVTEPAALEQEEIEEKEPEQVVDMHEDADEATTEKPVQDHDQEEVEAITEAEHGQLTYPTNDDELAPVEIEPELTTEEPEIAENTTELPEQQQQQQDEEEIEEAALAHEEQVQQVEPEENANAIKTPEVSEAIAEPQADLETPSATEKEIEPQTADHVEEEPVAITERIQEAEPEPEIEPTNDEVSQVDADQAEPELPIKSDADIAEEAAEEPAQTEVAPEVETETEASESAQTSPEISVEQDEVAIDKNENDNIIQGAEPNEEDELIPEPQPMPEEEELPVQQEASAVPEDHKLTKPEMDYTSVEHLQELSRPEETTAAIEAEESDSRESTLAPEAPDAPIAIVSEERDPEHDPQNFHESESIADILSDLMLEADSTVPPVPFGQQPAQTVPMVEANSENEEEQAHEAISDLQAEADETQEHAEQVQPVNEPGTAIPELFAEAAKDEEDVPALPESDESKTEQPSALEVEQHIASEAEQTPVEDEHQYDEEEHQQDQEEHQQDEDEPLKEVETESLPEEATTEKFQEPEPEEVNTPLPEELPFDLTDHSDVNRFNELQSESLILESTTNIDGLQELDNNHIEEEEPAAHAIPHEEATPNPADIVEITTQTMLGLASRVTLMEPAAPVVTTLMPLMTADEPTPEPVSPAAIPSASLAAIKPGTELRKRVDLGLEAVSLGLACSSDRQCQLADPHTVCNRRGVCDCAAGEEGSQCSAERTGCSPGTFQCRSSGVCISWFFVCDGRADCNDASDEECTHNARLNQTCPTESFRCQRSGRCISRAALCDGRRQCPHGEDELGCDGSVKGGNACPEHTFRCGSGECLPEYEYCNAIVSCKDGSDEPPHLCGSRALPNLFMRLIEAGGLLGGGRREADAYCPHRCSNGLCRSTAIVCSGRDGCGDGTDEQTCSVCRCPAPTAASLPAFLARQRPMPLW

SEQ ID NO: 15766 - DNA, 5345 bp, DROSOPHILA
gcgattctgtgaactttattttgttgaatgatcattggaacctactgtttttctcagtgtcctgctgatgtctgttgttgctggcattttgtccttccgcaatttgcaactgtttgtcgtgtttgcacgtccttttctgtgtactgtgcaaatgtgctgctctggtttttgctttttttgtgcgccgagtcgcatctaatttgcatgccttaaaatcggatttagaagcaaactgcgatgccatcgcattggcaaattgttaagcctgattatggtttggccaagtgttggcaactaactaattgtatgtcgtgttgcacgaaaatcgatgccaaccagaagtgaccatgagttgtagttaagctgtgatttgaatttaaaatctctgtcgattacaagaattttccgaaattctaatatccattattataaaagcaattaactttttattgaatctattctgtaattctagtttctcgttactgcattctaacatgttttcctaaatgcattgctacctcttacccttgcaattcgattccccatttctctggttgcatttgggccggatttcggtatttgaccaactcatttcgtatttcgaaatgatttcggccttcgttgcaaatgttaccttgatgctgttgccaaaaaaaggtggcttccattttgtgccccgcccgaatgacttggcaactttttgattgcatcaaaacgagtcgcctcctccctcatcgcacagatgcagatacaaagtcgggagaaaaccagagagagagagatagcaggtgacagagggaaagagatagagaagcagctagagctgcttaatgaaagtgcaaaagttgtctttcgcgcggccacgaaatgagcttaaaatttagttagagtttcagttgcattctgcactttgctccactttcgtttgaatttcaatttgggttgcgggttttccccggttgacttggtctggcttctggggcttccagatcttgggcacttacttgcgaaaatggcgggttccacggacgagtcctggcgtacagcagttgaccgtgaccgaggtacctgtggggaaattagcggaccttggttatttgtatctgggaaatcaagattgcgcagtgagtgcatcaataaatcagagtgcaaactatgctaaaaatttggaactgcaccgagagaaaaacagaactgtttcgggcctagctgtacacttatacaaatttgtttttgaagacaggaaaggatatgtaaattttatcaaactcttttctggaatttatacataaagatacaatttggaataatatttaactttaatctatgtgttgcaagtaataatttataaatgattcaaacgaacattactttaggataagttttgcgaaaaaatagaaactcattaattaaatttttccccgcctaatggccactaacagagcaattgagatagcccaaaaaggcagctccttcgagtgcacttccccagttccctctcggggaataggtcccgaactttgtgcacttacctttcagttccctggccatccaacgggtggcaaggagcacgcagagcttggagtgggcaaatgcttcgcgggcgtggaacttcaccgaccaggtgcccacattcaggggatcgtcgaaatcgattttggcgccctgatgggcatgggcggaaacgaagaggatgcgtccttgctccgagcgttgcaagtgtggcaggagcaggtgggtcaacaggaagggggccagatagttcacctggctgtgccgttcgaagccatcctcggtgggcatctgagtgttggcgaataccactccggcattgttcaccagcacatcgatccgctcgaattccgccatcagctggccggcaaagtgatggacactgcgcagcgaacagaggtccaagtagcgtgcctccacgaagtacctgtcctccggattgtcatcctcatccaaggaattcaggggtgtgcggcagcccagctcacgtttgattatggccgccgcccgcttcccggcctcgagattgcggcaggcgaggattatccggccacctcggccagccagagcctgggctatttcgaagccaatgccgctgttgccgccggtgaccaccacgatttgctccttgatttgattatcgttcggacagcgctggccgctcattaaggtcctggcatgcgggtaaaggatacagattagatggagttggaaggatggagaatgttggatggcaaaggggcgggcatgtggatcagtgggtgtggctagtggtttatgggtagcttaatgatgtcctgcattcatgttgcgtgtgtgcacttagctaaatattaccactaaaagtgattctttttatatgaaactcataaaagatcttaaaaaaagagtcatgcttttacaatcgaagaaactttttatataagatattttaaaaaatgttatacatcatcagttttgcgtatagtaagtttcaaattgacataattagtttaaaatagatttgctttaagctatagcatgttttttaatatttttgtgtaaaataaaccttatacattttttcaaagtagtaagggtggcggttaaggggtggtaaaggcatatagtcggaattttggcttattgataggcgttaatggaatcagcatgactatttgcataagtctgcctgcggccatttggcgatttggctaactctggccgctcattttcgactccattaattacggtgcgtatgtctgtaaacaataattgtcaatttatttaatttcaagccttgggaaacaaacgaaattactgcagcacaggcattatctaaagctatatgcgaaatgtgttttaaactctaaacaggtacaaagctcactaattagtatatattcgtgctgtagtcaattaattcgcatggctgagttctaattcatttccaattcgtttaattgcactttttgtgcgagttagtccacttgtctgtaaatttagtttaatattatgcatatttgtaacaaaattccatttgaaagtaataacttatttcgcttgtaagctatcagctcaaatgcagcttattttgaaactttaaaagatattcacataaggtgcttgatttttattataattggctttgtaaacagaatgctcactgcaatccaaattttaagagcccacctctcccgcaatcgaaggcaatttaatttctgcattttgcagtcagctacttcctctataatcttcaccgcattccatttgctccacttcatttggcggcgacttatttttggcacttagagccaagtttgccatgccatccctcattttggaattcatttggcatttcatttactttgagccaaactttcgcaaatccactttgtaaatattttgaggtggcggaggggcttgggcgggacttgcttgcaagggaagtgcagagtgccatattgcagtcactgccatttccgcttccgctttcccagcttaaactaacacctgcaactgcgaaacgacagatagcgttgggtcacaaaaaccgcgatgctcgcggtgctcaggaataacaaaaactagtaggcggcgtggtaaattaatggttgaactaccagataccctgtacaaaacaaattaggcaaaactctcaaattagagaagggctttcaagaaatactgtgttgaatatgtattaatccatgtatgcatatagagccattctccgtatagtgtaacgctaactttaccaactatatataaatttattatttatagaaaatttaaatgctttccttaaaaatgttctctatttactttttaatgcatgtgtgttttttagttggctacgtgttctatctccaatttgtttcgcatgaataaagtccaccctgttaaccctcgagtaccggagggtgtaaaaaacaaaagtggaaataatcttcagatattacatattatccgggtcttctctgcaccactgctcatccacttcctctcgagttctccaccatctccgtatgaaatccacttaaaaacttttccgcgaatggtgacggaggggaagtttttactgggatgctgcgacatttatttacgtgtgtccgaggcgaaagtttttatgccccaaaaaaatgggggcttctggggtacggtagggtgcggtggggtagggtaggaatggggtagggaatgtggccgggtgaataaaaaatatcacacagtttccgttgactcatcgcactcaccgcaccgtaatcacaatgcccaccgtgagggccgctatcgtgggccaccacgtggcgaagggatccgcctcctcgaacatggtcagcaatcgttccatccttgagtgtatgctttggatgctactgggtgcgcgttaggtcctgcctcactttcttcccctgcaatcgatgaatgaatctgtgactgggtctgcacgacacaaatgttgaacgaaaactgaacggcatccgtagtaataaatatgaatactctttgcgtggtcacccgctgggtgcagcataagtgaatgtatgtacacacgcgtaactacagtggacacttcctaaatgggactacagaaagtgctcaaaaatattgaatagtggaaatctttaaaatacatgcaacgcctcatgaaatgctgttcaatctggatccgatttccttaatcacatttattaagtatttattttttaagcttttttgaagatttaatgatattttatgcctactgtagttttggttttgagtgaccagtaaagagcaaaaactgaaactagcatgcccacttaaacgggagataccctagaataatcatgattgcatatgtattcgattagatttataatatattctcgttttaagaatatgatagttatttatggctgctagttagttctaagtgattgttcctatcgagagatgcctgtttaaatgcgggcttgcgagtggacccgctctcatctgagctccgatttccagagccggcggagaagatgtcgttgacaattgaatttaaatgaccaccccactcggcatcgccgcctattttttcgacccctcaaacgtcaccggcatattttcaatttacataaatgcttgttgcgcggcatacgaaatgagcgctagaacgagaagggaaagtggcgcccccaagctcctcattttcctggccctcgtttgatttttccgagtttgccacctgtcgttgtggctctgaaggttaggtgcaaatttgcacaagccgcaatatacaagaacgtgagagggtcggaaaatgctgctcgctatttacacacgttttccattttttaatttgtgtttttacttcgcttttc

SEQ ID NO: 15767 - DNA, 819 bp, DROSOPHILA
atggaacgattgctgaccatgttcgaggaggcggatcccttcgccacgtggtggcccacgatagcggccctcacggtgggcattgtgattacggtgcggaccttaatgagcggccagcgctgtccgaacgataatcaaatcaaggagcaaatcgtggtggtcaccggcggcaacagcggcattggcttcgaaatagcccaggctctggctggccgaggtggccggataatcctcgcctgccgcaatctcgaggccgggaagcgggcggcggccataatcaaacgtgagctgggctgccgcacacccctgaattccttggatgaggatgacaatccggaggacaggtacttcgtggaggcacgctacttggacctctgttcgctgcgcagtgtccatcactttgccggccagctgatggcggaattcgagcggatcgatgtgctggtgaacaatgccggagtggtattcgccaacactcagatgcccaccgaggatggcttcgaacggcacagccaggtgaactatctggcccccttcctgttgacccacctgctcctgccacacttgcaacgctcggagcaaggacgcatcctcttcgtttccgcccatgcccatcagggcgccaaaatcgatttcgacgatcccctgaatgtgggcacctggtcggtgaagttccacgcccgcgaagcatttgcccactccaagctctgcgtgctccttgccacccgttggatggccagggaactgaaaggtacctcggtcacggtcaactgctgtacgccaggactcgtccgtggaacccgccattttcgcaagtaa

SEQ ID NO: 15768 - protein, 266 aa, DROSOPHILA
MFEEADPFATWWPTIAALTVGIVITVRTLMSGQRCPNDNQIKEQIVVVTGGNSGIGFEIAQALAGRGGRIILACRNLEAGKRAAAIIKRELGCRTPLNSLDEDDNPEDRYFVEARYLDLCSLRSVHHFAGQLMAEFERIDVLVNNAGVVFANTQMPTEDGFERHSQVNYLAPFLLTHLLLPHLQRSEQGRILFVSAHAHQGAKIDFDDPLNVGTWSVKFHAREAFAHSKLCVLLATRWMARELKGTSVTVNCCTPGLVRGTRHFRK

SEQ ID NO: 15769 - DNA, 4642 bp, DROSOPHILA
aaatctgctaaatgaggtacaaatattttggggaaaatctacgtccagagcagatcatagattcatcagccatccaacgagcgttttcagtgtcggcatctccagatgatttgggacatgcagaggatatcctgtcaccgaaactggatcggctgaagctgtggcgcaataaaatgaaaatctccgctcgattcctcgcagctttaatgtttcatttgcctcttgaggaccacttcccaccagaagaaaatgcgccggcagcagaacgagcgggagagcaagctatttgcctcctgttctcactaccacgggaaatttgggctattggaggaagtcgtaaagaacgtgaatagctacatggttcattggaccaagcacgacgatagcctgcccttcgattgttccagatgccaagcgacacaaggagctccacaccgagcacaagagatctccaaatgattgcaatcgaaatcagtcgtaatggaatgtaggtaaaagcacctaatttaattggattatcaccatggtgtgccatggaaccattcaaaacatatacttacacttatcacaccatttgcgattaatcaccaccggatataaggcactcggtacttcctaaatataaaagcactacatcacgaccgattggctatatctccatgggctggtcaaggccctgacttgctccagttacccagaaattgccaaagtccaagtcggcagcatacagtagcgatacgagtgttggatatatacatatatcgtgtgcataggagaatagcaactcctccagtggatttcacacataatcgtcaattctgtgacagccagttatattcgtatatacatgtgtgcagagagtgctttggcatttgtttggttctccggctatcttatctggagtgtcggagtggcctgcgagtgtggaactattggaattgcgataagcgcccacagaattccaaacgctcgtcccagctagtcagttgaaagcggagctgcctgcgaattatccactatccgtgaccgaccggcaatcgcgcctctgatactgcgtcatccgagcgcgccaaggaaaagtttgataatccgaggaaaacacagaatcggaagacccacaagtgattcgtggtcaactggtgtacaaggtgtggctgctgttgcagttgcaacttcattgggcaacattatacgattcggcaggaagaggttcttgaaaagcggaagagttgggtggttaccacagtgggcactggctaaggagtatggcttccattgagaagctgcactttatatagggatttactacagtttatctaattgtatcttatattcatatattttcatatatatttcaatattgaatatttcaagtaaacataatttgtaattcccagggctcactgtgcatttgctatctgaacttaaattcaatggtcataaactaattataaacccgattatttctttttgcacagttcctacacttgacgtcactgggaaacgggtggagaagcaggagacgaagggaagggctctccctccactggtcagctgcttcactggcgcggcggcgataagcccaagtgcagccaatcgagaagaagccagagtggaaagggtgttgcgaacaacccgatagcgccaagcccagcatcatgcagacgacgacaagtcagcggccagtaacgcctggcactccagactcggcgcatatcgtaatcggcgccgcgggattcgtggcacacgagagacgccagcccggaaagaccctgatgaattgctttcgcgatcgctccacgacgtcgtcgtcatcgtcgcaggcccaacacgcctatgtgcgcggccacagcgtcacctcgagcactctgtttcgcctggagggcagtggtggctccaattgcaccttggacaaggcgggcaagcaggataccgggcggcccgaggcggtcgtcctactcagagagctgaaaaccagacccaacaagctggctctgctcaagagcagcagcagcaaggatctgacccgcctgttcctggacgattcaaccaacacagccgtgctggtgtccaacaccagtatagatgtctgctcctcaaattccagctctggcggcagtccggcggtgggcaggtccaagtccggcagggatcgccgcaatggactggagtgctgcagcagctgctccaagcgttggcacgatctcaagcagcgtatgcacactctggagcaggatctgctcgtccagaccacatacagccaagagctggagcagaaggtgggcgagatgagtcgccagttgacggaactgcttcaggaacgcgacagggagagggataaggataaggcgcgctttgcagccgcaggcggcgttgctgcgcctggcaagcggactgctcacggcagtcccaatgtccgaccctcgcgcctggtggcctggatgaacctgtccaactggttcaagagcagacccagcgtggaaacgctgcgggaacagcgcatcttcttcgacgagccctgcttcgatacggaactggagatggtcctcaagcacgaccagcaccgcactgtgccgcgcatcgttgtggattgctgcgatctaatcgagcaaaagtaccgcagatctacgcagcccatcgagggcatctatcggcagtgcggcgactacaataaaatccaaacgctgcgcttcagcatcgacgccaacgactacgattcactgcgtcagccggacgtcgatatacacacgttgaccggtgtgcttaagctcttcctgcgcgaaatcaagagtccgttggtcagggtcaacgaggccaagaccttcattggacagcccaatcagtggtgtaagttcggaaggtattcttcttcaagtgcccacttctaattcttcctttcctacgcgcagtgttaaccgatctgtctgcgaagttggactccctgaaaagactgattcgttcgctgccggagagcaaccgggacaccatggactacatcttcggtcacttcaataggttagagagcctcgcgtagtactacaatatacatatgtatcggtaactaatatacatttgaatttgcagaataaccaaggtgccgctgcagcagatcagcgctgaaacgctgtccatatcggtgacgccgtcgatctttcacacggtgccacagggcgtccacatgcaggacatccagcaacttttgcgcgagggcgaaacgctggccgactgcgtcaagctgatgatcgagtaccaggggcgcatattcgagtaagtgcgagccccgctgaggaggaacagccccagtctcccaggtgatggtccatttggtgtccgggcgcccgccgctactgttacccacaaaacccgaatcccagccgcttacgtctcatccaaaccgctcacctactgtgccgttgtgtcgaacgctttgctaaccactcgaaatccgaaatcctcaacccgaaaccgaacaccccactgtacctgccacacctctatacccattcccgattcgctcccgaatctgtttccaatcccgatcacatcgtctacagatgcaccgccgatcgccgccgcctgagcatgcgcaacctaaagaagactctgtcgcagccggacctgctctttcacaatctattctgagctggcccaatgacatccaatggatccttcatcccagagagagcactgtacatatatggaatgactttacgccccgctagcaattgtgtcctaagattactttttatattcttactttatcaactaacttttgtacttatgtttactaatataaacactaaaactaattgttttctcaatttgatatctttaataattatttaaactgactaatgctcagatgctcttacgaattcccaggaagtccagagccacgtttgtcccaaagctcttctgccgctgaatcatcaaaaaagaagactcgatattgtattttcagtggcgtatatatatttttttcttgtatttgaactgctatataacatggtggggtattttttggaggaagaggggcgaaaaggagctgggaatgcggatgacggggacggaggcagctgggaagaatctatgattttgcaatacagtctaatcgtcactagagctaatatgtaatagatatatgtttttaaaaaccaactggttttaagtgctatgtggcctataaacgtgtatatatatatatatattagatatatgcttgtatgtactaggtttatattagctttagtccgcattctggactttattcaacattaacataggtgtatacacatgtatgtacatgtatcttatgcgtcggcctttcgaaatacatatgcgaatgagccatctgatgtagcgcctttaaattaatgacaaaacattgcgctcgctcctttgatcacaatttgatttggggttaatcgatgcatgtatgtatatgaatgatatctatgatgtaaataggtaggattctgattcggttgctttccaatgaggggttctacgaaactgaggtgtttgattgctcgggcgagcatccaaattagatacatatcgaaggcacaggaatattacacacattttactctaaggggccggggtcctcagaacttaataccaactgaataactactgggtt

SEQ ID NO: 15770 - DNA, 2404 bp, DROSOPHILA
gcctgcgaattatccactatccgtgaccgaccggcaatcgcgcctctgatactgcgtcatccgagcgcgccaaggaaaagtttgataatccgaggaaaacacagaatcggaagacccacaagtgattcgtggtcaactggtgtacaaggtgtggctgctgttgcagttgcaacttcattgggcaacattatacgattcggcaggaagaggttcttgaaaagcggaagagttgggtggttaccacagtgggcactggctaaggagtatggcttccattgagaagctgcactttatatagggatttactacagtttatctaattgtatcttatattcatatattttcatatatatttcaatattgaatatttcaagtaaacataatttgtaattcccagggctcactgtgcatttgctatctgaacttaaattcaatggtcataaactaattataaacccgattatttctttttgcacagttcctacacttgacgtcactgggaaacgggtggagaagcaggagacgaagggaagggctctccctccactggtcagctgcttcactggcgcggcggcgataagcccaagtgcagccaatcgagaagaagccagagtggaaagggtgttgcgaacaacccgatagcgccaagcccagcatcatgcagacgacgacaagtcagcggccagtaacgcctggcactccagactcggcgcatatcgtaatcggcgccgcgggattcgtggcacacgagagacgccagcccggaaagaccctgatgaattgctttcgcgatcgctccacgacgtcgtcgtcatcgtcgcaggcccaacacgcctatgtgcgcggccacagcgtcacctcgagcactctgtttcgcctggagggcagtggtggctccaattgcaccttggacaaggcgggcaagcaggataccgggcggcccgaggcggtcgtcctactcagagagctgaaaaccagacccaacaagctggctctgctcaagagcagcagcagcaaggatctgacccgcctgttcctggacgattcaaccaacacagccgtgctggtgtccaacaccagtatagatgtctgctcctcaaattccagctctggcggcagtccggcggtgggcaggtccaagtccggcagggatcgccgcaatggactggagtgctgcagcagctgctccaagcgttggcacgatctcaagcagcgtatgcacactctggagcaggatctgctcgtccagaccacatacagccaagagctggagcagaaggtgggcgagatgagtcgccagttgacggaactgcttcaggaacgcgacagggagagggataaggataaggcgcgctttgcagccgcaggcggcgttgctgcgcctggcaagcggactgctcacggcagtcccaatgtccgaccctcgcgcctggtggcctggatgaacctgtccaactggttcaagagcagacccagcgtggaaacgctgcgggaacagcgcatcttcttcgacgagccctgcttcgatacggaactggagatggtcctcaagcacgaccagcaccgcactgtgccgcgcatcgttgtggattgctgcgatctaatcgagcaaaagtaccgcagatctacgcagcccatcgagggcatctatcggcagtgcggcgactacaataaaatccaaacgctgcgcttcagcatcgacgccaacgactacgattcactgcgtcagccggacgtcgatatacacacgttgaccggtgtgcttaagctcttcctgcgcgaaatcaagagtccgttggtcagggtcaacgaggccaagaccttcattggacagcccaatcagtggttgttaaccgatctgtctgcgaagttggactccctgaaaagactgattcgttcgctgccggagagcaaccgggacaccatggactacatcttcggtcacttcaatagaataaccaaggtgccgctgcagcagatcagcgctgaaacgctgtccatatcggtgacgccgtcgatctttcacacggtgccacagggcgtccacatgcaggacatccagcaacttttgcgcgagggcgaaacgctggccgactgcgtcaagctgatgatcgagtaccaggggcgcatattcgaccgcttacgtctcatccaaaccgctcacctactgtgccgttgtgtcgaacgctttgctaaccactcgaaatccgaaatcctcaacccgaaaccgaacaccccactgtacctgccacacctctatacccattcccgattcgctcccgaatctgtttccaatcccgatcacatcgtctacagatgcaccgccgatcgccgccgcctgagcatgcgcaacctaaagaagactctgtcgcagccggacctgctctttcacaatctattctga

SEQ ID NO: 15771 - protein, 581 aa, DROSOPHILA
MQTTTSQRPVTPGTPDSAHIVIGAAGFVAHERRQPGKTLMNCFRDRSTTSSSSSQAQHAYVRGHSVTSSTLFRLEGSGGSNCTLDKAGKQDTGRPEAVVLLRELKTRPNKLALLKSSSSKDLTRLFLDDSTNTAVLVSNTSIDVCSSNSSSGGSPAVGRSKSGRDRRNGLECCSSCSKRWHDLKQRMHTLEQDLLVQTTYSQELEQKVGEMSRQLTELLQERDRERDKDKARFAAAGGVAAPGKRTAHGSPNVRPSRLVAWMNLSNWFKSRPSVETLREQRIFFDEPCFDTELEMVLKHDQHRTVPRIVVDCCDLIEQKYRRSTQPIEGIYRQCGDYNKIQTLRFSIDANDYDSLRQPDVDIHTLTGVLKLFLREIKSPLVRVNEAKTFIGQPNQWLLTDLSAKLDSLKRLIRSLPESNRDTMDYIFGHFNRITKVPLQQISAETLSISVTPSIFHTVPQGVHMQDIQQLLREGETLADCVKLMIEYQGRIFDRLRLIQTAHLLCRCVERFANHSKSEILNPKPNTPLYLPHLYTHSRFAPESVSNPDHIVYRCTADRRRLSMRNLKKTLSQPDLLFHNLF

SEQ ID NO: 15772 - DNA, 2783 bp, DROSOPHILA
acccactgggttggcaacggtaactttatcaagcactcatccgccgatattgccctcatccgcattccccacgtggacttctggcacatggtgaacaaggtggagctgcccagctacaacgatcgctacaacgactacaacgaatggtgggctgttgcctgcggctggggaggcacctatgacggcagcccactgcccgactacctgcagtgtgtcgatctccagatcatccacaactccgagtgctccggatactatggaagcgtgggagacaacatcctctgtgtcaggactcccgacggcaagtccacctgcggtggtgactccggcggccccctggtcacccatgacggtaccaagcttgtgggggtcaccaactttggttccgtcgccggctgccagtcgggtgctcccgctggattccagcgtgtcacctaccacctggactggattcgcgaccataccggcattgcttactactaatcgactatatctgattaaaaaaaaacttcttgaagcgtaaatttaaatttttgtactttactcggagtattactgtggacatgacggcttttatttttagttagtattcaatattaaatttaagaataatatttacggattgtttgaaaattacatttttaaatggtatataaagtgctcatggactataatgtgattctacagagtctttaaacatattatatatatatgttaaggttgtgtcatttaaattatatagatgtggtcttttataggtaaagaaagatcttagatcttataatgggattgctcttaagtcttagttgcggttttttgttttacaggatgtgtagtaacaggattaaaacgattggggattcttaaagcttgctgaaatacttaaaattatttcaataatattattatttcaatgatattaatgaccaaattcaacccatagttataaaacaatttaaatttgcactttaaatatttttattcaatcgaaaatcgttgcttagtagtaagcaatgccggtgtggtcacggatccagtccaagtggtaggtcacacgctggaagccagcggggtggccagcctggcaaccggctcccgacacccagttggtgactcccacaagcttgctgccgtcatgggtgaccagaggaccgccggagtcgccaccgcaggtgcccttgccatcgaccacgcgcacgcagatgatgttgtcgccgacggtgccggttccgtagtagctggcgcactcggagttgtggatgatctggagatcgacacactgcaggtagtcgggcagtgggctgccgtcataggtgcctccccagccgcaggcaacagcccaccattcgttgtagtcgttgtagcgatcgttgtagctgggcagctccaccttgttcaccatgtgccagaagtccacgtggggaatgcggatgagggcgatgtcagcagatccgtgggtgatgaagttgccgcttccaacccagtgggtgaactgggcgttggtgcgccaggttgctccgaagtagacagtcactgcatcacctccgatgcagtgctcggcggtgaggacccactcgttggagatgatggagccaccgcaccaccagccgccgctgaaacccagaccgacggtgtagggagccttgccctcctcagccggatagccgttggtgatgcgaccctcgatcttggccaccttggacagatccttggggtgcacgacgctctcgtacgccgaggcggaggccacggccaaagccagaatagttaggaacaccttcatgttgcagaaacaacttggtctgctttagtttcgacgcggcttttatagctgcagacatcgcaagcatttgcaactgattatattctcaattgagaggtgtcctaaatcaatgctcaattatcgcggttcctgtttgccatgtacttgtgatcgacgtttcgatttactgaagtcatcgtcataactatatgacaattgattagggaattatcattagaagtgtagcctagaaataggcttttttcgttttaaatatgttattttagcatttagatgcttaagagttaaagttattaacttttattgcgaaaaccaatttattttatttccttgccattttattccaaaaacaaacccccaaatgaaaacatgttggttttttttttcaatagttttctaaaaatatatttttttattattgtttaattttttttttagttttactgtgatgcgtcttgactgtgagaaaagtgtgtgagtgtctctcacacgcacgtacatataataaactatataggggatatgatcggattgtttatgttggatactctatgtttcatttcattataggcattgtcgtttatcatgtacatcgaacacgtttactcttatttacaaaatattaatcgataaaaatgcatcatttcatggttttcgttttcgtttttgtttcgtttttttttttttcggttactggtttgcctggccaataatttaaataaattaaaaaattgcataaaactaagctaaatgaagaattcatttcgagtgtttttcagtgtctgtttgtgggggagggggtataaataaatagttttgatggtttagatgagtagaataaatagtcgaaatgggggcgaagtgtgggtggggtggtggtgtgtcctttgtggcgtgtggtgtcatatgtggattggggttgtgcccagtggctcaattgacaaacatcactggctcaaagggaatctgggaaaaccccctttgatagcaaggtggcaat

SEQ ID NO: 15773 - DNA, 783 bp, DROSOPHILA
atgaaggtgttcctaactattctggctttggccgtggcctccgcctcggcgtacgagagcgtcgtgcaccccaaggatctgtccaaggtggccaagatcgagggtcgcatcaccaacggctatccggctgaggagggcaaggctccctacaccgtcggtctgggtttcagcggcggctggtggtgcggtggctccatcatctccaacgagtgggtcctcaccgccgagcactgcatcggaggtgatgcagtgactgtctacttcggagcaacctggcgcaccaacgcccagttcacccactgggttggaagcggcaacttcatcacccacggatctgctgacatcgccctcatccgcattccccacgtggacttctggcacatggtgaacaaggtggagctgcccagctacaacgatcgctacaacgactacaacgaatggtgggctgttgcctgcggctggggaggcacctatgacggcagcccactgcccgactacctgcagtgtgtcgatctccagatcatccacaactccgagtgcgccagctactacggaaccggcaccgtcggcgacaacatcatctgcgtgcgcgtggtcgatggcaagggcacctgcggtggcgactccggcggtcctctggtcacccatgacggcagcaagcttgtgggagtcaccaactgggtgtcgggagccggttgccaggctggccaccccgctggcttccagcgtgtgacctaccacttggactggatccgtgaccacaccggcattgcttactactaa

SEQ ID NO: 15774 - protein, 260 aa, DROSOPHILA
MKVFLTILALAVASASAYESVVHPKDLSKVAKIEGRITNGYPAEEGKAPYTVGLGFSGGWWCGGSIISNEWVLTAEHCIGGDAVTVYFGATWRTNAQFTHWVGSGNFITHGSADIALIRIPHVDFWHMVNKVELPSYNDRYNDYNEWWAVACGWGGTYDGSPLPDYLQCVDLQIIHNSECASYYGTGTVGDNIICVRVVDGKGTCGGDSGGPLVTHDGSKLVGVTNWVSGAGCQAGHPAGFQRVTYHLDWIRDHTGIAYY

SEQ ID NO: 15775 - DNA, 11313 bp, DROSOPHILA
aagcgagctttttgcacttgtcttggatttaaatattgtaacgaaaaacgtataaacacaatcaggcagcgaagaaaagctctcttctgagatagttaaaaaaataacattataattgcactaatttttcacaccaaactatgatcgcattttccccggcgatttatgtatttttggatatttcgagtgcgaatggggagcccagcgacccgagcagttggagattccggaaagttgtgagttaattgttcatctcggttcattttgctagaccagggcttgagaaacacacgaaagtatcgattaaatgctcgatatttttttttgaaatgcgttccgttacttttacattcacctggagtggaaaatgtatacattttttggaccagaaacaaactggtaatttttatgacaagcgaattttaagcattaaaaaggaatttaatcgcattactatttttatttcaaacagctatgatagtaagtgtaatagtaatttaaattaatataatttgttttagcttgatatcttaagaacaatcagagtgcaattccaaaatgtaaataaaatttttgctttatttgaaaaaatattataattcttattttttaacggtacaaaaatacacagcttagcggtgacacgaaccgcgatgtatttgaatataaaagtaaattggattcatagtcttttttctctaaaatttcttaaaatcttttatctgagacaaataaatcatttcggaagtccaattggtttcgttattactagcttctatttctgtattgcattttcgtaagaaaaggaaatttcgaaacaaatttaaagaaagagctctattaaattgtaatatgtttttgaaatgtgttctctttacattcgatttaaaaagtcttcgtctttcgacgactatcgatcctctgttatcgaagcatcgcaaagtatcgagtacggattccccactgaagtttgaaatcattctcgcgagtggatctctcgagagcggacgtttttcgagtcggagccgggtcgagtcgagggccccaacttggaattttctttccgattgacttggaaaatagcttcttcgtcgcgtgcgagtgtgtgtgtgtgtatgtgtgtgcgcgcggtgtggagtttataaaaagaagtcgaaaagtgtttgccgcatcaacgaaaataaaaacacccaagaagagtgtttgttgttttgtctgtataacagaaaactgattttctcaacttcacctctgcacatcgatcaaggactagatatagatgcatcatatgtagccgaattaaagtatctggtaaagtagctgttgatgaatcttaagaaaccgatttacagttagtttttggatccacgcgtagtttttacgcaggtttcaacagctgcagtccccccgtctcgctcactccttctccctgcctattctgtttctgtcttgaggtttatcttgtggcctgtttttgttgttacttcacttgcgtacttctatttccactccttcgcatccgctgccgttgttgtttttgttgtggcacactgcctctttttatcgcctctctgttacgaacagaaaactcaagataactccaaaaaactcgaagggggcaagggcttcaaatgccttttaagatccccaaatcatttaagggatttcgggataattctaaaaaatgaatatattattatctattaaaaattaatattttatattaaggtaacctcttttttagttttgaaaaaataaataatttttacagttctttttagagattttccggttagatttttttcaaatgttaaaagttttttggtcgtactattttaaaatgtagaggggttactattgttagatagttttaatacttaagttatatttcattttcgttatctttctataattcatttgttatagaaagcgtgcaagtgagcatcgatgtcgatctctagattttagcaatatatttctgtttcttctagatattcttatttcagtatctcataaatatctcatgtactgtgggacttttgttaagttcctgataagcttgtttaaaatattttccatcttgtgtctccattttctaatcttttcaaaagttactctactatgtcacagagcagtgctaagaagcatttgaatgcacatctactttggctagggaatttttgtagattaagcatacaaacccgaacatatagaaacatgatgccataacggcaagccaagtgaatgactgcatgtggactaaaaaagtgcattgccaagctgattttctttatttcagcgaccatggagaacgggctaattaaaatgtgagccgggcctgtcgccttgatgcagatgtgcagccgacgaattaatttatctagattggattgcggactgtgggcagaaaggatttagtatttagtcggtgtcttctaattatagccgctctatcgcggtctgatctcatatttagacggtagacttccacaacatgtgtgctccagaccgagaattgaaattcggtgctggggttggaatggtgcatatgtgtacagtgtaaacatacagtggtcagtcgcgaggaaagttttactatgcgaagatattagcttttgaacatcaaagtttcagaacatttctagtgccggatacacatatcatttaagggttttggattgattaaagtcatgtactaacagagccatgtgatttttttttctaaataaaagcatatgtttgaattaaatcattggcatcagtgatgacaattgaatttgaattcccactgtccactgagtgactgcatgaaatcatattttttatttgtatggtcaaataagctctgtgccttgatgaaattggaaatataaacaacgtcgcccggcaaaactaagaaaacatgagccacggcaattgttcgcgcaaatttttatgaactggctatacacagatatgcacgaatataaaatgtatatacagaccgacccctacacttagatacagatatgtacacatccagcgaagtcgagaatcgtggagcgctccagtgctccattatttacccacatacacatatgtacattgtatgaacccatattcttatagtgtatttggcttgtatgtctggtaaatttacgttttgtttctttacttatttgtttatttgccagttttctcggcggcaaaacgaacgaaaatgaaattaaccaacgcacaaatagcaaacaaaaaaaatttaaacacactccaagtaattaagtttggagcggagtcaaaaacttcccatgtgccacagagctccatggaaaaagtgtatctgtgaatgaactcttatcggggcagttgaaattatgaaatatgtattattagactagggagagcagctagctccatgtttgggtctagaaaatgtgttagtcttaaaaacttgggttcttatctcaccggctcgtagctcaatatttgattctcgattttggtggccgatttttccctgccccgtcgaaatcttcatgataagaacataaaggtcatcgaaacattgtgtctaatttctaatatttaatccttacatatagttaaaaaatatttatttatatagatatttatataggtcttaagtctgattctgctcatcttttttggtagagagattctgattccatttctacagcttaaaaacgaaattatacacaaatcacaattcttcaattgtattctgtgcgagaatccctcgtactacaaatgaatactgataaaaacagcgatccaacgcaccaggcaacaacggattatgattatgctataccattatcgggaccttatattgagagtagtcggattgataataggatccattcagtttcagttcaagattcggtttgcgtctcagtttgtgcgtaagattcgttggacgcggatgccttttttttaatggtacgagacgaaaataaatcggttttttttattctgattttgctgtgtagaaaattagagcatctctgttgataagcggtttacagtgatgatagaagcgtgaagtttgtttagagagtaaaattgaaatcaaaggaatattattaattaataaggcaatctgttaatttttcagctacaggactagttggaaaatgccacaatgaataaataaatattttgatcaaaataaggaagagagccgtggttaagtaagtagcaaagcactgtttttaattcatgatctaataatagttggtggaattcacaaatgttaatcactgttaatttggagaagtgatgaaaactgatacttgaatcaccaaccttttttttgataacttttacaaactaaaatgaattttttttagattttcatactgaggatcacgtggacaagtgtaagagatccccttaaaaaacgaacgaaaagaaaagcaactgattaaagtcccggccggaagtgccccagtggaacgcgaccccaacaactgagagccacatcgagatgttggagctgcggcttatcgtggtcattgtgctcgccctgctcagctggcagtgggacccagtggactcccaaagaccgccccagcatggccgacgtgatcgtccgaaatatccaccgaacaagtttatcaagactcatccatgcgagagatcctcctgctacccggcaacgggtaatcttctgatcggccgagaaaaccgcctgactgccagttccacgtgtggtctgcactcgccggagagattctgcatcctgtcccatttgcaggataagaagtgtttcctctgcgacacgcgtgaggagaccaagcatgatccgtacaaaaatcatcgcatcggacagattatatataaaactaagccaggcaccaacatacccacctggtggcagtccgagaatggcaaggaaaatgctaccattcaactggatctggaggcggagtttcactttacccatttgatcataaccttcaccaccttccgaccagcggccatgtacatcgagagatcctttgatttcggacagacgtggcacatctacagatatttcgcctacgactgcaaggaatcctttccgggagtgcccactgtcttggaaaacatcaccgatgtcatgtgcacctcgaggtattccaacgtggagccctcgaggaatggtgaagtgatatttagggtgctgccaccgaacatcaacgttaccgatccctatgcggagcacgtgcagaatcagctgaagatgaccaatctgaggatccagatgacgaagctgcacaagctgggagacaatcttttggatagcaggctggagaacgaggagaagtactattatggcatctccaacatggtggttcgcggatcctgctcctgctatggccacgcctctcagtgtctaccgttggatcccgcattttcccaggcggacaacgaagatggcatggtgcatggccgatgtgagtgtacccacaacaccaagggaatgaattgtgaagagtgcgaggatttcttcaacgatctcccatggaaacccgcttttggaaagaaaacgaatgcctgtaagaaatgtgagtgcaacgatcacgccgttagttgtcacttcgatgaggctgtcttcactgcatccggtttcgtttccggcggagtgtgcgacaattgcttgcacaatactcggggtcagcattgcgaggagtgcatgccgtacttctaccgcgatccagagcaggatataacgtccgaaagggtttgccagccctgtgactgcgatcctcaaggttcgtcggacgacggcatctgtgactccctaaatgaactggaggagggagcagtagcaggtgcctgccattgcaaggcctttgtcacgggacgtcgttgtaatcagtgcaaggatggttactggaatctgcagtcggataaccccgagggctgcgagccgtgcacctgcaaccccctgggtacactgaacaactccggatgcgttatgcgcaccggcgagtgcaagtgtaagaaatatgtgacgggcaaggactgtaaccagtgtatgccggagacctatggtctttcggaatctccggagggttgctctctgtgtaactgcgatgctggtggatcctacgataattactgcgatgtcataagtggtcagtgtcgctgcaggccccacatgacgggtaggtcatgttcgcagccgaagcagaattacttcattcccctgctgcccgaggttcatgaagcagaggtggtggacgagtgcatctcgtatggcgccaacggtaactgcagcctggtggccgaaactcctgatggcagtttcacgggcattggttttaccagggttcctgagaactcggaactggttttcactgtcggagatattcctcgatccatgccatacgatgcggttatacgttaccagagcacttcacgaggagattgggagaacgcctttatcactcttgtcagacccgatcaagtggatcctgaaggaggatgcggtgaactagctgcagcaacttcttcggaaaccaggattccgttctcccttcctgatcgcagccgtcaggtggttgctttgaatgaagtatgcttggaagctggaaaggtttataaattccggatttactttgagcgaaagcgacacgatgtggacagtcccacagcgacgatcttggtggattctcttacgctcattccccgcatcgatgtaacgcccatcttccaaggatccgttctggctgatattcgcaaaaaggattacgaaaaatacaattgcaaatcctctttgtacgatatgaactacaagtcggatcctaaatgtcaaaatctggacaatatcctcagtgtgtttgtccacgatggagccagtatgtgtaattgcaatccaaccggatcgctgagcaaggtgtgcgaatccaatggaggttactgccaatgtaagcccaatgtggtgggcaggcagtgcgatcagtgtgctccgggcacctatggttttggtcccgaaggttgcaaggcttgcgattgcaacagcatcggatcgaaggataaatactgcgacctgataaccggccagtgccagtgtgtgccgaatacatacggcagggagtgtaatcagtgccagccgggctattggaatttccccgagtgcagagtgtgccagtgcaatggtcatgcggccacgtgtgatcccattcaaggaacctgtatagattgtcaggtatgatgatatataatatagacaatatcttgcttgtacttaatgaactttttaaacttgcttctcttatcaccaggactcgaccacgggctatagctgtgacagctgtttagatggatattatggaaacccacttttcggcagtgagatcggatgccgaccatgccgctgcccggagacggtagccagtggcctggcgcacgcagatggctgctccctggacacacggaacaataacatgttgtgccactgccaggagggatattccggctcccgttgcgagatctgtgcggacaacttctttggcaatccggacaacggtggtacctgctccaagtgcgagtgcagcaacaatgtcgatctttatgacactggaaactgtgatcggcagacgggagcttgtctaaagtgcttgtatcagacgactggcgatcactgcgagctctgcaaggatggattctttggggatgcactgcagcagaattgccagcagtgcgaatgcgatttcctcggaacgaataataccatagctcattgcgatcgttttacgggtcagtgcccctgcttgccgaatgtccagggtgtgcgttgtgatcagtgtgccgagaaccactggaagattgcctctggcgagggttgtgaaagctgcaactgcgatccaattggagcactccatgaacagtgtaattcctacacggggcaatgccaatgcaagccaggatttggcggcagagcgtgtaatcagtgccaggctcattactggggcaatcccaacgagaagtgccagccgtgcgagtgcgatcagtttggagctgctgacttccagtgcgaccgggagacgggtaattgcgtctgtcacgagggaattgggggctacaagtgcaacgagtgcgccaggggctatattgggcagtttccacactgctcaccttgtggcgaatgcttcaacaactgggatttgattttgagtgctctggaggatgccacaactgccactatcctacgagccaaggaaatcaagcaagtgggagcgacaggagcctacacgtccgagttcagtgaactggataagaaattgcagcacattaggaatctgctgcagaacacctcggtcagtctggttgatatagagaaactggactatgaaacccaatcacttagggaccaacttcaggcgtcccatggccgattaagtgaaaccgagcaaaacctggatgacatttacaattcgctaagtttgtcgggcgttgagctagagagcctacaaaatcactccagattggtgcaacaactgtccaaggaactgaaggaaaacggcatacaactgcaggagtcaaatatcgagggagctttgaacctcacacgtcacgcctacgaaagagtcagcaatttgtcgacccttaaagacgaggccaatgaacttgcatcgaacaccgataggaattgcaagagagtggaaaatctgtctaataagattcaggccgaagccgatgacctggcaaacaataacaagctcattgaagactaccgagcagagttgacttcgctaacctcccaaattcccgagctgaacaatcaggtttgcggcaagccaggtgatccctgtgatagtttgtgcggaggtgctggctgcggtcattgtggcggtttcctgtcctgcgaacatggcgccaaaacccattcggaggaagcccttaaggtggccaaggatgctgagacggccattaccagcaagaaggatcaggcggaccaaaccatcagggctctgacccaggccaaactgaatgcctccgaggcatatgagaaggccaagaggggtttcgaacaatccgagcgttatctgaaccaaaccaatgccaatatcaagctggccgaaaacctattcatagccctcaacaatttccaggagaacaagacagcttctccttcggagagcaaagaactggcacagaaaactctcgacttggacctgaaactggaacccgaagagattgagaccctcggcgaccaaatcaacagggctgtctcatcgctaaagaatgttgaagccataatctacaggaccaaacccgatttggacagggtcaataatctgcagagcattgccaatgccaccaaggagaaggccgataagatcctggactctgccaattcggtcgtggagagcctggcggcggcagatgaatcccagggtaaagccaaggatgccattcagcaggcgaacagtaacattgagttggccggtcaggatctggagaagatcgatgaggaaacgtattccgccgaagctccggccaataacacagcacagcaggttgagaaattggccaagaaagtgcagaaactgcagaataacataatgaagaacgatcgggatgccaaggagataaccaaggaagcgggtagcgtcaaactggaggccatgagggctcgcggagaggccaataatcttcagtctgccacaagtgccaccaatcagaccctcaccgatcgcgccagtcgctccgaaaatgccagggaaagggccaagcagctgctccagagggcctccaaactaacagtcgatacgaacgccaagctaaaggatctgaacgatctgcagaccgtctatctgaacaagaaccaacaactactgcgattgcaggccgagatcggccccttgaacaaggagctcaacgagcacctgattcacatcaaggagcgggggtcgcactacaggcagtgctatacgtagattgggaaacgtaagtaatgcagttttaatactattacaagcaaataactaaaatcagtaatattttttagatccatttgcgtggccatctaaattgccatattcatgaacaaataagcaaattgcgaaatacgagaatcaagtaaagaactacaagaacaactaggaaggcgacagttattatgtaaccactgttaagttaccgttacgttttgtactctaagcgaaaaccaacactgcaatgttaattttaaaaattgagcgaaagaaatcgatgccttcacttttaatgtgtacacactgagctaagtttttcttatactatccctataccattttgtaatgcaattaatgtaattaaataaaactacttaaatgtggaaatgtctagcatttgtttgggctcgatcgggagaggaatgagataatggtcatttaaatggagagcgacaggtgagagtatttttgcaacacagttctatttcccaacaataaatctttttcgctgaacaaatgcaactacttttaagtataataacagaaatatattatttacaaacgttgaataaaacaatattaataacgttggaaatgaagcctaaaagcttaatatagataaaaagtatttaaacagaagtttgttggagttcaaatatatacaaaaattcggcttatgctattttcactgtacttcgatttctatactattgtatacttatgctgccataaacattgccaatttattccattttccgttttgttttagttcttctgcgcgtcgcgtgcggcttgtttttgtttttaattttcgtccaaataattttccacatttttttttcgggggccagaggttcttttaaaaccggaagttgttacgaatggatcaccgttacagaagatcgttaaggagctcagcaggtatttaataacaattaaaaaattaataatgcagttggcacagttgcagagaagcccacttcaagcacaaaggtcaaggtaatgcaaaaaatgcaaaagtgcttgaaatcatgcaatttctagttatccctgcctgctcgaaaatcactaaagttttgcatgaaaagagtacccctgctggctatcgataagagttatcgcttcggcccctatcgatatttcaaaagttcatcaatttcagctgaaatctcaacaagtgcaagtttcgagctctgttttaattaaacacagacgtgtcgccgaacaagtcggcattgtttggatcggttttcaggttgcagtgcgtgaaaatatatatatattttttatttatttattgcgacatccgtgcggccactcacacacacaggcgcgattgacagatgtgcgacgtgcatacgtataaagagcacacactcgcacacac

SEQ ID NO: 15776 - DNA, 6214 bp, DROSOPHILA
agagcggacgtttttcgagtcggagccgggtcgagtcgagggccccaacttggaattttctttccgattgacttggaaaatagcttcttcgtcgcgtgcgagtgtgtgtgtgtgtatgtgtgtgcgcgcggtgtggagtttataaaaagaagtcgaaaagtgtttgccgcatcaacgaaaataaaaacacccaagaagagtgtttgttgttttgtctgtataacagaaaactgattttctcaacttcacctctgcacatcgatcaaggactagatatagatgcatcatatgtagccgaattaaagtatctgctacaggactagttggaaaatgccacaatgaataaataaatattttgatcaaaataaggaagagagccgtggttaaattttcatactgaggatcacgtggacaagtgtaagagatccccttaaaaaacgaacgaaaagaaaagcaactgattaaagtcccggccggaagtgccccagtggaacgcgaccccaacaactgagagccacatcgagatgttggagctgcggcttatcgtggtcattgtgctcgccctgctcagctggcagtgggacccagtggactcccaaagaccgccccagcatggccgacgtgatcgtccgaaatatccaccgaacaagtttatcaagactcatccatgcgagagatcctcctgctacccggcaacgggtaatcttctgatcggccgagaaaaccgcctgactgccagttccacgtgtggtctgcactcgccggagagattctgcatcctgtcccatttgcaggataagaagtgtttcctctgcgacacgcgtgaggagaccaagcatgatccgtacaaaaatcatcgcatcggacagattatatataaaactaagccaggcaccaacatacccacctggtggcagtccgagaatggcaaggaaaatgctaccattcaactggatctggaggcggagtttcactttacccatttgatcataaccttcaccaccttccgaccagcggccatgtacatcgagagatcctttgatttcggacagacgtggcacatctacagatatttcgcctacgactgcaaggaatcctttccgggagtgcccactgtcttggaaaacatcaccgatgtcatgtgcacctcgaggtattccaacgtggagccctcgaggaatggtgaagtgatatttagggtgctgccaccgaacatcaacgttaccgatccctatgcggagcacgtgcagaatcagctgaagatgaccaatctgaggatccagatgacgaagctgcacaagctgggagacaatcttttggatagcaggctggagaacgaggagaagtactattatggcatctccaacatggtggttcgcggatcctgctcctgctatggccacgcctctcagtgtctaccgttggatcccgcattttcccaggcggacaacgaagatggcatggtgcatggccgatgtgagtgtacccacaacaccaagggaatgaattgtgaagagtgcgaggatttcttcaacgatctcccatggaaacccgcttttggaaagaaaacgaatgcctgtaagaaatgtgagtgcaacgatcacgccgttagttgtcacttcgatgaggctgtcttcactgcatccggtttcgtttccggcggagtgtgcgacaattgcttgcacaatactcggggtcagcattgcgaggagtgcatgccgtacttctaccgcgatccagagcaggatataacgtccgaaagggtttgccagccctgtgactgcgatcctcaaggttcgtcggacgacggcatctgtgactccctaaatgaactggaggagggagcagtagcaggtgcctgccattgcaaggcctttgtcacgggacgtcgttgtaatcagtgcaaggatggttactggaatctgcagtcggataaccccgagggctgcgagccgtgcacctgcaaccccctgggtacactgaacaactccggatgcgttatgcgcaccggcgagtgcaagtgtaagaaatatgtgacgggcaaggactgtaaccagtgtatgccggagacctatggtctttcggaatctccggagggttgctctctgtgtaactgcgatgctggtggatcctacgataattactgcgatgtcataagtggtcagtgtcgctgcaggccccacatgacgggtaggtcatgttcgcagccgaagcagaattacttcattcccctgctgcccgaggttcatgaagcagaggtggtggacgagtgcatctcgtatggcgccaacggtaactgcagcctggtggccgaaactcctgatggcagtttcacgggcattggttttaccagggttcctgagaactcggaactggttttcactgtcggagatattcctcgatccatgccatacgatgcggttatacgttaccagagcacttcacgaggagattgggagaacgcctttatcactcttgtcagacccgatcaagtggatcctgaaggaggatgcggtgaactagctgcagcaacttcttcggaaaccaggattccgttctcccttcctgatcgcagccgtcaggtggttgctttgaatgaagtatgcttggaagctggaaaggtttataaattccggatttactttgagcgaaagcgacacgatgtggacagtcccacagcgacgatcttggtggattctcttacgctcattccccgcatcgatgtaacgcccatcttccaaggatccgttctggctgatattcgcaaaaaggattacgaaaaatacaattgcaaatcctctttgtacgatatgaactacaagtcggatcctaaatgtcaaaatctggacaatatcctcagtgtgtttgtccacgatggagccagtatgtgtaattgcaatccaaccggatcgctgagcaaggtgtgcgaatccaatggaggttactgccaatgtaagcccaatgtggtgggcaggcagtgcgatcagtgtgctccgggcacctatggttttggtcccgaaggttgcaaggcttgcgattgcaacagcatcggatcgaaggataaatactgcgacctgataaccggccagtgccagtgtgtgccgaatacatacggcagggagtgtaatcagtgccagccgggctattggaatttccccgagtgcagagtgtgccagtgcaatggtcatgcggccacgtgtgatcccattcaaggaacctgtatagattgtcaggactcgaccacgggctatagctgtgacagctgtttagatggatattatggaaacccacttttcggcagtgagatcggatgccgaccatgccgctgcccggagacggtagccagtggcctggcgcacgcagatggctgctccctggacacacggaacaataacatgttgtgccactgccaggagggatattccggctcccgttgcgagatctgtgcggacaacttctttggcaatccggacaacggtggtacctgctccaagtgcgagtgcagcaacaatgtcgatctttatgacactggaaactgtgatcggcagacgggagcttgtctaaagtgcttgtatcagacgactggcgatcactgcgagctctgcaaggatggattctttggggatgcactgcagcagaattgccagcagtgcgaatgcgatttcctcggaacgaataataccatagctcattgcgatcgttttacgggtcagtgcccctgcttgccgaatgtccagggtgtgcgttgtgatcagtgtgccgagaaccactggaagattgcctctggcgagggttgtgaaagctgcaactgcgatccaattggagcactccatgaacagtgtaattcctacacggggcaatgccaatgcaagccaggatttggcggcagagcgtgtaatcagtgccaggctcattactggggcaatcccaacgagaagtgccagccgtgcgagtgcgatcagtttggagctgctgacttccagtgcgaccgggagacgggtaattgcgtctgtcacgagggaattgggggctacaagtgcaacgagtgcgccaggggctatattgggcagtttccacactgctcaccttgtggcgaatgcttcaacaactgggatttgattttgagtgctctggaggatgccacaactgccactatcctacgagccaaggaaatcaagcaagtgggagcgacaggagcctacacgtccgagttcagtgaactggataagaaattgcagcacattaggaatctgctgcagaacacctcggtcagtctggttgatatagagaaactggactatgaaacccaatcacttagggaccaacttcaggcgtcccatggccgattaagtgaaaccgagcaaaacctggatgacatttacaattcgctaagtttgtcgggcgttgagctagagagcctacaaaatcactccagattggtgcaacaactgtccaaggaactgaaggaaaacggcatacaactgcaggagtcaaatatcgagggagctttgaacctcacacgtcacgcctacgaaagagtcagcaatttgtcgacccttaaagacgaggccaatgaacttgcatcgaacaccgataggaattgcaagagagtggaaaatctgtctaataagattcaggccgaagccgatgacctggcaaacaataacaagctcattgaagactaccgagcagagttgacttcgctaacctcccaaattcccgagctgaacaatcaggtttgcggcaagccaggtgatccctgtgatagtttgtgcggaggtgctggctgcggtcattgtggcggtttcctgtcctgcgaacatggcgccaaaacccattcggaggaagcccttaaggtggccaaggatgctgagacggccattaccagcaagaaggatcaggcggaccaaaccatcagggctctgacccaggccaaactgaatgcctccgaggcatatgagaaggccaagaggggtttcgaacaatccgagcgttatctgaaccaaaccaatgccaatatcaagctggccgaaaacctattcatagccctcaacaatttccaggagaacaagacagcttctccttcggagagcaaagaactggcacagaaaactctcgacttggacctgaaactggaacccgaagagattgagaccctcggcgaccaaatcaacagggctgtctcatcgctaaagaatgttgaagccataatctacaggaccaaacccgatttggacagggtcaataatctgcagagcattgccaatgccaccaaggagaaggccgataagatcctggactctgccaattcggtcgtggagagcctggcggcggcagatgaatcccagggtaaagccaaggatgccattcagcaggcgaacagtaacattgagttggccggtcaggatctggagaagatcgatgaggaaacgtattccgccgaagctccggccaataacacagcacagcaggttgagaaattggccaagaaagtgcagaaactgcagaataacataatgaagaacgatcgggatgccaaggagataaccaaggaagcgggtagcgtcaaactggaggccatgagggctcgcggagaggccaataatcttcagtctgccacaagtgccaccaatcagaccctcaccgatcgcgccagtcgctccgaaaatgccagggaaagggccaagcagctgctccagagggcctccaaactaacagtcgatacgaacgccaagctaaaggatctgaacgatctgcagaccgtctatctgaacaagaaccaacaactactgcgattgcaggccgagatcggccccttgaacaaggagctcaacgagcacctgattcacatcaaggagcgggggtcgcactacaggcagtgctatacgtagattgggaaacatccatttgcgtggccatctaaattgccatattcatgaacaaataagcaaattgcgaaatacgagaatcaagtaaagaactacaagaacaactaggaaggcgacagttattatgtaaccactgttaagttaccgttacgttttgtactctaagcgaaaaccaacactgcaatgttaattttaaaaattgagcgaaagaaatcgatgccttcacttttaatgtgtacacactgagctaagtttttcttatactatccctataccattttgtaatgcaattaatgtaattaaataaaactacttaaatgtggaaa

SEQ ID NO: 15777 - protein, 1788 aa, DROSOPHILA
MLELRLIVVIVLALLSWQWDPVDSQRPPQHGRRDRPKYPPNKFIKTHPCERSSCYPATGNLLIGRENRLTASSTCGLHSPERFCILSHLQDKKCFLCDTREETKHDPYKNHRIGQIIYKTKPGTNIPTWWQSENGKENATIQLDLEAEFHFTHLIITFTTFRPAAMYIERSFDFGQTWHIYRYFAYDCKESFPGVPTVLENITDVMCTSRYSNVEPSRNGEVIFRVLPPNINVTDPYAEHVQNQLKMTNLRIQMTKLHKLGDNLLDSRLENEEKYYYGISNMVVRGSCSCYGHASQCLPLDPAFSQADNEDGMVHGRCECTHNTKGMNCEECEDFFNDLPWKPAFGKKTNACKKCECNDHAVSCHFDEAVFTASGFVSGGVCDNCLHNTRGQHCEECMPYFYRDPEQDITSERVCQPCDCDPQGSSDDGICDSLNELEEGAVAGACHCKAFVTGRRCNQCKDGYWNLQSDNPEGCEPCTCNPLGTLNNSGCVMRTGECKCKKYVTGKDCNQCMPETYGLSESPEGCSLCNCDAGGSYDNYCDVISGQCRCRPHMTGRSCSQPKQNYFIPLLPEVHEAEVVDECISYGANGNCSLVAETPDGSFTGIGFTRVPENSELVFTVGDIPRSMPYDAVIRYQSTSRGDWENAFITLVRPDQVDPEGGCGELAAATSSETRIPFSLPDRSRQVVALNEVCLEAGKVYKFRIYFERKRHDVDSPTATILVDSLTLIPRIDVTPIFQGSVLADIRKKDYEKYNCKSSLYDMNYKSDPKCQNLDNILSVFVHDGASMCNCNPTGSLSKVCESNGGYCQCKPNVVGRQCDQCAPGTYGFGPEGCKACDCNSIGSKDKYCDLITGQCQCVPNTYGRECNQCQPGYWNFPECRVCQCNGHAATCDPIQGTCIDCQDSTTGYSCDSCLDGYYGNPLFGSEIGCRPCRCPETVASGLAHADGCSLDTRNNNMLCHCQEGYSGSRCEICADNFFGNPDNGGTCSKCECSNNVDLYDTGNCDRQTGACLKCLYQTTGDHCELCKDGFFGDALQQNCQQCECDFLGTNNTIAHCDRFTGQCPCLPNVQGVRCDQCAENHWKIASGEGCESCNCDPIGALHEQCNSYTGQCQCKPGFGGRACNQCQAHYWGNPNEKCQPCECDQFGAADFQCDRETGNCVCHEGIGGYKCNECARGYIGQFPHCSPCGECFNNWDLILSALEDATTATILRAKEIKQVGATGAYTSEFSELDKKLQHIRNLLQNTSVSLVDIEKLDYETQSLRDQLQASHGRLSETEQNLDDIYNSLSLSGVELESLQNHSRLVQQLSKELKENGIQLQESNIEGALNLTRHAYERVSNLSTLKDEANELASNTDRNCKRVENLSNKIQAEADDLANNNKLIEDYRAELTSLTSQIPELNNQVCGKPGDPCDSLCGGAGCGHCGGFLSCEHGAKTHSEEALKVAKDAETAITSKKDQADQTIRALTQAKLNASEAYEKAKRGFEQSERYLNQTNANIKLAENLFIALNNFQENKTASPSESKELAQKTLDLDLKLEPEEIETLGDQINRAVSSLKNVEAIIYRTKPDLDRVNNLQSIANATKEKADKILDSANSVVESLAAADESQGKAKDAIQQANSNIELAGQDLEKIDEETYSAEAPANNTAQQVEKLAKKVQKLQNNIMKNDRDAKEITKEAGSVKLEAMRARGEANNLQSATSATNQTLTDRASRSENARERAKQLLQRASKLTVDTNAKLKDLNDLQTVYLNKNQQLLRLQAEIGPLNKELNEHLIHIKERGSHYRQCYT

SEQ ID NO: 15778 - DNA, 7319 bp, DROSOPHILA
gggcgcggcttagggcgaaatattggctcctctcatcgaatattcatggcgagcaccttttttaatggatgaaaaacagtttaattcccatgagttatttattttcctgttaaatcccctcgaccaatatcctgaatcaaggatattaacgggttacgagtctaagagtacacattccactaactgattagtgtgggaaataaaaagttagagagcccaaaattatgccactaagattgaatacggcctgtgtgactaccaaattattttgtgttcgctgactcacgacggctgttttctgtgaacgtgcaagcacttgaaagttaccgctcaaagatgtcactacgaaatacaaaaaatatataaacacttcttatcggcgtctacgaaatgcaaaaacaaggaacatgagcgagccattaacattatgacatttgggcataaataaattccgcaagatagccaaaagtagggtattaaaaacacgttatctttaaatttatgtgtcttggaaattaagatgaatgtcgaattagttgtattcaaatcattcatttggtgccaaatacccccgattataagcagacggatagtgatagtaagtaattttaaggaaatttactgacattttgtttggttattttttaaactaactgagttcatggctgacaaattgatagaacaacgtatggaaaactacctgcgttctttgaccgaaccatattacaatggtcttgaactttgcgacccatcattaagataccatcaagggtgaaaatggtcgagtgattgccttctgccatctctattttgatgaaggcgcctcgcttttcggccatgtcaatgggtctctcgactgcgataggggccgtgataagaaagcacagataaaaaaaataaaaaatagaaaaccgtctgcagaccaattggcttggcctgataagcgagttggctgattggcagggaccccaaacagctgtgatttagtcatagccgaacattcgccgtgtccacataaccacgtcgcaattgctgctcgtcgcggaaaccagaaattcaaataatcataaatattaaatgccaagaaacggccaagtgaagtgaagagcgaaatgttaacctatttgccggtagtgtggctcttttttgcccttctggtgcttcgttctgccacgggacagatcataccactgcccaccttttgtttgggtcttagtccgcagtgcacttgtgccgccgaggggaatgtggtgcgtttccattgtccggatgagtacgccatgctgctggaggtttccgaaccgggcgcatcgttgtacatgagctattatgcctccaccgaattgcagtggctgccgcgcttcaatatcagttcgcttgtgaagatcgagttcgatgcgtacatcttctggccggagaagttccttagcgacttactcaagaccttgggtgttcagactgtgaagacgattattttccgtgatcgaactttggaaacggtagtcacacgcgacgttctgaactcgggcaatggatatatggaaacttcgcagcccgaaaacattaccacctggcactttggttcagttccgggcctgaagaagttcaagttcttcagccacgtgccggagctgcaggagtccatattccacggtttcgacaccctgagggatctgcatctcagcgtgaacgtgacgacgttgccgggaaatatgctgtccacggtgaatggaactctgaaaacgttgaccatcgagagtccgggtatagtgtcattcgggaatccattgctccgcgaactgcagcaactgcgcaacttgagtctcgcgctcatacatccgtttcatgagcgcgacaagcaattgcaaccgcacttcttcggttccatgactaatctggaggaggtgcggctggcgtccgccacaagtagtgtgaatcgctcgatgttcaagggcaccaacaagttgcagctgatcaagatgaatggcaacgacgatctcatggagcttccgggtgaaattttcctggaccaggtcaatctaaagaccctggatctatcctgcaatgcgatcgtcactctgcacgaggatgtcttcaaaggcctggggaatctaacgctgctggatctatccaaaaatagactgactaacttgtcgaggtgggttgaaagggggttctgtttgttgttttcgccacctgcttgcttgcgctgattaatagatggcccacctagcgatagggtacggactgtagaacttgcttctaaccaaagtaattaatcgaaggcactcttcttcgccttatcgctgtggttgcggctgctgctatttcccttatcaatacccggggcacgagtaatggctcatcgagagttccatgtctccccctgacaggcaagtggggttatcgggtcctatcgttcagatactaattgcagtgttattattgtacacagattggcgccaaaaagtatgccaaacattattaattgattgatccttatctggctgtagtaattcgtgctcaaatcagacaaaatatttcgtatttgttacgccacaagtactactatgtatatctaaacaattcattatgaaaagtcatatgaaacgtaagacgtattttattttttttgtatagttcttgtctatggcaatcttattgtcgtttgataagatgtggtcgaatagaaattaattagatatttttgtggctgatagattttaattatagaaaaaaaggttaagctttttaccgatcttaaaaaatggcattgaacaatgttcttaatactattgagatttacaatcaatctgcgcgaaacaaaactttttatactgattttctagaaacctaagcattatcatgttgatttgcagaatttatttgtagtccccattttgaattagcaataccatagaagtttttttttattaatttaataaaagtagcaaattggtttttagatgtcgcagacataagcattatgcttaacataatgcctactaatcccctcataaatgtttttaaaggcttcaccacttataaaatactgtttataaatcatttttatattgttaaataaatatgtaagtaacatgtaaaaattataaataagctagttaaaatagctttaccattttcgatagcttatttaaaagaatcaatgttattgtatagcattaggtcactagttttgggatgtagataacgatagccccacttggaactcggtacttcctgattaatgtcaatctaatccctctgagatctcctcctcctgcagcacaattttcgcaccattgacttcgctgaacgttttgcgtctgaacaagaactcgctgaccgcgatgtcgccgagtgtgttccaagatgtggtcagtctgaactacatcgagatggtgaacacccagttctatggggccacgctcctgatgaactacgaggctgtggtgtgcaccaatgacgaggcgtgccagtacaagtcggcggagtggcagtgcgatccccgatgcatctgctgggtgcagcggagtgtaggtagtctgatcgtggattgccgcggaacgagtctcgaggaacttccggatttgccccgcaccacgttactgagcacggtgctcaaggtgggcaacaatagcctcaccagtctacccactgtgagcgaacacagtggttatgccaatgtgagtggactctttctgtcggacaataacctgaccagccttggaagcggtgaccagctgcccgataatctcacccacctggatgtgcgaggcaatcagattcagtcactcagcgatgagttcctattgtttcttcaggagccgaacaacactatgacgctatcgttgtcgggaaaccccatcacctgtggctgcgaatccttgtcgcttctcttctttgtgcggaccaatccgcagcgggtacgggacatcgccgatattgtgtgcaccaagcagaaaaagtccttccagcagatggaggcctttgagctgtgtccatcgtatgtcctactcatcagctgtgtggtcggtggcctggtgatcgtcatctgtctgctcaccgtgttctacctaatgttccagcaggagctgaagatttggctgtacaacaacaatctttgcctgtggtgggtctccgaggaggaactggacaaggacaagacctacgatgccttcatctcgtactcgcacaaagatgaggagctgatcagcaagctcttgcccaaactagagagtggtccgcatcccttccggctgtgtctgcacgatcgggactggctggtgggcgactgtattccggagcaaatcgttcgcaccgtagacgactcgaagcgggtgattattgtactgtcgcagcacttcatcgattcggtgtgggcccgcatggagttccggatcgcctatcaggccacattgcaggacaaacggaagcgaatcatcataatcctctaccgggaactggagcacatgaacggcatcgatagcgaactgcgagcctatctcaagctgaacacctacctcaagtggggtgatccgctcttctggagcaagttgtactacgcgatgccgcataatcgcagggttctgaagggccaaaagaagcatgcggggccgctaatctgaggcttgaataaaatgtaagatattttagatgaatatactcactcgctttcagttgagattctcgtagagatcccccttggcgaggcaaacttgggccttaaaagctaatttgcatgccttgcttaaagttctaaagttattatgactatttaaaaagtattgatacatacatcataagtaatttaatttatttttaagcaaactaatgaccttacgattttgtttccaattttccggaaattatatatttacaacgtaattttacaagtaatatttacaaattaataataatgtcaataaaataaaaaaatatataaaaacatatcagcatatagcttctatgactgtttaacctaattaatgcatacaaacgggcagttattctttcgacaaatttgttaattaaattcatcttcatattcaaaatttaatagctttaatttgaataactaataaattgtcacaataattaacttagtcgttagcatcaacatttgcaacatttcatggaacacacaaacgctcgattgccattaatcaattagctcaattaaaatgatgattatgtgttaattacagcttcggatgaatttatgacactcattatacgaattattttccgctaaatctatgataagaaagaatagaaatgtgtatacaagttagaaactgcaagatactgaaaataatattatttccacgcccctcagctgcttcttaaaacaagtaagaatgtaaagaatatcaaattaatcacgtttaaaaagcttttcattggtgtaaatttttaattcaccgagggacccacaaagtggacagtttttgagccctcgtccaaatatcccagctggcttaggcctttggatgagctggtccttgttggtggtccttccctttgtttccaacaatgtattcggcctggattgtgtcatttttcgcatgagattttaattaaattttaaattccaaaacattggggtgctttgtgtgtgcgcagataaaatgccatttggccttaaatgaattttaacagctgatgtgtgcataaataaacatgaactgctgctcttctgcatgactaaaaattaatttttccaaagctgcacgcttttattccacattattatttgccaaagtcaccacatcataaccatgggcattcgtgggcaataatatttgcaatttatacgggcttaaatatttattcagtcacatgctttaagcagccctcatagcctcatcttcaaactctaattatccacttcggtaattgcgctggccttcattgctcagttgagtcgagcactggagccctttccccaaataggccgattcaggcccaaagtggcgagccaagccaattcccagccagatataagtgaaaatatatgtaataaccaagagggcagagaaaaacatttggccaacttgcgctccctacactgtcagcccttttttttttttgccgcacgattgcgtgaccttttgtccacccaccacccacaagccaccatcaaagtgggtggtttggttggttctgcagagcgtctttgaagattcattgcctgcccgctggccaacactttgtgggcgagtcgaacaaaagagtgagggtcatggggcaagggacaaagctagaacacttatttataacgcttggtctttaaacttaaaaactgaaatatttccactaaccttttatatacaaaagttaagtttaattatttctacagtcgatagaacttgtattccccaaattaacatttcaacatcaacggcattttttaaaactcattattatttaacaactgctcgctgtgataaattacttttctacagccaactgaatggcggaaattcaatctttttgcaattcaacattgtgattcgctttgagcgcggcatccaattcaattttgattgtaaaaatgctcagttgaattatatttcgctttgcctttgtgaccctccaaaagtttgtaagtgatgacatttgattgctgccccaacacattgcagctgccattgtataatcatctgggctcatttttcataaacttacactcgaagtcgaagtccgagtcctggaatctgggtgtgagtagttatcacaaacatctgtttgccactgcctttcatttatcacgagttttgcgaagaaaactataataaaagcgatgctgcccattgccagggcttttggctacgtgattcaaaggccaaaccgcttgccactttcttttcgcagtggctgaaattcaagctgggattccctggcgttgaactacttagaagccataaagtaaggatgtgtggctcacaaggggctagaatgtttggttggtgtggatgccatcaatggatttctggcctggcgccatcagcagcatcagcatcaccagcagccacaattcgaatcgaaagcggatgcaaaatgctaaattgttgctggctctgagtcagcttttggtggctccattgacgatgtctccagccatttgagcacacaaatcattgcaaatgcatacggcgaatatatattctgtatatatgcggtatagtatttgctgatacttagttggccacagtcatacacgtactatacatggcttttattacatgggattttattgcttttcattgccggctccttgccactttcaatgtatgcagattattaggcttactttt

SEQ ID NO: 15779 - DNA, 4191 bp, DROSOPHILA
ttcgccgtgtccacataaccacgtcgcaattgctgctcgtcgcggaaaccagaaattcaaataatcataaatattaaatgccaagaaacggccaagtgaagtgaagagcgaaatgttaacctatttgccggtagtgtggctcttttttgcccttctggtgcttcgttctgccacgggacagatcataccactgcccaccttttgtttgggtcttagtccgcagtgcacttgtgccgccgaggggaatgtggtgcgtttccattgtccggatgagtacgccatgctgctggaggtttccgaaccgggcgcatcgttgtacatgagctattatgcctccaccgaattgcagtggctgccgcgcttcaatatcagttcgcttgtgaagatcgagttcgatgcgtacatcttctggccggagaagttccttagcgacttactcaagaccttgggtgttcagactgtgaagacgattattttccgtgatcgaactttggaaacggtagtcacacgcgacgttctgaactcgggcaatggatatatggaaacttcgcagcccgaaaacattaccacctggcactttggttcagttccgggcctgaagaagttcaagttcttcagccacgtgccggagctgcaggagtccatattccacggtttcgacaccctgagggatctgcatctcagcgtgaacgtgacgacgttgccgggaaatatgctgtccacggtgaatggaactctgaaaacgttgaccatcgagagtccgggtatagtgtcattcgggaatccattgctccgcgaactgcagcaactgcgcaacttgagtctcgcgctcatacatccgtttcatgagcgcgacaagcaattgcaaccgcacttcttcggttccatgactaatctggaggaggtgcggctggcgtccgccacaagtagtgtgaatcgctcgatgttcaagggcaccaacaagttgcagctgatcaagatgaatggcaacgacgatctcatggagcttccgggtgaaattttcctggaccaggtcaatctaaagaccctggatctatcctgcaatgcgatcgtcactctgcacgaggatgtcttcaaaggcctggggaatctaacgctgctggatctatccaaaaatagactgactaacttgtcgagcacaattttcgcaccattgacttcgctgaacgttttgcgtctgaacaagaactcgctgaccgcgatgtcgccgagtgtgttccaagatgtggtcagtctgaactacatcgagatggtgaacacccagttctatggggccacgctcctgatgaactacgaggctgtggtgtgcaccaatgacgaggcgtgccagtacaagtcggcggagtggcagtgcgatccccgatgcatctgctgggtgcagcggagtgtaggtagtctgatcgtggattgccgcggaacgagtctcgaggaacttccggatttgccccgcaccacgttactgagcacggtgctcaaggtgggcaacaatagcctcaccagtctacccactgtgagcgaacacagtggttatgccaatgtgagtggactctttctgtcggacaataacctgaccagccttggaagcggtgaccagctgcccgataatctcacccacctggatgtgcgaggcaatcagattcagtcactcagcgatgagttcctattgtttcttcaggagccgaacaacactatgacgctatcgttgtcgggaaaccccatcacctgtggctgcgaatccttgtcgcttctcttctttgtgcggaccaatccgcagcgggtacgggacatcgccgatattgtgtgcaccaagcagaaaaagtccttccagcagatggaggcctttgagctgtgtccatcgtatgtcctactcatcagctgtgtggtcggtggcctggtgatcgtcatctgtctgctcaccgtgttctacctaatgttccagcaggagctgaagatttggctgtacaacaacaatctttgcctgtggtgggtctccgaggaggaactggacaaggacaagacctacgatgccttcatctcgtactcgcacaaagatgaggagctgatcagcaagctcttgcccaaactagagagtggtccgcatcccttccggctgtgtctgcacgatcgggactggctggtgggcgactgtattccggagcaaatcgttcgcaccgtagacgactcgaagcgggtgattattgtactgtcgcagcacttcatcgattcggtgtgggcccgcatggagttccggatcgcctatcaggccacattgcaggacaaacggaagcgaatcatcataatcctctaccgggaactggagcacatgaacggcatcgatagcgaactgcgagcctatctcaagctgaacacctacctcaagtggggtgatccgctcttctggagcaagttgtactacgcgatgccgcataatcgcagggttctgaagggccaaaagaagcatgcggggccgctaatctgaggcttgaataaaatgtaagatattttagatgaatatactcactcgctttcagttgagattctcgtagagatcccccttggcgaggcaaacttgggccttaaaagctaatttgcatgccttgcttaaagttctaaagttattatgactatttaaaaagtattgatacatacatcataagtaatttaatttatttttaagcaaactaatgaccttacgattttgtttccaattttccggaaattatatatttacaacgtaattttacaagtaatatttacaaattaataataatgtcaataaaataaaaaaatatataaaaacatatcagcatatagcttctatgactgtttaacctaattaatgcatacaaacgggcagttattctttcgacaaatttgttaattaaattcatcttcatattcaaaatttaatagctttaatttgaataactaataaattgtcacaataattaacttagtcgttagcatcaacatttgcaacatttcatggaacacacaaacgctcgattgccattaatcaattagctcaattaaaatgatgattatgtgttaattacagcttcggatgaatttatgacactcattatacgaattattttccgctaaatctatgataagaaagaatagaaatgtgtatacaagttagaaactgcaagatactgaaaataatattatttccacgcccctcagctgcttcttaaaacaagtaagaatgtaaagaatatcaaattaatcacgtttaaaaagcttttcattggtgtaaatttttaattcaccgagggacccacaaagtggacagtttttgagccctcgtccaaatatcccagctggcttaggcctttggatgagctggtccttgttggtggtccttccctttgtttccaacaatgtattcggcctggattgtgtcatttttcgcatgagattttaattaaattttaaattccaaaacattggggtgctttgtgtgtgcgcagataaaatgccatttggccttaaatgaattttaacagctgatgtgtgcataaataaacatgaactgctgctcttctgcatgactaaaaattaatttttccaaagctgcacgcttttattccacattattatttgccaaagtcaccacatcataaccatgggcattcgtgggcaataatatttgcaatttatacgggcttaaatatttattcagtcacatgctttaagcagccctcatagcctcatcttcaaactctaattatccacttcggtaattgcgctggccttcattgctcagttgagtcgagcactggagccctttccccaaataggccgattcaggcccaaagtggcgagccaagccaattcccagccagatataagtgaaaatatatgtaataaccaagagggcagagaaaaacatttggccaacttgcgctccctacactgtcagcccttttttttttttgccgcacgattgcgtgaccttttgtccacccaccacccacaagccaccatcaaagtgggtggtttggttggttctgcagagcgtctttgaagattcattgcctgcccgctggccaacactttgtgggcgagtcgaacaaaagagtgagggtcatggggcaagggacaaagctagaacacttatttataacgcttggtctttaaacttaaaaactgaaatatttccac

SEQ ID NO: 15780 - protein, 795 aa, DROSOPHILA
MLTYLPVVWLFFALLVLRSATGQIIPLPTFCLGLSPQCTCAAEGNVVRFHCPDEYAMLLEVSEPGASLYMSYYASTELQWLPRFNISSLVKIEFDAYIFWPEKFLSDLLKTLGVQTVKTIIFRDRTLETVVTRDVLNSGNGYMETSQPENITTWHFGSVPGLKKFKFFSHVPELQESIFHGFDTLRDLHLSVNVTTLPGNMLSTVNGTLKTLTIESPGIVSFGNPLLRELQQLRNLSLALIHPFHERDKQLQPHFFGSMTNLEEVRLASATSSVNRSMFKGTNKLQLIKMNGNDDLMELPGEIFLDQVNLKTLDLSCNAIVTLHEDVFKGLGNLTLLDLSKNRLTNLSSTIFAPLTSLNVLRLNKNSLTAMSPSVFQDVVSLNYIEMVNTQFYGATLLMNYEAVVCTNDEACQYKSAEWQCDPRCICWVQRSVGSLIVDCRGTSLEELPDLPRTTLLSTVLKVGNNSLTSLPTVSEHSGYANVSGLFLSDNNLTSLGSGDQLPDNLTHLDVRGNQIQSLSDEFLLFLQEPNNTMTLSLSGNPITCGCESLSLLFFVRTNPQRVRDIADIVCTKQKKSFQQMEAFELCPSYVLLISCVVGGLVIVICLLTVFYLMFQQELKIWLYNNNLCLWWVSEEELDKDKTYDAFISYSHKDEELISKLLPKLESGPHPFRLCLHDRDWLVGDCIPEQIVRTVDDSKRVIIVLSQHFIDSVWARMEFRIAYQATLQDKRKRIIIILYRELEHMNGIDSELRAYLKLNTYLKWGDPLFWSKLYYAMPHNRRVLKGQKKHAGPLI

SEQ ID NO: 15781 - DNA, 5921 bp, DROSOPHILA
gcgctccattgtgctggtcaagaacacggagaacgatcagagcatatattactactggttgatctgctacgtggacactataaaggatgtgctaactcaactgtatgctttgaatgtggaacttaaagaatcgaaggagccgaaacactacaagtggctaatcagcatttcttacgacacttggacaggacgctctttccaacgtggcgccggtcaatctttcttcgcccaccagttgcagcagacgattgagtttacgaagacgagaatgggaaatccgcagtacgcagtcaatttgcgcggctatttcacgctgcaggccagcgaggattacaaagagttgcgcctggatgtgcagcctcttcaaggagatctcctcggactgcagcgcaatagtccgctaacaaggctttttaaggcgtttaagaatctcctgggcaactatagtttcaaagagaaggtcagcacctggaagttttgcgccacaactgaccaaatatgaatatcaacatgtcatgctttatgtacatactttttgaattcaatggcaaattgaaaacacaccttaatgacattattaacattattttatttgaatgtacaatatcactataggctaaactaataccttaaattataagtgtaacgacgactaatcatatgtaaagttgactaaacgatttcttggcaaaagtctcttggagcagggagaaattatttacaagggcgacaacaaagcttatctaaatcatttacaagtgtgtgtctgaaactccccaagaataataaagaggttataattgtgtaaagtaatcacaaaagtctttgaagcgtagggagttcaattttgagtatactttctactgggggctaatccagatacttttaggcatagagagaggaagaatttctattgtatagtattaagttaattgtacttttagatcgtaatctgagtaacggcacttgggcactagccttagttataatcctgatatatctatcccttcttctttcggcaataacaatattttttggcagcaaaatcattcatgcaatccgcctctccgctgtagacattcaatcggctcaccgatccggtcacctttacggagtcatccgtgtgattgtgtcgcaacgtggcttcgtactggcccttattgggcgacgtgacaaagatcagtcgataggtgtgcacctcatccggatcgagggcgttgtgatgcgcccggaacgcggatttgatgctgtgcagggagaggggggcacatagcttggcaaaggtgccgtttcggaactcggccacatagttattgagatagctgaccacacgcttgcctagcatccgcgactccttcgaggtgctcgatatggtgtcgtattcccaacaggtgcaccagtgatccgcgatgcccacatcggagcaactcctttgcggcgagacgggggtcagtaaactctggcattgcgggcaatcgggtgccggacctaacgattccatttcagcgcgcccggatatggccagtatgtgcttcatggttaggtgtaggtcgtagggcgtggtcaggcgattcctgttcagctggaggctacgcacaaattgtggatgtgagcgacgcaggtgttggggtaaccaaataaagatggccggcaaacgttcctccaagtgacccgaccaggtggccctcgtcggtccgaaccgcatgccatgatcgctgaagaacaccaccaccgtgttctccatggtgccctggcgcacaagcttccgcagatactcctccatatagctgtccatactgctggtctgcgaaatgtcactgtggctgtgcgtgttggtccagaaaaatccaaagtatgtctcgttaaggaacctcctggtgaactccagcccatagtcgtacacatgctccgccgccgtcagatagccgaggcagtgcaccagaccattgaccgtcgtgtgatccagctgtgattcggcggcggagagatatggcctcaagtagtaatccgccggcggattcttgaagcccttctttaggtaattgaaagtgttgatcttgacggcatcctccgcgtaggcggtcacgtagcccctctgctggtactgcttccagatgtagtcgcacttgtccaggccaccaaccacgaatggcgagcacgcgtgcatggcattgggcagattgtagccggtgagcacagccatgatatttggaaatgtattgtcgtccacctggggacaggatgcggataagaaatctcaagttcttccatatcatgtaccagtctcaccttattatagcccgccagttcgaaccatccgttgtcgtagagatactgagccgttttgggcatggctctgataagattaacacgggagatgctatcgatgccgagcatcaagacgctcggaggtctctgatagcccttggcgtcggcctcggacgccattcgtaatcgttgctgcactgcctccttgacgggaaccgtcgcatggccattgatatagatctgacggccacctgaatcgcacttaacgatgatgccctcggcggaatcgggcagcaggatgcttcccttgaaggtttgacacttggtgtacttgaccttcatctcgtccactcgctgcaccgacatgtagcagcaatggagctgcttgcccaccgggtagcgaccgaaggccgctccatcgatgctgagcaggtacttttgagactttgcctcgaatttcacctgcgtcaggggtgtcaatttctggcaggacttgtatttgatgcgcttgaagtgccgcatcacctcgttcttgtacggatccacctccatgatgcggcaggagttgctgtacacgaggaagcctttcgggacagatggattagtctcagtaatgggctcaggttcaactggacgggtgcaagcacaaacataaggagggaaaaacaaaaagggaatacccaaatcataattactggcatgcaaactataaaaaccaatacaacaagaataaaataattatatggtcattccatcggtggactcaccatccatcaccgtcgattgatgctgcacggtgacgtagttatccgagtgcaggacatccagatcgaggacattcacccaaccggtccggccgattagaaagtagcagaacgtgaaggagaccagcagtccgagcaccgatttcctgctaaccggaagtggtcggtgctggatggcatggagcactcctcctgcccgtcgggtcatgtgtacttccggctcctccgactctgaggtggatggatccagcaatagacgtttctctgccatgtcatttaggctctcgtctatttataatcataaatcaaatcacttagtttagatcaatccgactttactttactttaatggtaaacttaaaatttaatttaagcaaaattgaaatgaacgtaaattacttttattgaaaagattgctgatcaaatttattattttcatatttttattctagagaaatattattatttgggtttaaaatcattaaagaaaacagctgatcgtaaaagctctcgctacatttgcagaaagtcacgctaattataataacaaatacacatgttgaaagcgaagtaagcaataagagtgtaagtaagctaaaagtcgagtgttgcggctataagatacccattacgcagatggtgaagcgccagagagatatgcaagtagcaaagcgagtgctgaccgaaatcggtatactcgcttctagggtatacaaaatcaaaacattatttaaaagtgtgtgagtaacctgttacattcttttcaacgagtctagcataccctttactctacaagtgaaacaacaaattaacttgtattttgtaagctaagtaagaaaggcttatttacataagtttcacaagtcgcgtgaactaattaataatttttgattgacttacttgttaaatgagtattgcagtgattttagattcattggcgtattattgtcgtttttgcaactgaaattaaagtacaatgcatatgtatatgtaagtagctgacggatgcaaattttttcgttagctggaaaactcattttccacttattacaaaggtcagttttcagtgtcgcatacattttctgtggaaacaatgaataaattatgttttttttttttgcaaaacatgcaaaaaagaatatgatactgctgatgagtttataattggcgaattccggaactttgcatttcaaagctgatttacaaatgtttttttctgtagtcactctccagagtacataatcttgtgatttttcgttttcaatatctttcagttgtataatatatatatgtatatatagtttgagttcataagggatttagttgcatttatttttagatataaggtacttgtttgtgttttaaaggattatagatctttattcacacattgtttggttttcaccgatttgcactagtttacatttttgtttattgtttataataatacacgtgcagattttcggttcaacaaacgtttgaatacgtgcaacgcacttgaatacattttcccattcaaaacaattaaagcactctttttttgccagccagcaagcatataaataacacgttgtttgccaaccttggatgggcgcattttgggtggttcgaaatggggtggcggcctgcgaattcaattaatggaaatgcaacgtctgctaagcgccaggtacatcgttctgccaatctgctaatcttgcgccagcggtccgagcactatgacgacggaatcgcgaatgcgactgtagcccaagcacagaaataggtttgggtaccaggcccaccaccaggctaatgggtatgtgggagcggggatggtctcggggatctcggggatcttggggggtctgggagcccgaaatgggaaaatagagctgatgatgccacatgatggatctgtgattcgccttcgccaatgccgcgattatttcatcgatcacgactcggtacgactacgatcattagttttcacttttttgcagtttctcatgtggcaaacattgatcagatattttgttgtgttaatccatgacacgttttcatagctatctacaataaatataattatgcgatattcatgcccagcactggaagaccaggtgtagttcggcactaagcaaatgtttgcagccaaggaatattttcttttttttataaattaaaatttcttgattttaggtttaataacttaacagatagatcctgatcaagaatatatacactagtgggcataagtatttggacaagaaatatattcaatatatttgtttgtaacttattgtttacttaaagcaaaatttttagataattttagtaaataggttgactatcgtagttgaattagataacaacttagcagtggcataagtatttggacaaattatttaaatgttataaattgaaaagaaaaaaaagtcaactaaaaaattaaaacaaattaataaaaaatataccctctctatccctttaaagacgttttggtacagactgtaccaagctgtggatataatctattgaaatatccttccataaggtttgaattttcaaaatcgtttcttcgcgatttctagataaaattgtttcggtaatctaacaaaaaaaatttttttttgagcagtgaaactcaaaagaacattgttccagaatgatgcaggctgactaacatattttttggaaaagtcgaggcgctttaacttatttcgtggaattattagtggtataactctactaacatatgttccaaaatcattcatacttttcaagtcatcaacaaacaaaaaaaaaaaaataaataataataatataaaattaatataatagtcgaatgtgagtaaatgagataaacacaattgttagaatttaaagggcactacgcatatgtgggtttac

SEQ ID NO: 15782 - DNA, 2250 bp, DROSOPHILA
atgtggcatcatcagctctattttcccatttcgggctcccagaccccccaagatccccgagatccccgagaccatccccgctcccacatacccattagcctggtggtgggcctggtacccaaacctatttctgtgcttgggctacagtcgcattcgcgattccgtcgtcataacgagagcctaaatgacatggcagagaaacgtctattgctggatccatccacctcagagtcggaggagccggaagtacacatgacccgacgggcaggaggagtgctccatgccatccagcaccgaccacttccggttagcaggaaatcggtgctcggactgctggtctccttcacgttctgctactttctaatcggccggaccggttgggtgaatgtcctcgatctggatgtcctgcactcggataactacgtcaccgtgcagcatcaatcgacggtgatggatggcttcctcgtgtacagcaactcctgccgcatcatggaggtggatccgtacaagaacgaggtgatgcggcacttcaagcgcatcaaatacaagtcctgccagaaattgacacccctgacgcaggtgaaattcgaggcaaagtctcaaaagtacctgctcagcatcgatggagcggccttcggtcgctacccggtgggcaagcagctccattgctgctacatgtcggtgcagcgagtggacgagatgaaggtcaagtacaccaagtgtcaaaccttcaagggaagcatcctgctgcccgattccgccgagggcatcatcgttaagtgcgattcaggtggccgtcagatctatatcaatggccatgcgacggttcccgtcaaggaggcagtgcagcaacgattacgaatggcgtccgaggccgacgccaagggctatcagagacctccgagcgtcttgatgctcggcatcgatagcatctcccgtgttaatcttatcagagccatgcccaaaacggctcagtatctctacgacaacggatggttcgaactggcgggctataataaggtggacgacaatacatttccaaatatcatggctgtgctcaccggctacaatctgcccaatgccatgcacgcgtgctcgccattcgtggttggtggcctggacaagtgcgactacatctggaagcagtaccagcagaggggctacgtgaccgcctacgcggaggatgccgtcaagatcaacactttcaattacctaaagaagggcttcaagaatccgccggcggattactacttgaggccatatctctccgccgccgaatcacagctggatcacacgacggtcaatggtctggtgcactgcctcggctatctgacggcggcggagcatgtgtacgactatgggctggagttcaccaggaggttccttaacgagacatactttggatttttctggaccaacacgcacagccacagtgacatttcgcagaccagcagtatggacagctatatggaggagtatctgcggaagcttgtgcgccagggcaccatggagaacacggtggtggtgttcttcagcgatcatggcatgcggttcggaccgacgagggccacctggtcgggtcacttggaggaacgtttgccggccatctttatttggttaccccaacacctgcgtcgctcacatccacaatttgtgcgtagcctccagctgaacaggaatcgcctgaccacgccctacgacctacacctaaccatgaagcacatactggccatatccgggcgcgctgaaatggaatcgttaggtccggcacccgattgcccgcaatgccagagtttactgacccccgtctcgccgcaaaggagttgctccgatgtgggcatcgcggatcactggtgcacctgttgggaatacgacaccatatcgagcacctcgaaggagtcgcggatgctaggcaagcgtgtggtcagctatctcaataactatgtggccgagttccgaaacggcacctttgccaagctatgtgcccccctctccctgcacagcatcaaatccgcgttccgggcgcatcacaacgccctcgatccggatgaggtgcacacctatcgactgatctttgtcacgtcgcccaataagggccagtacgaagccacgttgcgacacaatcacacggatgactccgtaaaggtgaccggatcggtgagccgattgaatgtctacagcggagaggcggattgcatgaatgattttgctgccaaaaaatattgttattgccgaaagaagaagggatag

SEQ ID NO: 15783 - protein, 749 aa, DROSOPHILA
MWHHQLYFPISGSQTPQDPRDPRDHPRSHIPISLVVGLVPKPISVLGLQSHSRFRRHNESLNDMAEKRLLLDPSTSESEEPEVHMTRRAGGVLHAIQHRPLPVSRKSVLGLLVSFTFCYFLIGRTGWVNVLDLDVLHSDNYVTVQHQSTVMDGFLVYSNSCRIMEVDPYKNEVMRHFKRIKYKSCQKLTPLTQVKFEAKSQKYLLSIDGAAFGRYPVGKQLHCCYMSVQRVDEMKVKYTKCQTFKGSILLPDSAEGIIVKCDSGGRQIYINGHATVPVKEAVQQRLRMASEADAKGYQRPPSVLMLGIDSISRVNLIRAMPKTAQYLYDNGWFELAGYNKVDDNTFPNIMAVLTGYNLPNAMHACSPFVVGGLDKCDYIWKQYQQRGYVTAYAEDAVKINTFNYLKKGFKNPPADYYLRPYLSAAESQLDHTTVNGLVHCLGYLTAAEHVYDYGLEFTRRFLNETYFGFFWTNTHSHSDISQTSSMDSYMEEYLRKLVRQGTMENTVVVFFSDHGMRFGPTRATWSGHLEERLPAIFIWLPQHLRRSHPQFVRSLQLNRNRLTTPYDLHLTMKHILAISGRAEMESLGPAPDCPQCQSLLTPVSPQRSCSDVGIADHWCTCWEYDTISSTSKESRMLGKRVVSYLNNYVAEFRNGTFAKLCAPLSLHSIKSAFRAHHNALDPDEVHTYRLIFVTSPNKGQYEATLRHNHTDDSVKVTGSVSRLNVYSGEADCMNDFAAKKYCYCRKKKG

SEQ ID NO: 15784 - DNA, 12542 bp, DROSOPHILA
ctgaacaagaaatgttggaaagcattgaaatttcggcgagaaaggggtccaccgttgcaggccagtgatcttttggagcaccttaagttgtagacacttccattaccggtgacaaacagtcatgggtggaaaaatatattcaaaatatgaagatacacttgtttactacatatgtgaaaaatatctacatacatatatagtcatttcgaactacaaaaaatagtacaaattagcatgatctaatttgaaaatattacaattaaaatactaagcaatactttataaattaatattaaatattaattaaatattaaattagctaacaaaatgaattatatattttcaaattaaccccaaatatgacaatgctacctatttatttgcccgcgactgtaagtaaaagcgcgaagtgggtctcttaattgtcaagcgttgtttattcagctatatttctctgccattcgtttggtttttgggttcttcctgtaacttatggccattggtactaaactggatctgagcttcgcagttacgtctgggttttattttcacataagtatattaagtatttgtgtattattcataagagttgcctttaggtggttaacaaattaaagctatcgactaattttgattctagagaaaaatttagcacacagagttgtaagttgtaagtggtaagtggtaagtggtaagtggtaagaagagttcgtttgtttagcggatatcaatcgagaagcgagttagagagataggataaacttatgggctaggcaataaggttgtactgctatttgatgtgccggcagaggtggaaccgcatccatttcagcgccctgtcgctcatggcctccgatttgggtgagttcccgcaatccgacagccgatggcatccggcgcagtccgccggagatcgacgatagctttcggtggtggtgttggcgctgcagctgattaactcggtggtgctctcgagaatcgcctcgggctcacagccaggtcacatgtcgcccgcgcagtcccagcgcagatcatccgcctcgtgggtcagataccggccggcacccacctgggcctccaggttccggagatcgcggtacgtctgcttgtcctgcagccagtagtgcagcagactcttgtccaccgtgtaccgcttgcgctgcttcacctgcagcaggttgttgatcaggtcgatggctggggaaaaccaaaagggattcattgatgagcctggacttgaatttcgtgcttagcccctacactcaccattggaggagatctccttccagggatttggtggatacatgaaggccgcgttctggatctggtcgttgatgtcctcctcctcgttgaacgggaatgtgccgctcaggctcacgtatatgatgacgcccacgctccacatgtctagagatcgattgtagcccttgttacggagcacctccggtgccagataggccggagtgccaaccaccgagcgccggaaggacttctcgccgatgatccgggcgtagccaaagtcgcagagcttcacctgcggaaactcggcgtccgaggagagcagcacgttctccggcttcagatcgcagtggactatgttttgcgaatgcaggtacttgagggcaatcaggatctgggtgatcaggaacttggtcacccgttcactcaggcggcccctcgcatgcgacaggatcatctccagcatgtcgcccttgagcttttccatcaccacaaagatccgctccggagtctcgaacattcgctccagattgacgacgccgcaatgcgagatgttctgcaggatggccacctcgttcttcagctgcgcctcctgtttggtgggaaagcgcaatttgtcgatcaccttgatggccacctcgcgttgcgtcttcttgtgcacgccgccgtagaccacaccaaactgcccggaaccgagcacctcgtccggaaagatctggtacagctggcccatatcctggacctgctcctccgattcgcagcattctggaaaggaaacaaagcgtgctgatgcgccgtttacaaacatatttggactacctacgcgtattggtgacgtgcatgaaggcctgccggatgctagtctcccaactctttgcaatgtcactgccaattccactgtccggcgggggtaatctgacggcctgctcctccttggcgcccacctgcggatcctgtccaacgaagtagctgagattgggtaggcgcagctcgaagcagtagttgcactccggccgtggatctccgaggtggctttcgatcgacagaagctccgccagcggcagctccttgtggtacttgctaccctgttccgagacgaacagtgtgatggtcttggagtccagacgccagtagtagcgctttactgccttgtccagcgaggtgtagtgcaccagccagccctccttaagggcctgcccaccgcgtttcttggtgtgcttgacggactggacgatcctcatcagcgggatattggcactcggcgaggaggaggtggaggattgcgactgctccgactggccgtcgctactggacttactggtctcaccaccactaacgctggaatcatcgaccagtcctccattgaccagttcgggcggcgagttgtgggcatttgtgagggctttcggtgcttctctaggtcttccggccaccagattgacaccgctcgacatggccgacttgtacttgccatactcggatccgtcgtcgccgtcactgtcgtcgaactcctcgcgaaagaagttgtctcgctccttggcgccggcctggatctgcagctggctcagttgcgcctcacccgtgcaatcgtggggcaccttgtccatgcacttcttgtgcgtattgtactggcagtcccggcactggaggccctgcttgaagagtcctttgagcagtttcttgcacagctggcacaccgtgggtatgccgtacgtgtgcaccatgaatgtgtgcggaatacggagcaccatcagtccattccggctgcccgacgaatgagtcctttgatggcgaccggggatattctgggaattgtggaaggcaggttacttcattagcaaattaagaggctctggggatggatgcgcatggggtattccctgcgggcagggcctctttaatagcgttaattggccaaaacgaattttcataatttggccggcttctcttgaaacctctttccagaattccttttggaaggaattcgaggaactggtagcaaaaattttgaaatggtttcggtgtttttgggaaattatgctcgttttaagaaaagtacttataaagaaagaaatgtttttgctgatgatgtttatctatcagaacgcaagaaaagtgactttttaaactgtatccttaatttcactgacttcagatagtttgaatgttatcccctgttatacttaagtgcatctttcaaacccccctacgtgttttctaaatagttaataaagcatttaatgtgcggagtataaaaagtttattagaaaagcgtgaaaataatacaaattaaaagtgtgagccacgttaagtacaatttaaaatacgcgcagtggggacaggcggaaactatcaactaccaccacccttaaaggtcgtacacacacacattcattcacacacactcacacgcactcacacacactgtatatgcttatgatagcgaatatgaaaggtcctgtctggctgtcaatgcttaataatatcattcataaggtccgacatgcgctttaccagtgagctgctcgagtcgttccgtccggtcgagtcctccgtggagacgagcgactgctgggagctgccggacggactgcggggcgcctggagcgtaaaggagcgcctcgaggtggcgtcattggagcgattgcagttgttcgggattttcaccacgcaccgcttgtgatagttctggccgcatcctgtgggcggaatgcaaggacacgcttggagattagtcaaatagctctgaacccccccctctgatatcacataccgtcgcacttgaggccctgacgcaccagaccaaacagcatctcgccgcagaaatcacagaaggtcggtcccttgtaggaatgcacattcaggctgtgcggcttgagggtcggcatctcggaggtcggatacaggatggctgcagtgtgggcgagaaaaagatactttaaaattggtttcgccataggagtaagcaataagagttagtttgcaaagtgaatatgatttttagcaggcagtaacatatatgataatgcaactctacaatctttacaaatatagaaacataactttagaatggatttttctaatggttgttaagtatcgtaagtaatagtaattgatttttaactttgtttagaataactttgtagttaacaatcttgacacatttgaataattatagatgtatcgaataaagctcaattttttactatatctgttgcgaattaaactgtcttgtcacaacttcgacacattcaactcaactcaaccctttgcaagtttatgaattgaatgagtgatgtccgtcgacgaatgtgtcaccctattgaagtgactggaatccctggctacttacgactggcggtcagcacgatttccacgagggtctcgtccaccacctccgctgccgagttgatgatgtgcagcacattcggggtgctgtagtcgtggacgaagaggagaatgcgttccgagaggtatgtgagtccactgtccgggatctgaaatgaaccagcaggatgtgagctgtgagcactacgaatgcgtttggttaagtgattgtggcaatggcaatgacatgggcattgaccatttgtgatgttcggcttcgtttaacgcttatttttacattggccgaaccattatcatatcatattcgtatcttaattgattgcccgataagatccagcctgccatatgcacaaaatttcgtattgatttcaattgatatgaacttaacattggtgctttgtttgctttatatctacacagttgcaaatacccttacaaattagaaaaaatgtaatgacctataggtttattatgtagctttgctaatatttattgagctgaaacgccatatatggtaaggctagaaggaagctaaattgtgggatgattatagtgattggaatatttacggaaatccataaaccattgtgtgacttgatgaaatgccagcttttctggagttaattgataaaatctactgccagtcatgtcggagacatgtacgcatacatatgcaaggcacaattaaaggtccatgggtcttagatcctgtccaaaccaaattaaccattcactacatctcccccctcgtctggataaaagttgtacgcatttggagctggatagccggctgggaacggaaggagtcgtgccgggagcagctgtcgttggcaatggatggttatggaacttaggaacgccaccagttgcggcctggttaattgaattggccatgggtagctgcgtcacggtagtgcgaggggggtggtgaacgggccatgcggaaacgagtacatgcctatgtaacttggacttacttaatgaaataaagcaattattgtgcacacatacatggattaatccgaccttttcacttgtctgctagaaatacagtgtgcaatgacttcattctagtagttttattgaaaaactacttgagagaaattattttgtgttgcctcaacttcaaagttaagaagggttgatttcattaaattactattgcattcaaatatctgtttgtgttttttctttctttgcataaaaccactgtaacttatgggccaactgcacagaatgttgaccatttgacttctgtttaaatattctacaattgacatgtttactggaaggaccttgcataattaactaaatggcttcagatgttgacctcctttgctgttttgggagcttactagttctttggtagcgttctaataccaaaggatacattgttcagtaagaaccatttggaaatatatagtttgtgtgcgacttctctcaaatactccctcaaatattgtccatgtccttgaatcctgcacagatgtaagtcgaaatgattcactttggttcacccctggcctcacctttgtgttgatgaaatcgcaggccaggtccttgagcgtcttgagggtcagcgagttggcgggcacacagaccgcatcgcgcacgctgccgaattggaaaaggaatgtgacttcaggaccctccatgataacgggaacgctgccgacgccgctgccgacgctggctgcgctgctgccgttggaggtgctgtggttgcgttgcgccaggattgcaatggtgcggaaatcccctcgctcacggagctcctgtcctgttctgccctcgaattcaataaaattcctcttttccgcttcgcttgcagtgatttctcggggcttcctgccctcagccccttcgcttgttattgcaaatgccaaggacgaacgtaagtttaatgctgcttgctcctgccaccgttatccttacactgctctggctgccttctgtttcgactgcggttcggaatcggttttgcggttcaaggattgcagtcggtcacggctctacgtgtccagatgaggtatatgcaccagatttgccaccacaccacgccgcctctggatcatggaaactaactgcaaggatagtggagaaggattaaacataaagccattacaagtttcacaataaatgccctttgcttagtaacgggaaatagttgaacttttgagaactgatacctacggattcataaatgatacgttcgtcaagcatttcgtatcaaatttgaatattccctttaagctaagacacaaagtatttgagaatgtattcattctgaacaacaaataaattcgatttctaattcaaaggataacagactgtgtgtattggggattagtaagttaggtcatggcaaacgtgcatcactgagacaatggagccataaataatacggcagtcgattcgccgcttcaatagccattacgtatacctcgattggccatatgtacactgtcattatatttatatacgaaaaaaaaactggttgctaattgcgatgtgaaaaactagaaagataagatcgccctgggaaacttgcgcggggcgatttgaattcctaccaattattttgaagtgccctgcctgtttgtgacccatttatggagtggagtgtgtgtgtatgtgtgtgtgtgtgaggcattaaaaaataattaaaaaatcatgacggcaaatatgtgtgctggccatgaaaggaatgccatgagaagcggcaaaagaaagggagagagaaattaaaagaagcgaagaagaaattgtgaaagaagaacaacaaaacgagatactcggctggctgccaggcaactttctaaaatttgtatctcgccgctttttctccgcttttctggattttcgttgttgtttttaagtaggtgtatcagtcaaaagtcgcagatggggagccgagtgcgttttgaatttcaattgaagtgcctttcctggcatctggtggcggagcatggaggctgctcctccgctccggcgctccacaatcctcaagtgctttttggacaaaaaaaaaaaaagataccatcagcgtgaaatagccgaaattggagcaccatcacacgcaaatgacgcagcgcagaggcctaaagtcaaggctaaaacacgtacacacatttcgatattaagatacgttatggtatccaagagatacattcgccatttacatacataacaacaacagcaacaagcggcgatgccagcgaatatcacttaataatttatccgtcacatacacactagtcgtgaatttgagaaccttttcagcgccttgcatccgacggatgccgcttggacatgatgactaagcccaactcttgctctttcgcttgcctcgatttcagctcctgctgtctattttattctatgcgctgcaattcgatgtctccgccatcgtcgccgcggcacgttctgagtttgttaagccaaaagagcaactgacttggccaactgactgccaaagccgccgacgatgccagagaccccctcccactcccaatcccagttccagtcccagtcgtggtagtcgcagtcgcagtctcagacccagacacaaaaccccataaagagccccaacccgaacccatacccatacctaaacccaggcccaaactcaaactgagacccagtagccagcgcaaaaacaactcaaaacccgtttgacggcactggggaaaataattgaaatgaatgaataaatacataactaaatacaggaagaattaacattaattgctgtttaatgcagttgataatactttaagtaacacatatttaacctttaacatctagcttttattatacattaaaagtatttttgtttttattttaaagaaaatattttcgtttaaatcaactaaatacatacaccaaaaaatatatttaataatttgtatggttaataagtacttgtctagatctattttttatgtaataaaatgttctttttttttaataaatttccaaaatgtaaaatatgaattttaagtaagttgtgttctgaaaagaaataattacctcatagcaatattttgtaaaagagaaactaagtacatgtttttattccagtgtagacgaatgtatagagaaagacaaggccagagtgctgcagagcgagatgacaacagagtgagagagagagtgagcggctgagacgtgtgtgagtgtgagccatgaaccaaagcactcgacccggcatagtcttactaccccgcccttgcccgccatttgttgcccagtttgtttgtttcctttgtttgtttgttgtaacggacgcactcttcaatatacccccgaaccccaccttccgccaccatcggcctttcttcccctttctcccactactctgccccttctgcactctttctacgcttcgagcgcgcccatttagcgcccatttcttcgctcgttgtcattgtcaaggctgtgcgagaaaactacctgagagggggggggggtgtgtgtagtttgggccaactcaggtggtgcgggatgggggttggtggtttgaggtttgataagcgattttcccgttaccgttagacggccccagggccaaggtgatttcctttcattgtgacggttactgaagttgtgccaagcgtgcagatgttgtcagcgaatggaaagaaattatggatttttacttaaaatggcaaggaaataacaaaaaattataaaacgtattcgattttaaagaaatatatatttggaatttaaatgtcgatccctaatggattagcataaataaccgaatcaataattcaaaattataccaatatatatattttcgaatcaactgaaaatgactctgaaacaatttcgtaaaattcgttaccctaataatatgtaagtattttgaacatatttttagattttaaattgatcaataaataacagcggcatattgccgaaaaaaccaaacaaatttgagttcattaattgcaccaaaaaaatagtgtgtagttgttaatttaaaatgttgctcattaactgctatgcttgaaatcaaaataaattgcaacactaacatctatttattttggaaaccaaaaacaaaattatgatattcaaacttctccagtttgaaatgtaaatggccaaacaagaagttagttgaaatctgttgtttcatgtgttttttttattgttatccccctcggttatcggttggttttttttttggaggctgtgccacccgtactcacatgtttatttgttggaatattattagaattcaaattcttagattcatgtgaaacaaacacagaacgtagcgaaatgcaaatagtcacagtcgacgcaaaagtcgcgggctcttttcgagtctgataagaaaacagaacgagacggggctacggggagcgatagagagggggcatcgcatggcatcaccattatcatcgatagataattagaaaggtgataataattccaagccgggagcgaaagcgagaacgagatgcgccgatgatgccacgccaagttcaaattccactgcgggtggagcccaagaaaatcctatacagtgcgcgaaaaaagtatcatcttagaagaaggatattaatgaggatatattagataatatatttggatttacatatatgatgaaccatcttttaaaggtctttcgaaatgaaatgaataaagttctgaagatatatttagaaattacagcgcctcttctgcttaacttaaattgaaacatgttaaatcgaaattgggcttgttatgaatctccagagaagcgtgtagatgcgataatggttccagtttattgagcctgacgcaccggccatataaacaccaaggccagggaacaactcgaatgtgtttctgtttgtttttctagctcaagtggatggtggactccgaagtgggagtgcgttttccacccgcccaaaggagcaaataaatattaacgggcgcgggcgcagacaaacatttgcattgaagcgtgtcaggacaatggtacaggtggcactcagtaaggaggattagctaaatgtacacatattcagattaattaacaatacagatctaagctgacaaatatatatctaagtataaggtcaaaatttgtatttgtaaagtaattatatgaatatcatgtaagtactattattagtttattaaagcacttagtaatataagaatacgcacagtcactataaatttaaacctttccaagttccaagaaccattgaaaaggaccccgttgaaatgatacacgcatttaacaagccattctataaatgaatggtgccatatagtatatacttattttaccattcgaatagctagcatataataattatatgcctcgtaaagacacgaattgagcacaaaactaccactcacgaccaccaacaacgaaacgtagcaaattagcaacaaaagcactccacttatgcacaggatgatataataacaggaactgggaagctcggaaagcacggaaaactcgggaaactgccaaggagccgccaactgtgacacttaaattttaatgtttctcgggaaaattcatttggtttaatttgttttcagctggcatccctcgacgactttgcccgactttccgtcgattattttttacactcatttaagatgcaacacttggcgaatgtatatatacatgtatatatagacttgttgaaaatgtcttgcaattaatttgaataattaatatgcacacggacagcagctagagtaccaacacaccttcgttcgtgccccatttccccgggcgcttttccttagaattttcaatatttgtttgccgtttctgagcgcgtgtgtgtgcgtgtgtgtgtgtcgtagtattttcctttccttgttttcctatttgtgtggcagcatcgtggacatgtccacgttgcgctgtttctgtcgctgaggccaaaaaaaagacgagaaaacttcgcacgtttgcacttcgcgtcgaccgccgcgcaactgaagcgaaatttccaaaggcagccaggccagcaatcgcaaaaatcagcagcagcggctgaaaaggcaaaatccaaatgaaattgccgagctcaactcaactctcgatttggactcgggtttatgctctcttttgaacccctcccccccccccacaaatccaccagagagattctccgatgggagagcatttggggggcagaatgtttgcgattcctaggatgctgtgttcaagcaacgcatcacttgccacatttttggcgttcttgacgcgcttcctcaatttgattttgattctattttattttggcctcttttcgattgtttatttactcttctcgatttcggctgggcgtttgtttacaatccggctgtggcagaggtgaaagccatgctcgccaagctttctcattttctcacaggtgtcttgaaagcttgggagttgtaacgaagagaagcggcccacttttgctcagaattaggataggttacgcataagagctgccagggtagacaggtttaaacaaagaaaacttaaataatttatttatttcatatttagcttagagcgtaagtagttgcatattaggattacttatagaatattaaaatattaagtaatattgtcaaaaatggtatctttctaattatacatgtaaaataataatataagtttgcaagttagttaaaataactaaaattaaattaaattaaaaaataacataaattacatctcttaattcctaccaaaaatatttgatacattttatatatttatttcaaataaaaaataaaataggcaaaccgaatattgtttacgtatacgtaatattttgagtcttaaaagaagaagtaaagagcagtcgaaacttaagagacaagtgtgccactcgaagagagtcaagtgagcgggcttttaatgggcgactgttgctcccgaaaagctttaatctgcactggaaaaaatcagcggcagtgatttt

SEQ ID NO: 15785 - DNA, 3168 bp, DROSOPHILA
cgaagtgcaaacgtgcgaagttttctcgtcttttttttggcctcagcgacagaaacagcgcaacgtggacatgtccacgatgctgccacacaaataggaaaacaaggaaaggaaaatactacgacacacacacacgcacacacacgcgctcagaaacggcaaacaaatattgaaaattctaaggaaaagcgcccggggaaatggggcacgaacgaagttagtttccatgatccagaggcggcgtggtgtggtggcaaatctggtgcatatacctcatctggacacgtagagccgtgaccgactgcaatccttgaaccgcaaaaccgattccgaaccgcagtcgaaacagaaggcagccagagcagtgtaaggataacggtggcaggagcaagcagcattaaacttacgttcgtccttggcatttgcaataacaagcgaaggggctgagggcaggaagccccgagaaatcactgcaagcgaagcggaaaagaggaattttattgaattcgagggcagaacaggacaggagctccgtgagcgaggggatttccgcaccattgcaatcctggcgcaacgcaaccacagcacctccaacggcagcagcgcagccagcgtcggcagcggcgtcggcagcgttcccgttatcatggagggtcctgaagtcacattccttttccaattcggcagcgtgcgcgatgcggtctgtgtgcccgccaactcgctgaccctcaagacgctcaaggacctggcctgcgatttcatcaacacaaagatcccggacagtggactcacatacctctcggaacgcattctcctcttcgtccacgactacagcaccccgaatgtgctgcacatcatcaactcggcagcggaggtggtggacgagaccctcgtggaaatcgtgctgaccgccagtcccatcctgtatccgacctccgagatgccgaccctcaagccgcacagcctgaatgtgcattcctacaagggaccgaccttctgtgatttctgcggcgagatgctgtttggtctggtgcgtcagggcctcaagtgcgacggatgcggccagaactatcacaagcggtgcgtggtgaaaatcccgaacaactgcaatcgctccaatgacgccacctcgaggcgctcctttacgctccaggcgccccgcagtccgtccggcagctcccagcagtcgctcgtctccacggaggactcgaccggacggaacgactcgagcagctcactggtaaagcgcataatatccccggtcgccatcaaaggactcattcgtcgggcagccggaatggactgatggtgctccgtattccgcacacattcatggtgcacacgtacggcatacccacggtgtgccagctgtgcaagaaactgctcaaaggactcttcaagcagggcctccagtgccgggactgccagtacaatacgcacaagaagtgcatggacaaggtgccccacgattgcacgggtgaggcgcaactgagccagctgcagatccaggccggcgccaaggagcgagacaacttctttcgcgaggagttcgacgacagtgacggcgacgacggatccgagtatggcaagtacaagtcggccatgtcgagcggtgtcaatctggtggccggaagacctagagaagcaccgaaagccctcacaaatgcccacaactcgccgcccgaactggtcaatggaggactggtcgatgattccagcgttagtggtggtgagaccagtaagtccagtagcgacggccagtcggagcagtcgcaatcctccacctcctcctcgccgagtgccaatatcccgctgatgaggatcgtccagtccgtcaagcacaccaagaaacgcggtgggcaggcccttaaggagggctggctggtgcactacacctcgctggacaaggcagtaaagcgctactactggcgtctggactccaagaccatcacactgttcgtctcggaacagggtagcaagtaccacaaggagctgccgctggcggagcttctgtcgatcgaaagccacctcggagatccacggccggagtgcaactactgcttcgagctgcgcctacccaatctcagctacttcgttggacaggatccgcaggtgggcgccaaggaggagcaggccgtcagattacccccgccggacagtggaattggcagtgacattgcaaagagttgggagactagcatccggcaggccttcatgcacgtcaccaatacgcaatgctgcgaatcggaggagcaggtccaggatatgggccagctgtaccagatctttccggacgaggtgctcggttccgggcagtttggtgtggtctacggcggcgtgcacaagaagacgcaacgcgaggtggccatcaaggtgatcgacaaattgcgctttcccaccaaacaggaggcgcagctgaagaacgaggtggccatcctgcagaacatctcgcattgcggcgtcgtcaatctggagcgaatgttcgagactccggagcggatctttgtggtgatggaaaagctcaagggcgacatgctggagatgatcctgtcgcatgcgaggggccgcctgagtgaacgggtgaccaagttcctgatcacccagatcctgattgccctcaagtacctgcattcgcaaaacatagtccactgcgatctgaagccggagaacgtgctgctctcctcggacgccgagtttccgcaggtgaagctctgcgactttggctacgcccggatcatcggcgagaagtccttccggcgctcggtggttggcactccggcctatctggcaccggaggtgctccgtaacaagggctacaatcgatctctagacatgtggagcgtgggcgtcatcatatacgtgagcctgagcggcacattcccgttcaacgaggaggaggacatcaacgaccagatccagaacgcggccttcatgtatccaccaaatccctggaaggagatctcctccaatgccatcgacctgatcaacaacctgctgcaggtgaagcagcgcaagcggtacacggtggacaagagtctgctgcactactggctgcaggacaagcagacgtaccgcgatctccggaacctggaggcccaggtgggtgccggccggtatctgacccacgaggcggatgatctgcgctgggactgcgcgggcgacatgtga

SEQ ID NO: 15786 - protein, 219 aa, DROSOPHILA
MEGPEVTFLFQFGSVRDAVCVPANSLTLKTLKDLACDFINTKIPDSGLTYLSERILLFVHDYSTPNVLHIINSAAEVVDETLVEIVLTASPILYPTSEMPTLKPHSLNVHSYKGPTFCDFCGEMLFGLVRQGLKCDGCGQNYHKRCVVKIPNNCNRSNDATSRRSFTLQAPRSPSGSSQQSLVSTEDSTGRNDSSSSLVKRIISPVAIKGLIRRAAGMD

SEQ ID NO: 15787 - DNA, 5918 bp, DROSOPHILA
aatggaatataaccagactaaaattttatctttcagtccacagcgcaagtccattcaaaaagtgagcatggacaagtgcaagaatcgactgacccgctgcaaacagctgcctccttgcaaggacttcaatagcttgttcggttccatcttcagctcgaagcgaaatgacaagctctgcggcacggacgccaagacttataacaatgagtgcgaactggcccacgccacctgcctgtgagtatccatgataggatcatccataggacatggatctagctcttcaacttcttttcagacgcggcgtgaatctggcccacattggtccctgcacggatctcaattcgcccaccaaggattgcggggatgcctgtactcgggcggatctggaacagcagccagtgtgcggctcggatggcaacaccttcgcctccatgtgcgagttcaagcggcgcacttgcgatctgcgtgtggtgcccgtttcgctaaagaattgcgctttaaccgccgactgcgaatcggattgtgatgcccagccgccaagtttcgtctgcggatcggacaacaacttgtacaagtccgagtgccacatgcgcaaggagaattgtggcaagcatgttttcgtggtgccactgaagcgctgccttgccgcctttcagcttaaaggatgtgcccgcatctgtcccagggaattcgagcctgtttgcggcagcgacaataaaacgtatctgaacgactgcttcctggagatcgaaaactgcagggcgaaccagacggtgaacgtcaactactacggcgcctgtggccgccccgaagcaccatccactaacttcctttactaggacgtatgtatgcgtggcgtcttcatttcacttggcatttaatatttgtaggctatagtcttgtattgtactttttttaaaacgatatttattgagtttgaattaaagccccccaacgaacttacaaggaatgcacttaaagcctggcctgcatttaacatctaagccgaatcatcaaagagcttgctcagcatagcgttgatctcgtgctgtctgtacttgacgtatttgtcgggattcttactaaaatgcactccagagtaactaaaaatgatacaagatggttaggtataagctgataaaccctatatacgcttacatttcgtagaatctattgtagatgggcagtatgtgctccacattatcacgtttgatgccttctcgcaggatcacatcgggtatggagatgccccgctggattttgcatgcctcctcaaagtccttattgaagttctggaaattatagaggatgtttttttttaaatcaagaaagtttagcttattttaaaaataaaaacctacagaaaatctctctttgagcacactgcgatccttatccttgaccttgccggccactggtttgggcagttcatccaaggaatagatgccgaccagcatcttggaccaggtcttttgatagctagccttcagttcacgtatcatctccatgtagctatgttcgcactcaggctcagccaaggtgaccaaatcaataagattggagcgttgcagcgacttgaggatatagtgaatgttatttagtcggaagaggtgcttggtggcctggtcattgtactgctcgcacttgttcattatggaaagattcagttcggccaaagctttctctgcaaaatatagatagtggtttaaaaatgttcgcacaattgatcttgttgccactcacttatgtaaatcgccaagagcgccttattgcgttcctcgactggcagcgccttcttcatcaaaatggtgtccaattgcgtggagtacaggacatcctgtgccaaaatggaaccaataacatcgaaatgatcgtacaagtgctcaataaaccagatcgtattggaggtcagctcgtgcacggtggcatcctttggaacattgctttggcccacaatattggtgctcgattcgcccttgactacgtccaggaaatgctccaatgccttggcaccggtgtgctgcaacttttttagtacttttttcaactgttccctttgcgcaggatcgtatgtgcggtcaatatccggctgcagcagtataacccgctttagggcggagaatattcccaacgccgaggtccactccttgcgggaaatgcagcgcaggatgcgttgcgtaatggcctcagcgtccttaaccaccagatcgatggcattataggccaaggtggcgaatacctcgttgtgtttcgactggggaataatgtcgatcatgatggctcgctcccagttaagtaaccgctgcagtcccagcaacatgaccagatacttgtccagttcctgatcgccatccatcaaatcctcggaggtcaggtggtcgctgtgcgatgatgccttcttaatggagaaccctgtggactgctcaatcgtctgcgtcgcgcgtaaatataacttgttcgccttcttttcgaatctatgcagaataaattaaatatatcatatacgaaaacttggaaattaagtaatatttctcacatttgctgaagacgagcggaggttgtcttttttggctccgtttggcgtccactgtgtcgcggtctctgcaagaaaacattttaaaaacattaatttgaattgttaattgccattgcattaatgtttcttcggaataattaaggtactaaaatggtagcaaattaaaaactcttatttttgtaaccttttaatatgcatttgattcttatgagtttattaattttaaaaatgtgtgttttacaaaagcgtttataccccaatttttttttttttttttgacaaaaagtattatgcaatttgctagcttacgaaataaatttaaatttgtaaatgagcttcggagcaacattttaggaattacatagattcttaaagtgtactagagtttattatttaaggctaaaaacgacgagctttaagacaccaggtcttttacaataattctagaatacctacttaattatccacatatattaaaatcacaaagtttctcttcacataaaacattttaaaatcttagtgtatgataaaagatggacatgccagcgattcacttaaagagtgtggagcacatccatgatacggttgcaatcctcatcggtatttaggccgattttaacaagatcagcacgctccaaggatgccagttccaccagatcgatgtgagcctcttcgaaattggtcacatagttctccaggcccatgtgcatgagaatctgttccacattggcggcatggttaaccacgtacgagtggttcgatgctttgatggaacgacgacgcgactccaaggccagtgaggtctccatattcgagtcatccgaacaggtatccgggctgctgcagctctttatttctcgctccggctcgatgatctcctcctgcggcttgggcagcacgaatggcgggggcttaagctgagtgcgatggcagtgctgatgctgctgctgctgctgctgcttgggatgcaccttcgttggcactttcttgaaggtagcgaaccgcatgggcgacactggactcttccccttcgtgcccatattctcgatgggcgagagattgggcgaacggaagttgccaaagatcggagtagagcatcgcacgttggaggtgttcaccttcagggtgttccatctgcgctcctttagcgttggcgtgcgattaagcgtaattttggtcttgttcgtgggcgtgcgagaattctccattttttttagatactgtgacacagaaaatgatgcgttctttgcgaattcaagctggcaaatggcggtcatcgaattggacatgtaatgcttacatgcacaagctttttcgaacagacaccgttaaccgaaacgatcagagatgggaaaagcatacatatgctcatcatcgtacacatcgctattcatattctactacgtactatttttctccacataatatatatgtattaatactagttagaatatgaaagaactgtttactcaccagagcctcgtgaccccaactgttgctcttttggtgatccttgagcagctgcagcgatcggagaaccacttcgccccgttccgtcgcgtagatgtttgtgtactcccttaaattttgctccaaccagtgcgatatggtgtacagctcctcgcgcgtcgtttgcgaaagctgccggaatgaggtgtattcatcgctggaatcgtcctctatgtagataagatccagcaactccaccggcttcagcggagcactgtgcttcttgaggagcatactatagtgctgactcaggccttcgcagccggtgttaaacaaactggtgacattctccagctccacgctctgggaattgttgtgccggaagtaatcgttggcatcgcgcagtttggctagtgcgtcgaggaacaccgagatgtttccctccaccgggccttgatgaatcaactggcagacctcttgggagacatcgtagtgggacaggacgctttccagacaattgagagtagcttccagatctaaaaaaaaaaagaggcggtgacacattagttttttttttttgaaatcccattgagtttattttcatactctgctgccgtttctggagctgctccgtctcctggtagacgggcaatatggtctgctccaggtttcccaggcgcttctcgaagattgttagaatactggacatttgcgtggacagatcatggtatttatccactcgatctttcagcagagctaaattggtggcttcctatgaggaaaatgggtaagtatggaggttttgagcatgacaactagacataccttctccaatttattgtgcgcctgcaatgaactgtccaaattgttcattttcaagcgtatatgtagctaaaatcctttaaaaacaaacaatagttctgatataaaaaacaattctattttattttgttttgacgaaactaggcatttatgcacactggctttggtcatactgtcaattaccgcgttgccaactactttgcacgaaaaaaaaaattataacggtcatttcagatagtaatagaaactttttttaaatattgtacacttagacaattaggtaaacgataatgaggctatgttttaaataaattgtttttactactagtactagtttattagtcaagtcctagttttaaaagccaaaactaacggaaaaacccgccaaactgccatctccagccaagacgccaacttttgttgtggttggttgccatggaatctgtgtgtaaacaacgcacctgcatttaggaatttctaccaactatgcaggattagccaattcgacttctgcaacaatgaggggtgttctcaagtggctggaacgcatagagtttcccaatagcaaagacaatgagatcaggtaaagctttctcattcgtggaaaacaacaacctgttgcttgctataacgccataacggtatttgcaaaacccaattttccagtgtccacaatgtgtgctacgcacccgatggcagccaattggtggtggctgcgggggatcggttgctcatctacgatccaaacgatggctccttgctgaacaccttgaaggcgcacaaggatacggtcaattgtgtggcctactcgcgggatggcaagcggttcgccagcggagcctccgataaaatggtcatcgtgtggtcacctcagcttgagggactgctcaagtattcgtgagttctcagcacacttgcaataaattctagttttttatataaatataaaaatatatttacattcataggcacggtgactccatacagtgcatgagcttcaatcctgtttcgcaccacctggcctcgtgctccttgtcggattttgccttttggtcggctgatcagaaggcggtgcaaaagtacaagatatccgcgcgtgtcaatggctgct

SEQ ID NO: 15788 - DNA, 2142 bp, DROSOPHILA
ttttttatatcagaactattgtttgtttttaaaggattttagctacatatacgcttgaaaatgaacaatttggacagttcattgcaggcgcacaataaattggagaaggaagccaccaatttagctctgctgaaagatcgagtggataaataccatgatctgtccacgcaaatgtccagtattctaacaatcttcgagaagcgcctgggaaacctggagcagaccatattgcccgtctaccaggagacggagcagctccagaaacggcagcagaatctggaagctactctcaattgtctggaaagcgtcctgtcccactacgatgtctcccaagaggtctgccagttgattcatcaaggcccggtggagggaaacatctcggtgttcctcgacgcactagccaaactgcgcgatgccaacgattacttccggcacaacaattcccagagcgtggagctggagaatgtcaccagtttgtttaacaccggctgcgaaggcctgagtcagcactatagtatgctcctcaagaagcacagtgctccgctgaagccggtggagttgctggatcttatctacatagaggacgattccagcgatgaatacacctcattccggcagctttcgcaaacgacgcgcgaggagctgtacaccatatcgcactggttggagcaaaatttaagggagtacacaaacatctacgcgacggaacggggcgaagtggttctccgatcgctgcagctgctcaaggatcaccaaaagagcaacagttggggtcacgaggctctgagaccgcgacacagtggacgccaaacggagccaaaaaagacaacctccgctcgtcttcagcaaatattcgaaaagaaggcgaacaagttatatttacgcgcgacgcagacgattgagcagtccacagggttctccattaagaaggcatcatcgcacagcgaccacctgacctccgaggatttgatggatggcgatcaggaactggacaagtatctggtcatgttgctgggactgcagcggttacttaactgggagcgagccatcatgatcgacattattccccagtcgaaacacaacgaggtattcgccaccttggcctataatgccatcgatctggtggttaaggacgctgaggccattacgcaacgcatcctgcgctgcatttcccgcaaggagtggacctcggcgttgggaatattctccgccctaaagcgggttatactgctgcagccggatattgaccgcacatacgatcctgcgcaaagggaacagttgaaaaaagtactaaaaaagttgcagcacaccggtgccaaggcattggagcatttcctggacgtagtcaagggcgaatcgagcaccaatattgtgggccaaagcaatgttccaaaggatgccaccgtgcacgagctgacctccaatacgatctggtttattgagcacttgtacgatcatttcgatgttattggttccattttggcacaggatgtcctgtactccacgcaattggacaccattttgatgaagaaggcgctgccagtcgaggaacgcaataaggcgctcttggcgatttacataaagaaagctttggccgaactgaatctttccataatgaacaagtgcgagcagtacaatgaccaggccaccaagcacctcttccgactaaataacattcactatatcctcaagtcgctgcaacgctccaatcttattgatttggtcaccttggctgagcctgagtgcgaacatagctacatggagatgatacgtgaactgaaggctagctatcaaaagacctggtccaagatgctggtcggcatctattccttggatgaactgcccaaaccagtggccggcaaggtcaaggataaggatcgcagtgtgctcaaagagagattttctaacttcaataaggactttgaggaggcatgcaaaatccagcggggcatctccatacccgatgtgatcctgcgagaaggcatcaaacgtgataatgtggagcacatactgcccatctacaatagattctacgaaatttactctggagtgcattttagtaagaatcccgacaaatacgtcaagtacagacagcacgagatcaacgctatgctgagcaagctctttgatgattcggcttag

SEQ ID NO: 15789 - protein, 656 aa, DROSOPHILA
MSSILTIFEKRLGNLEQTILPVYQETEQLQKRQQNLEATLNCLESVLSHYDVSQEVCQLIHQGPVEGNISVFLDALAKLRDANDYFRHNNSQSVELENVTSLFNTGCEGLSQHYSMLLKKHSAPLKPVELLDLIYIEDDSSDEYTSFRQLSQTTREELYTISHWLEQNLREYTNIYATERGEVVLRSLQLLKDHQKSNSWGHEALRPRHSGRQTEPKKTTSARLQQIFEKKANKLYLRATQTIEQSTGFSIKKASSHSDHLTSEDLMDGDQELDKYLVMLLGLQRLLNWERAIMIDIIPQSKHNEVFATLAYNAIDLVVKDAEAITQRILRCISRKEWTSALGIFSALKRVILLQPDIDRTYDPAQREQLKKVLKKLQHTGAKALEHFLDVVKGESSTNIVGQSNVPKDATVHELTSNTIWFIEHLYDHFDVIGSILAQDVLYSTQLDTILMKKALPVEERNKALLAIYIKKALAELNLSIMNKCEQYNDQATKHLFRLNNIHYILKSLQRSNLIDLVTLAEPECEHSYMEMIRELKASYQKTWSKMLVGIYSLDELPKPVAGKVKDKDRSVLKERFSNFNKDFEEACKIQRGISIPDVILREGIKRDNVEHILPIYNRFYEIYSGVHFSKNPDKYVKYRQHEINAMLSKLFDDSA

SEQ ID NO: 15790 - DNA, 2680 bp, DROSOPHILA
tcatctgttcgcggttgtccacgaagcgggatgccttgcgccctccaaactccttgagcagcttcttgttggcgtgctcccggctcatcgtgggacccgttctcttctgtcgctccagtttcttgtaaacgtgattgtacatcaatgcctcttgcactggcacgactttaactttgttggttaatttgttccttatgaaaatgtaggtatcgacttcctcgctatccttcacctcgcccgtgtacacctggtcacccgcgtatactaaggcatgctttttgccatctacggtgctctctaccatgctgaaatctgcgtcgcccaaaagagatccattctggaatttcactatggatggaaggtgagattgtatattttcttcctaattgatggctgcacttgttaacttacgtatggtaggtatgttctcgtctcttttatgatcgcatacggattctattataattttatcttccattgttactgcgttatatttgaatttttctggcttttagaaacaattcaaatgttgcacgtgtggaaaacaaaacagatgacatgcgatggacgaaagctgagtgatatgaaagccgattccagccaaaatcgaatagtcgataagaatcgatagttcaaattttgaaaattggtttcgacagcatttaatattaaaacatttactaacctttgactaaactaactcataaaatttaaatctagatctggtaaacataagaaagattaatatatcattgttctaagcagcagactacttattataaattctaaaatagttttctgtttcacgaaaattcgtttttcattttaaaagaatatatttaaaatctaaactacgtgtcaaacttaagcagtggtaatactttatggacgtcttgcagcttctggtgaaaaggtaaatccagaaaaggtaacatgtttgctttttacaattttaaccacttgctgcaatattagaaaattaattatacatataaatatttcaatataaattccaacataccataacgagcttaatgaggaaaacggcgaatgtcaaaaagttgatgctcatgattgccgcctcaggcggaaagtctatttccgagtcatccaaaattccacgtcgacgtctcctttttcgctctggtggctgccaaagaaccgagaactgttgctctacaaaatcagaagattaattataataaggcaacatataagatcttaaaacctataaaactaacctatcaattttataagattatctcgtaggttttgaagcaactttattttctttccgaaagtgagagtcgatttcttgatccaagttttctgcatgtcctttagaaacttgaagaatccttgaacgctgggcaccccaacttcctcatcttcgtttggtggctccgtggattcctcgtcctcctccgattccggatttgcgttttcggttgagctggatgaatgtttcctggatgtagtctccactttcggggtcaccacctctacatttgggactgttggtgccttggtggacccaaacaagaaaggattactgctcataccgaatctctcccgctgatattccaaccaggcgacactgggcgtgctgaagtcatcgccctgctggctaatcccggcaagaattgccattatgaagcactgaggcacaataaaatgcatctttactgctgaaatgctgaacaagaaatgttggaaagcattgaaatttcggcgagaaaggggtccaccgttgcaggccagtgatcttttggagcaccttaagttgtagacacttccattaccggtgacaaacagtcatgggtggaaaaatatattcaaaatatgaagatacacttgtttactacatatgtgaaaaatatctacatacatatatagtcatttcgaactacaaaaaatagtacaaattagcatgatctaatttgaaaatattacaattaaaatactaagcaatactttataaattaatattaaatattaattaaatattaaattagctaacaaaatgaattatatattttcaaattaaccccaaatatgacaatgctacctatttatttgcccgcgactgtaagtaaaagcgcgaagtgggtctcttaattgtcaagcgttgtttattcagctatatttctctgccattcgtttggtttttgggttcttcctgtaacttatggccattggtactaaactggatctgagcttcgcagttacgtctgggttttattttcacataagtatattaagtatttgtgtattattcataagagttgcctttaggtggttaacaaattaaagctatcgactaattttgattctagagaaaaatttagcacacagagttgtaagttgtaagtggtaagtggtaagtggtaagtggtaagaagagttcgtttgtttagcggatatcaatcgagaagcgagttagagagataggataaacttatgggctaggcaataaggttgtactgctatttgatgtgccggcagaggtggaaccgcatccatttcagcgccctgtcgctcatggcctccgatttgggtgagttcccgcaatccgacagccgatggcatccggcgcagtccgccggagatcgacgatagctttcggtggtggtgttggcgctgcagctgattaactcggtggtgctctcgagaatcgcct

SEQ ID NO: 15791 - DNA, 615 bp, DROSOPHILA
atgcattttattgtgcctcagtgcttcataatggcaattcttgccgggattagccagcagggcgatgacttcagcacgcccagtgtcgcctggttggaatatcagcgggagagattcggtatgagcagtaatcctttcttgtttgggtccaccaaggcaccaacagtcccaaatgtagaggtggtgaccccgaaagtggagactacatccaggaaacattcatccagctcaaccgaaaacgcaaatccggaatcggaggaggacgaggaatccacggagccaccaaacgaagatgaggaagttggggtgcccagcgttcaaggattcttcaagtttctaaaggacatgcagaaaacttggatcaagaaatcgactctcactttcggaaagaaaataaagttgcttcaaaacctacgagataatcttataaaattgatagagcaacagttctcggttctttggcagccaccagagcgaaaaaggagacgtcgacgtggaattttggatgactcggaaatagactttccgcctgaggcggcaatcatgagcatcaactttttgacattcgccgttttcctcattaagctcgttatggtatgttggaatttatattga

SEQ ID NO: 15792 - protein, 194 aa, DROSOPHILA
MAILAGISQQGDDFSTPSVAWLEYQRERFGMSSNPFLFGSTKAPTVPNVEVVTPKVETTSRKHSSSSTENANPESEEDEESTEPPNEDEEVGVPSVQGFFKFLKDMQKTWIKKSTLTFGKKIKLLQNLRDNLIKLIEQQFSVLWQPPERKRRRRRGILDDSEIDFPPEAAIMSINFLTFAVFLIKLVMVCWNLY

SEQ ID NO: 15793 - DNA, 7351 bp, DROSOPHILA
taaaattagcagctaagataagataaacaaatatcgaacttgggttagtgtcgtttggtgtgggaaacgccatttaggttaattttgcgaatattgcattagaggggtattaagaatattacaaatacaaggtcgaacttttaaaacacatattaatcttggtttaccaccaattgaatttatagacaaaatcgttgaactgagtatttttagcgttttcgaaaatattgttgggtaaaacattgttaaaatgtgaaaaaaatccgacggtctgcataccttataactaataatatttacaatcgataaaggattggtctacgggataagaaagtgtttttttttcgggggcaacgaaagtataaattaagtataaattgcgataaaaaacagagccgcacacgtaacgaaatcaaatccaatgcaagtcgaacatataacatataatacttcgtcgtggagttttcgagttcaatggtcatttttgggattcggaggcattattcgttacttaccttttgctatagagcgccaggctgcgggtgcgactgctccccgaactggccaaaatattgttagttgtattgttgttgttgttatagttattcagggagttgcttagattactgttgttgttgttgttgttgtggttattattgctactgccgctagtcccaataccgcagtcattattgttgttcagattgttggccaaaagagcggctgtccctgtgccagttggcaagcaggaggaagtgggcttcaaggcagccatcgctgtatttccacccactccattgttattgttccggaacggttgggatcgagctctcgtatgcctcacgttcgattcctgttcgctgctgatacaacaaatatacaatcgtaatttagcagaagaaactttgtaacaaaaataaatacattcagatgcacttgaatttctagacatattaagcaattgaagtgccatctacgcgtattttctaagtcagtcgacctacctattgctgttcacattaacggatcgcgagtgatgccttcgcagcgccttgatctgattcagcttgtcgccctgcgtctgggcctgcttcttttcgagcgccgtttgtgtcatcctgacggtggacgcaatcgtgtgtcgggctgcctcgaagacatttgcacttggcttgcgcaacttcttctccgtgcagctggccaactcaggagtgggataaactccagatgccgtactcaatccactgcgattggcattgggattaaccaggcgcctcagggatgtggctattactgtcggtttgttcgcgcctgatggagatttcctacgccgtgtggatattgtatagctggaggtaggcggcggatccgctggtgcactgatcgtgtccgtatcgttgtcatcgctattattgcaattgggatcctcaacggattgatagagcgctctctcgtcccgctccaatcgcagctgctccgagagttcctcatccgtttgatccgtacaagctgcatctaagttatcctggtcattcaggtgcatcgtatctacccgctgagaaatgcccttcactcgggttaaaagcagatcgacgtgctctgtggaatcggcggcagccgaggccagttttttcttcagctccaggctgttgataccgtacgtatgctggaggatgggaagcgaagtgcgccggcgcattcgttcgccctccgaccacagccagctttgtttgctaaaaatttggaaaacatttgtgattctttgagtaaaatcgtggggtactaagaaatacgtactcttccatccactgctgctgatgtccaatcaccgatcccggccggcaaagccttagccaggctatggcctccagagcagtgaatccgtaatgcttcatgatatatgcccctatcaggctgcccgtgcgtcccaagcccgctttgcagtgaactgcaatggctccctttgtcgtctcacaaatggagaggaacttcttcatgatggcatcgctgggcgtgctgccatcgatgaagaacaaatccttgtgatcgaaaccagcgttctcaaaggacgatgcgtgatagactttggcattcagccgaatcactgttgtcacattattatcccgaaaatagctaaagtagcgctcaggtgcatggcacggatatccattcggcagcgtcttgctcttctgatggggcccgcaaaacgctataaacttttggggcacaatccagttaaagtcgccgttctccacgcgctcgaaatactcatactcctcagcatcaaagtcgttgaaattaaagaatcccgcctgcaggcctttgtgcacagcattcaggcagtccagcaacgaaatcttaaagttgctaggtccgtagctggcgtcacaaaagcgcgtgtaggcaggaatctcgccagcgaccagcggccgatatgcctcttgtggtgtcttgttaaggtagattatctggaaacgataaatcaaatatacttattctgatttttgtgagttcttgaacagttgaaagagttaaaccagagttaaagctctctttcaaatgttcagcgaaatcgaaagattcaggaccaggagcacttactgcatacgaaccaatcagataggccgcgttcaaccgcttggccggattcatggaggtgtagtgaactatctttttgttggcatggcacttggcattcagcttggtgttcagtttcatgcagtatctgtagagcatgcatatgttgagcggaccaaagtcattgtagaagttctcatagatgaattcctcatcgacgctgaagtagtgggtgttgaccgtgttctttggcttgatgttcttcttgaaggccacaaagtataatcggtctgcaaacagtatagaattatccacatcactcaatgtcacgctgtttaaagttcattgtgctctcaccttcctgcatctccgatgcacagaccagcagatctgagttgtcatcgtccaacatcttggccgactatcaggagcacgggagacttcgacgactgtttggcgactgcaaagacattgaggaaaatacatttattatggctttgatatcttcgagcaacggcggaactctcggcccacacattttgggattaaagcttccgcatggtattgcttattaacaaatttaaatacctattgatttcacagaccaaaagtattttagattattcaaacttttgaagaagacttgttctagaagatattagatatatgtaaagataaacatctaaaaggtctgggaatccagggcatttcaaagtccaagcccctatgcaatatcgtttcattctaatgattatttctttctattagttggcaacaaatgcgcccacgccgacttgcacacaaaagctgacttgccataattggatggcagtaaatgatgttttccgcaaagggtgttctacatacatacattcatacatacatacttccatccatccgtacatacatatgtatagcgtcttttctacgtaaacgtatctattgagtggaagcatgtgttccgtttgtcacttttaccaactttatgagtgtctgccacccaagttctttctaacttttcccccccaaagcgcaattcccagccctatttgctccactttgcctgccgtagccaaatgtaggtgatggcttccatatcaatatgcatatagccatcagtcaggcactcattctatcaagtcatcagttgggccgccatccgcagtccaataaacaatggagaaggaacaggctgagccgagcaggaaactcgaatggggaacaccctaacagtgagttgtgcataaatccaagaaagtcacgtccctttggaaatttatggctaacaagagggtctacatgacataatttgcatcgagaatactgcgctgaatgtaacttttgaaatgctctatctggataaggttcttagttggtctagttgaatgtgttaccacactatccgatccttatttgcccgaaaatagattttagtggtcggggaacccatgacagaatttgcgatgtatgaccacccatcatcaaaagtgttacgcacacgagttttcacttacaagcatatatgcttggggaacacatgtaaatattcgattttatgcaaattcgtaaccttttccatgtacatacaacaaagccacagttggcgtgcctttgcagaatttcggactcgaactgggactacaatgagttccttttaatcctccccccatttcccctggcagtgctttatgcatttcctctggccgattttaaagtttaaaagtcaagaagccgggcgctttttatggcacatttgcatgtcggctaaggagttttagccagatccaaacttagatttctatcggtgtgccaaaggtaaatgtgaatagtgcaaggtgtaagggtatatcgcatgacattgggcgagccttgtgaaacggaaacgaaaatagctgaagatataaggatatatagggcaagtcaggccatcaaggaaggtgaaggagacccaagcgtactggtatactttattctcggttttctagatgtaattttgtttgtctaaattgctatcgtaaaatgtgtatcgcgcggactataagaaaaccacattaggcaaactgaagagatggctgtgttgaataaaaattgattaaaaatgtctgactatcaaacaaactattgaaatatttatgcggagatcctaatttgattatggttcttaagcgggctattacagaaatttaatccgactttgaaagcgcagtgcaattacatagtaattttaaccctgcttccattgaaatatccctgatgttatataaaaccgctaagcttttgttacttgttcacttgttatgagtatactagttggtaatctcgataatattactatgttacgtttctgatttgatctgtctcgattggtcgtgttactggtttccgcctattatagttgcgacctctggcggcgatcgtggataatattctaacggtgaagagtgaatctttcagtctccaccgatctcttctccaactcacacacactactccacttctattctgaatggaagatcattgctaaatatagcgggaatatgcaattagctacattcatccccctcccaccacattggtgactctttggagttgactgaaactacaacttccacgtgaagacaacaatttcatatcacactcatatctataaccatatgtatgtataagcatacatatgtgcatgtaagcatatgcacataatcgggcttatctgcttccgagctgtacataaggtcgtcaaaaaaaaatgcgatagaacgcaaccttcccttttttccagttggaatttgagacctagcgatctgggctaggttggtcattagaaacaatggacaaacaaacgagtttttatttttttcgaatgacgtcaccaagaatgacaacaaaaggcggtttaaaaataaaagcaacgtcaatagtatgtttctttttagccaagttagttagttggaattggaaacgcggtgttaagagattttgccgcgctcgcataccacaacaaaaacagagcgcacacaaatacacatggtgattacaacgccaacagcattcacctgtacccgctcactttcccccaccccttgctaaacaacccacttttctcaagcgcatgcgctgactctctcaaaagctgctccatctcactcactccctcgctcgtttgctcttgtgctttggcggctttttgtatgtgtcccgctatggcactcctctctggtatttttgtggatgtgcctgtgtggagcataaataaaagcaaccgacgcattttgctactagaaacccatagaaatcgaaaaataatactgggatgtactgtgtactgcgtaatcaagttttttggtaaaaatttctggactattttcggtggcactacactgcactacaaaaacaaaatatggggggactggaagagagagggagagagagtgggagccgttacaattacacagtttttgttggtacgtggctgaagaaagtattcaatgggttggagagggggataccaaaaactaagacgaaaactcacctaaattgtgggttcacactgctgtgttgttgttacttctgctgctatggatattcacgaatgaatattcctgaagaagggaagacgtcgaatttgggaaggcagaggagagtcagcaacagcagcaccagctaataacacccacaccacgctccgcataacactgtacaattttgacaaactttactcccgaatgggattttatattttaaaagtatttttttttttggaaaaattttgtcaccgaatattacacatcgaatttgttgtctctgtctgcttgggttaacaacattctcaaagcgagctttttgcacttgtcttggatttaaatattgtaacgaaaaacgtataaacacaatcaggcagcgaagaaaagctctcttctgagatagttaaaaaaataacattataattgcactaatttttcacaccaaactatgatcgcattttccccggcgatttatgtatttttggatatttcgagtgcgaatggggagcccagcgacccgagcagttggagattccggaaagttgtgagttaattgttcatctcggttcattttgctagaccagggcttgagaaacacacgaaagtatcgattaaatgctcgatatttttttttgaaatgcgttccgttacttttacattcacctggagtggaaaatgtatacattttttggaccagaaacaaactggtaatttttatgacaagcgaattttaagcattaaaaaggaatttaatcgcattactatttttatttcaaacagctatgatagtaagtgtaatagtaatttaaattaatataatttgttttagcttgatatcttaagaacaatcagagtgcaattccaaaatgtaaataaaatttttgctttatttgaaaaaatattataattcttattttttaacggtacaaaaatacacagcttagcggtgacacgaaccgcgatgtatttgaatataaaagtaaattggattcatagtcttttttctctaaaatttcttaaaatcttttatctgagacaaataaatcatttcggaagtccaattggtttcgttattactagcttctatttctgtattgcattttcgtaagaaaaggaaatttcgaaacaaatttaaagaaagagctctattaaattgtaatatgtttttgaaatgtgttctctttacattcgatttaaaaagtcttcgtctttcgacgactatcgatcctctgttatcgaagcatcgcaaagta

SEQ ID NO: 15794 - DNA, 1955 bp, DROSOPHILA
ggtgacaaaatttttccaaaaaaaaaaatacttttaaaatataaaatcccattcgggagtaaagtttgtcaaaattgtacagtgttatgcggagcgtggtgtgggtgttattagctggtgctgctgttgctgactctcctctgccttcccaaattcgacgtcttcccttcttcaggaatattcattcgtgaatatccatagcagcagaagtaacaacaacacagcagtgtgaacccacaatttagtcgccaaacagtcgtcgaagtctcccgtgctcctgatagtcggccaagatgttggacgatgacaactcagatctgctggtctgtgcatcggagatgcaggaagaccgattatactttgtggccttcaagaagaacatcaagccaaagaacacggtcaacacccactacttcagcgtcgatgaggaattcatctatgagaacttctacaatgactttggtccgctcaacatatgcatgctctacagatactgcatgaaactgaacaccaagctgaatgccaagtgccatgccaacaaaaagatagttcactacacctccatgaatccggccaagcggttgaacgcggcctatctgattggttcgtatgcaataatctaccttaacaagacaccacaagaggcatatcggccgctggtcgctggcgagattcctgcctacacgcgcttttgtgacgccagctacggacctagcaactttaagatttcgttgctggactgcctgaatgctgtgcacaaaggcctgcaggcgggattctttaatttcaacgactttgatgctgaggagtatgagtatttcgagcgcgtggagaacggcgactttaactggattgtgccccaaaagtttatagcgttttgcgggccccatcagaagagcaagacgctgccgaatggatatccgtgccatgcacctgagcgctactttagctattttcgggataataatgtgacaacagtgattcggctgaatgccaaagtctatcacgcatcgtcctttgagaacgctggtttcgatcacaaggatttgttcttcatcgatggcagcacgcccagcgatgccatcatgaagaagttcctctccatttgtgagacgacaaagggagccattgcagttcactgcaaagcgggcttgggacgcacgggcagcctgataggggcatatatcatgaagcattacggattcactgctctggaggccatagcctggctaaggctttgccggccgggatcggtgattggacatcagcagcagtggatggaagagtaccatacgtacggtatcaacagcctggagctgaagaaaaaactggcctcggctgccgccgattccacagagcacgtcgatctgcttttaacccgagtgaagggcatttctcagcgggtagatacgatgcacctgaatgaccaggataacttagatgcagcttgtacggatcaaacggatgaggaactctcggagcagctgcgattggagcgggacgagagagcgctctatcaatccgttgaggatcccaattgcaataatagcgatgacaacgatacggacacgatcagtgcaccagcggatccgccgcctacctccagctatacaatatccacacggcgtaggaaatctccatcaggcgcgaacaaaccgacagtaatagccacatccctgaggcgcctggttaatcccaatgccaatcgcagtggattgagtacggcatctggagtttatcccactcctgagttggccagctgcacggagaagaagttgcgcaagccaagtgcaaatgtcttcgaggcagcccgacacacgattgcgtccaccgtcaggatgacacaaacggcgctcgaaaagaagcaggcccagacgcagggcgacaagctgaatcagatcaaggcgctgcgaaggcatcactcgcgatccgttaatgtgaacagcaataggtag

SEQ ID NO: 15795 - protein, 553 aa, DROSOPHILA
MLDDDNSDLLVCASEMQEDRLYFVAFKKNIKPKNTVNTHYFSVDEEFIYENFYNDFGPLNICMLYRYCMKLNTKLNAKCHANKKIVHYTSMNPAKRLNAAYLIGSYAIIYLNKTPQEAYRPLVAGEIPAYTRFCDASYGPSNFKISLLDCLNAVHKGLQAGFFNFNDFDAEEYEYFERVENGDFNWIVPQKFIAFCGPHQKSKTLPNGYPCHAPERYFSYFRDNNVTTVIRLNAKVYHASSFENAGFDHKDLFFIDGSTPSDAIMKKFLSICETTKGAIAVHCKAGLGRTGSLIGAYIMKHYGFTALEAIAWLRLCRPGSVIGHQQQWMEEYHTYGINSLELKKKLASAAADSTEHVDLLLTRVKGISQRVDTMHLNDQDNLDAACTDQTDEELSEQLRLERDERALYQSVEDPNCNNSDDNDTDTISAPADPPPTSSYTISTRRRKSPSGANKPTVIATSLRRLVNPNANRSGLSTASGVYPTPELASCTEKKLRKPSANVFEAARHTIASTVRMTQTALEKKQAQTQGDKLNQIKALRRHHSRSVNVNSNR

SEQ ID NO: 15796 - DNA, 3232 bp, DROSOPHILA
ggcgtggtcaaagtccagacccagctggcggcacttcaactgatagcctgcggcgcaaaggtcctccaggatgatcgtctgctccggctgggtcgtggaatagtagtgcctgcaaatagaaaaacgaaagttactcctcatggatcctagacacactgccgcttagaactcacttgggagccaaagtccaagcgctgaaactatccaccgccctccacatgagtgcctccagcttgggcttgatgtgcatgtagaaaagcgtctccttgttataaatgtgcaggcgggccagaatggcctgcttctcgtccggcatggacttgacgatcagggatgtctccattgcgcagctctcggcattgcgatacttaatctgagctcggtaaatgttgctgcagtagttttccccgccacgcgtcagattggtcagctggacaccgatgacctgcaggtccagctgctgcaatccgtgctccagggtgcgcctgaagaactgcggcgtaaggtacaatggtggctcctccagtgcgtccgacatcgtgtatccgtaaattgcaattgtggcggtgaacagccggctttttatgcaaaatctcggagagcacttgccgatgcctcatttgttgcctaattgatcttaatggacagggcacgactggaccttcctcaattgccttgatggaagtgcatttgccgctggattagcggtttgcagattgaagaacatagccgatttgcagatcttccagcacagatcgttgctggagtacccatttattttattatttaaatatataacacgaaatattatgccattttgaggaaattggccctatacaatgtcttcagttcaaacttaaagattccaaatatgtaagtataaaataaaatatattagtccttgaacctaaaactacactttaaattttttaattttttaaatttaaagaaaacaggagtgtttacattttcaaaccataattaaaaacgcctgctactcttaaaggttagttttggttatctctagagtggagggcgttcgtatcgttggcgccgtggtggccagactcctgctgggcatggttccgggtgtggggcaatttttggatcgcttgggcagagtagccgcccgcaaatagggattatcgatgttggggttctccaaaatggccttgtttgtgttggaattgggcttgatatccagctcgggcttctcctctttggatttgtcgccatccatctcctcgttttcgctatcgccctcttcgccgtcgtctaaaagggtggaaagtgttagcactcgtggcatctgactatttgaaagaaacgcacctttgctgggctcatcttctgtgcgattggccaccagatagtggtactccagctcctcgaagtcaaacacctgatctgtgggatttaaagcggctgcatagggaggaaaggccggtttgcaggcaattactgaaaggaaatggttattaattattgttcgctggatgattatggtgcctcttacaaggaaacatgttgtcctcggtgggaaagaggttgttcgtctccgtggtcttgcagaggaactttgtgagcgccttctcgatgtcccgcttctggcaggcggccttctccctgatggcctcgtactctgttacgggctgcttgtgcgtgggcgtccgtatgtaggcgtgcggatcgggcatgggagggaagtagctgggcacgtagtggggatgcggggccttgatgcccgcttgcagcagactcagcgggcgctgctgcgtctgctgtgggggcagtggaatgggcacgtgcgtctccttgcgcatgtacggatccaaattggagatcgaaatgcccatgttaatcagggccaaactgacatcgcccacggtgggcatcgtgcgtccacttagctcgcagtagttatgcgccgaattgccgatctcccagatcactggaatggcgtgctaaatgattatcctagtacaaaatggtaatcacaatgtcaacttacacgcctgcagcatctgggtgagcgtctccaggctgtggttgctcgcttggccggcccccttgtccaatagcagctgggacaccaccttgtttaggatccgcctatagggatcaacattggacactgttaccgcctccaccttctccatggagacagaattcaatttgtttatgctaaagtagaaaccgcagtgaatattgccactttagcggctagtgatggcactgttcggcactatcgactacagctatcggcgcaacgctccttatgagttcaagtgcaactccactggttatttcaatatttcatctggcattaagattttatgttagttaaaccaaggcttggcattataaatcctaaattttcagttcttaagagtttattgaaaagctcagtggaaaaacacgtcaccagagattgttaaactgatgaaagacattttaaattctgaactaagtcctaggaaataaagtaaaagttattttatgtatttatagaaacaggcaattttttaataattccaacaaactagttagttattcccctgcataagtctaaagcatctttttaagataaattctcaaccattattaaataaaatcgctgaggcgtcaacttatttataagctgcattacacagcaataacatattataatacaattttactgtactatattacttctatattagtagttattactgtacacttctactattccacactacttagtcatacactataccatagattcctcaaattgccttataatatttttaatataaaatgatgactgggcaaacatcggtagtcgatggttggttcaaaaacaatcgatatatagaaaggagtgcatcgcaggtgcaccatctccaacaaatcagtgtattttttgttgttctttgccaaacaatagaagacgaacgtactcggaagtaaattaaacaaaatcgggcgaccggatcgggcgttaatcgttaattgttcaattaaatgcagcttattaggcgccgggctgcatagtgcgatcgcagagtcaccgagtggaccgggccccctggcgctatagtcgcaatccgaacccgaatcgctccatcgggaatctttaattgtgtacgtatatatggatgaatatggatggatgtgtgtggatgctgcgttgactaatgtttttcggatggggtatagaacaaatgtataaatggatggctgagtattg

SEQ ID NO: 15797 - DNA, 1060 bp, DROSOPHILA
catcactagccgctaaagtggcaatattcactgcggtttctactttagcataaacaaattgaattctgtctccatggagaaggtggaggcggtaacagtgtccaatgttgatccctataggcggatcctaaacaaggtggtgtcccagctgctattggacaagggggccggccaagcgagcaaccacagcctggagacgctcacccagatgctgcaggcgttgatctgggagatcggcaattcggcgcataactactgcgagctaagtggacgcacgatgcccaccgtgggcgatgtcagtttggccctgattaacatgggcatttcgatctccaatttggatccgtacatgcgcaaggagacgcacgtgcccattccactgcccccacagcagacgcagcagcgcccgctgagtctgctgcaagcgggcatcaaggccccgcatccccactacgtgcccagctacttccctcccatgcccgatccgcacgcctacatacggacgcccacgcacaagcagcccgtaacagagtacgaggccatcagggagaaggccgcctgccagaagcgggacatcgagaaggcgctcacaaagttcctctgcaagaccacggagacgaacaacctctttcccaccgaggacaacatgtttcctttaattgcctgcaaaccggcctttcctccctatgcagccgctttaaatcccacagatcaggtgtttgacttcgaggagctggagtaccactatctggtggccaatcgcacagaagatgagcccagcaaagacgacggcgaagagggcgatagcgaaaacgaggagatggatggcgacaaatccaaagaggagaagcccgagctggatatcaagcccaattccaacacaaacaaggccattttggagaaccccaacatcgataatccctatttgcgggcggctactctgcccaagcgatccaaaaattgccccacacccggaaccatgcccagcaggagtctggccaccacggcgccaacgatacgaacgccctccactctagagataaccaaaactaacctttaa

SEQ ID NO: 15798 - protein, 328 aa, DROSOPHILA
MEKVEAVTVSNVDPYRRILNKVVSQLLLDKGAGQASNHSLETLTQMLQALIWEIGNSAHNYCELSGRTMPTVGDVSLALINMGISISNLDPYMRKETHVPIPLPPQQTQQRPLSLLQAGIKAPHPHYVPSYFPPMPDPHAYIRTPTHKQPVTEYEAIREKAACQKRDIEKALTKFLCKTTETNNLFPTEDNMFPLIACKPAFPPYAAALNPTDQVFDFEELEYHYLVANRTEDEPSKDDGEEGDSENEEMDGDKSKEEKPELDIKPNSNTNKAILENPNIDNPYLRAATLPKRSKNCPTPGTMPSRSLATTAPTIRTPSTLEITKTNL

SEQ ID NO: 15799 - DNA, 11205 bp, DROSOPHILA
ggacaataacctccagaaacttgaaatcaaacaaaccgacacggcgatgtggagctgacgaaaactggaaaattgtcaatggaaataattttgtttgctcggagctgggagaaacgattgagtagacttgacactgccgaaacgactaaagaataattttgcaaagacactagacaacgaaaagtttcccgatgtgttccacgtatgctgaggtggtcgaatggaatcgagtgtggaaatggaacaccacactgaaatgtaacacataggcaaccaacttgatttttgtgatcatcttcatttatttcggtttacattcttcactgctaggatatcctgatatttttttattagcgataagtcctacgaattgtgagagtagcactctgcaagggacaaataaataaccattcatcttctcactcggagatgaattgccctaagcatttgaaagaattattaatacatacataaacaaacggcttgcatcgtaaattggaatctgtaaatgtgcctaactaagcgtctaactaaactcaatttaaataattaaacattaatagaaatcacgtacattttaacttatatacaatattttttgcctgctctattgtgttggggtctatggggctgggcgaatactttaaggatcagcaaatcatttctaatacatatatatagaattatttagttaactaaacagtttcattcgcgggttgaacataaaatcaatacatcgatcccgtgtataagcgggtaggagagggatgggcatgtttccaatacacccatataaaacatttttcgatttttcgcttacaaactagttgtcttagactatatgctcgattcataagatttttcgaaaagaatatagtaaaaataatattatatatatgtgtgtgtgtatatgattcagttcgctcgacatctactcgcttatcgacaatgtttcgggtatacaatttatagatcgttaaagatcgggggctaattatggttacaacgtaggcagattggcgggcacctggtccaggaagttggccggaaactgtccctgacgacccgccacctcgccgtacagccaatcctcgttaatcctataaagcactgtaaccaattcgttctcctacgggataaagagttgttaaaaaatgatgttaaggcgctgcttcaaggataattacctgcaaggcgagatctccttcgacttcgcccgggaagtgatacaaacaaagcgccgtcggcagttgctgttgtgacggactgggtgacggtgctgcagcactagcggttggagctgcagcagcgccaccagtggcccccaatggcaccttgatgtccacgtagttaattggaaaaatgccctcacatccggaacgcgtgcgtccgcgcaaccactccggcgtgggatggtccaacagatagattttctcgccttcctacaaaaatcggcattactataatataattaaatcatatgagagtgtcaaggacttactctaaaactaagatcgcccggctcgatgccatcgaaatcgtaaagcgcaacggcgtaaggaaccacttcctcctccatgtagccctggcatccgttgctgagcgctagcgcatccactttcccgttgatcacgtccagcagtgagattcctccgctagatgccggcggcggcggtggtggtggtcctttgggcatcggcggcgatggtggtgtctccgatcctgcgtaacctgatggtatgctataacctggcggcaaatggcccccaataaatggcggtggtttcggagcctttggcttttgcgatatcttgggcttgatgatggtgggcatggtaagcgattgagtgggcggcaacagactcttgccattgcacagcggattgtccgagccgcgcgactgcacttggtacgtctgacgcactggggcggagccaaagctatcgactcccccgagtccaacgctatccaccgcctcccacggatccagcggactctgtgtggagggtcgtgatcgatgataatcgtcctcgaatccgctctccggctgcgaaacgctgccattgttgggcgaactaaagttgctgtccgaactgaagctgtccacgctgacgcagtcgctattggacttctgggtaaaggttggcgacgaagggggcgaatcgaagctgatgagctgcgcatcggccgtctgctgcgaggcataatgggagctgtggctgctgctcgaggtggtggttgtggtagtggtggccgtgttccacgctgcattccaatccacattgctaaaggccgccgacgatgcactgctgctgctgttgttacttggtgttgcaccggcattgccgctgctcaggccgtagacacgattttccgctgcagccttggaagcagcggcggatgccgtggacgtcgacttcttgcgatggaaaatgttcgacatgagtctgcccgtgccgccagtgaccgccgatgccatcgaggagttggacttggtcatgttctgcccattgaccagcaccttgggcggcggcggtcgcggcggtggcatcttcttgaagcgatcatttccgttgctcccgcctccaaatggatcgtcgtcccagttggtggccggcgtgtagcgtgcctgtggaaacttccgcgtaatgctcgtgccacccgttggctcgtcgaagaggctgccgttgttattgttgctgacggtggtacgtttgtgctgcgactgcagcggtcccttgggcggtggcggcagcttgatggtcagcttttggagtccaccgccggcgccttgctgttgctgcaggtgctgctgctgcagctggagacgcagctgttccaggctggcatttgccccagccgctgcgctctggccacgtgatccgggcggtgcgggcgccggtctcgatggaatggtcatgctatctgcaattggcccaaaagggtattcaattaacttcgtgtatagaacagaagagcagagcagcgttcgccataatggcgttccaaaaattaaacatgcaaaatcagtcggtgttgttatcgcaaatatttgtgcctgataagcgacactcacgacaagtgaattttcgtcgagtgctgcttcgaaattgttgcctcgcaccccaccaatgtgagatcggactttccgtggcacttttcttctactcaaaatttcaaaaacgaaacaaatacgaaatattaacgagtttgccggttttttgtgagcagaacattcagctgtcaaggaattcaaatgtcatttgaaagagatcatttatgaatgattgctctactcataattgtaacaaaattgtggcaatgttttcatcaaggaatttcttactcgtaatgcaagagcataaaaatgtacttttactttatctgaaggtcaagccaccctgcctttataatgaacattaagaaatgcttattgatttacaatgccagataagatgttagttagctaaagtacttgattcaagtggatttgcagcagagtgaagagacttgtgataaaatacgtacgcttcatttactgataagcaaaatggattttatgattattataagggaacacaatgaatcacgctagtaaagctccattgattagagcgatgattttcagctatcaacagctggcgaagtcgtttaatatcaataagtggcaacaatcaatcgacaggttagtactttgtgtttacgctgcaatgggccaaagaagcgaaagaataaatatagaacttgttgatttcgcaggggtttctcgaacatttacgtcatcgttcgcatccacaaatgtgctcatctgctaattactgcggttttttctacatctgaatgtctatttgtgcttttttttttcaaccaacgtcaagataataagcagtgaacaaaagtgatatcaatagcggagaattgaaacgtttttgagttacgccagagccagaaaatatgactgcagtgtgtcacccacttgttgggttgctttgcttcccggtgcccggcacatggtggaaccgaaccaagccgatctgagagcgcagctgaattggactgcatatgtgccacaagtgggataatcaggagccgggcaaaacacatgaacaatgcccagtgataagagcaaatccaatgtcgcctctcgcgagaacaacgaaatggtttgcgtaaacaaaacaatttttataaacaattttaagtcgcaaaaaatgttgagctatcaaaggggcggcgcgcgtatcatttgataaactaaacctattcgcatatacatatgtaaagtatgtatatttttgctgcgatccaaaagatgggaggatggtcgaaaattagtgcgtcacatggagaattcccagaagccccccatccgcggaaatgaaatgacaaaaaagttgggaggatatggcgccgtggtaaacaattttccgcctctttgggtacgggtgtgtatatttagtggtaaatatgtttaagcatatggccggaattacatatgtttattgtttctgcgaacacaaaacagttcgcaaatatttgtaagcacttttgtcttctttatgtgaaaagtggtttccgccagaaagaacttgttaaaatatacgtaattctaaggccaaaaaagatctaagaaacacaagaaacaaactgacaacatagttatatataaatggatcaaattatgaacgatttgttttcgcttaatcaaacaaacgtttcgattttaaattacaaattcacattcatttaaaagtcaatgatcgcccaaagaatctgaacaatatgccatttaacggatggtccgaatgtgtgcacaaaagaactggaatttcatttttagatattttgaaaactttcaaactctttcagtcgcagtcgtaaacaaccaaacataccgaatgaacgctgcatgcgaaattcatgcaaattttccatgtcatttatagagaagacctttcgtgttagtaaaataaacacaaaacttgggcgaatgaatagccaaatctctgttcatttcgcccatcattgaataacttgctgcacaaaaaaaaaaaaaaaaaacaattgactggctgctaaactgtgacgttaatggcagacacgttttcaacggttaaacgtagaacaaacctggcgtttacaatctaattaaaatcaccttcagaaggtgatgatggccaaccgcccaccgcccaattttcacccaccaccagtttgttggggttccttccactgaatgccaatttaatcattttgcttactattcgctttgtatatggacacatgtgcaaaaattgaagagcaaagaacatgagcactcagtctatttacaatggcaaacacgctttcctttttcccattttccgcgtggcgtcagtaaaattgatcaaataatcatcctaatcactggcgggggcaaatctaaataaatgatgacagtgaacgtttatatgagctgctctacattacacccattatcaggccatttaagcaaattaaacttgagttgcagctaatgagaatcacgcatattagaaggcaaataaagttaagcactagcgtaaaataaggcaacaagttagaaactagtttataccacgttggttagaagagcaatttggctaaaatctctatttaaaattggacgaactggtcgagtaaaccttgtaaggtgttcctaagatcaactgattcttgatttctaataaattcgatctgagttctttccttgatctagcgaaaacttgaaatcagttcgataccttcggaggtgtgtaataaaaagctacttcttttcagcggttcaagctcaagagcattcgatgctaaccggtttgcacagcgactccctcccttcattcgccacaagatgagaatgaagtctgtgaaaatgtctgctaattgcttgttttcatttgggttttttttttcagtattttcagatacggtttttcatgtaactgatttccagtgcaactgcgctaatgggttgcgatgaatgattcagtcgccggttgacaaaatgtgtgggcaaatacgctctgtgatgcgagacacttgggttttggggcaacttttactttactgacacggtggaccatcatcatcctcaagcttgaccgcacgttccgagcaaagtctcacgaacaatggaagtcggaggaaagcagaacaaaagaaagtgacaaacacatcgatctcaggcatatatgtatatattgtatatataaatatatatatacagagtgtgtggggtggagctgatttgttcaaagactagtgagagcgatattggtaatcgagtggtattaattggactggattgcgtttgaaagagcaatttccatgctccgcttttaatgaattgtgctctaacccagcatttctctttccacgatccaaatttccttttgccatcgattgttgacactacaaattgtcgatagatagatactttgacattatcgttgacggtgccttaaaaaaaaaaaaacaggcgcgacgaccttgaatgcttttattttcaatggccaaataaaaactagaccacaatcacatcacaaagggctacaagtgctccattagtcgtctccgacttgcgccacttgagcgctccatgaaaagcattaacctctgaatgatttggatctctcgattggagtagtacacagcaaaaacgatatattaccagccatatagatatgtatatgtgtatattgtaatagaagaaagttgtttagtttgtcacgtttgaaatcatttcttttcgaatcattccactcatttctgtcctctggtattcctttcaaaaactataaaatgtcatgagtaatttgtaatgtcgcttgattcagtttacacgataaaagaattgtaaaaaaaagaagtgtttctaaagcaaatatacatcaagtgaaataaatattaaataacactcatttcttgaggtgtagcgtaaaaatagcaaatgggagcagcggcaataaaagctcccccatcagatgaacaaaataaaacgaaggcaatgctcgtcgtaacgtcgaagtcaattgaatttaatgccatacattgcaagttaaatgaacttaactgaaacaagagagaatgatcaagtcgatttcctcgactatcagatacccgttactcagctagtgtgaatgcaaaatttcatcatttttctgggatatcgatgatgttgggtaacaaaatgagaaaatattttaacaattttcaaaagtgtgggcgtgaccgctttaacggctttagggcgttagagtgacgtggcaaaaagccacgatgcgtggtccaagcttccggagttcaaaaaaagattttttgtactcggctagctttgccctactctacgattaacggttataaaaacacgcccaacttttggcttccttcgctggtgtcagtagttgtttttcaagcgcctcaaaacctgcccaatatggcagaatcagaatcgaaaagaacgtgcccgcaatgcgttcatgcaattaagcaaattacggagagaacaacgaagccgaaatcattcaatttacatcaagtgcgataaagatgggcaatgatgggaaaacagagccatgctttgttcaattctttgaggttaaggtttattgagctctggcgatctttaaaaggcagtctcgttcgtcgaaagagctctttatcatcgaggggttaaagattaatgagcgcttgtggatacagcttgaatctggtgcgacaacaatctttacgcagatacacgctagcaaatatttgatcggcaaatttggcgctctaagcagcagcagtcttaacagaaaaaaaaaatctaaaattcttataggggagaccggaaaaggcgaagaacaggcaaaagcccaaatgcaaaaacgggttttacttacttaacccaagattttgcatagtcttcacaagtcttcctactaatttttatttgctatgcaaaagcggaatgaataagtatgaaataggtgaaataaccattctacattgtcagcacgttttcctgttcatcgtatacatacgtacgtattatgtatgtatgtatttttctgtactttttgttctccctgccgttccattccagctcgtgcagttcgttctaaaagcgtatttacatacacacaactattgatagacatactgcatatacaatgtagttttgtgctaaacccacaaattctagacaaacaatgcggtctgaaaattgcacgtttgcatgtaaaatatatggggagcagcagatgaaattcatcactgaatgctcctccatctcctacccctgcaatccactcgtgcgtttcatggcgggacacttggcgaatgtgggtcaaagttgaacacaatcagagctgaaagcttacatcagtactttcgaacacgcccacatttctgtgcactccaatgtgtatccgagtactgagtgcaaaagcaaaacacttgccgcccatttcagtagttaaaaaacaatgcactttgaaaagcctataaagaggatcttttgtgccatttgcgtgtagcatcagattcagtcgtataaatgatacccttgggcgtataataatatttaatattctgatactttttgatatcatctgccgttatcataacgaaacggtgtatacgatttaagtaagcatattaaaccgctttattgcttggcatttcataagattgcacttctctaaaagattgtgtaatatatatatatatatatgtatatatacattgcgtgatatacatttcctgtttttgtcatatgaagattgctctgcgaagggtttttatcactgggcactggcgtagagaaaaagggtgctggaatagcatatgttatatggttatggctaccatgtgaggatcgcccgaaagtcagtcagctggaaagtgaggtaagcgcgcaaatgcaccacctgctgcgtccgaaagtgacaaaacgaaaacgaaactccttcggttttctattttattaatgggtaaagaagaagcttcgtgcagagttacacagagagaaaaactgcaaatgtatgactcgtaaaaaaagtgtatttagtgaccaatggtgaccatttgaagcggtatttatgtaggcagctgttctctaataattccagttattcgttaaatgcaatgacagtgtttttcgtgtgctggcgattatgcagtcaaaacagaaaatgggtttcccatcccatccataaatgtcactgtactccccgcttatcgcttgaggcttgagtaaacagtcggaacaaacgtagcatatcggtttatgcaatactttttgaattgtacaataactattgtgcagtcgccaagtttccccttttgccttatacttgcagtcagccgggcaaacatttaattaattaacaaatgcgaccttgactggaatttcaattaagtaagtagcttgagcaaaactttgatgagaatggtggagtgatgttacatatgtatgtatgtttgcaaaagcaagcagttgtcagggtgatgttgtggttaaatatcaattgcgggtaactaaccttttggtgatttccgattcgttccgatccgattcgtttcgattcaaaaaaaaaaaaccgatccgcaaagttggtttagtggtttttttttgtctttgcctttttggttcgcagagggtggaccaaaacagttaaaagttaaagagagtgactaatgccgcacgcacacagtcgcactcaatttgttgtcatacacacacagagagacaagcgcacactcgcgggcatcaactttgcactcttctcaccccctctcgctcgttcactcgcattcaaggtggttaacgagaggtgagccaacaaaaacaacaacagcagcagccgcggagcgcactcacacacacgcgctaaatagctgaacagcagctgcaaaagtagtagcacgtatccgcagagacaaaaacgaagaaagcaggagatggagaaggaagtgcgcctgcagctgcgacaattatcacccgattatttcgcagcgtgtattgcgaaatgtgcgccttcgatttgctaaatacttttgcttaattatacgcacgcacacacacaccaaggcactttcccataacgaatttaattcaattcaacgacgtgctgcacgaatcgctttcagctgtgcatttaatagcgatatttgtcggccttgatatgcgtcgatgtttttcaatggtgtcgcagaagagttatggaataatttaattatttttcgtttttattgcgccgcgaacgcgtccgttatgttgattctgccagagtgaccgtggcttgcagtcgaaataatccagcgattaaaagtttaattttcccgcggttttcagcactgttttctatcgattaatttaaatgcttagatgtgtttccactggcatcatggttataataggttttaacttgtttggttccttttgaaagtacttaatctaattatactctccttgactaattgctttggaaaatgttgatagcgaaacctttgtttttaataaaagacaactgtttcttctcttgaaatctctagtgtgaagatgctgaaatgacccacgatgtaaccgtttctccggttaaattgcaacacagtctgaccagatcaaggtgcccaagaaaatacttccaaattaaaagcaaactttgctttccgcatcccttagaaaaatagaatcccgatatatattatttggactgctcgaacgccgccgacgagcccaaaaacgcgcgcacatttacaacgacaacaatacaaacttgagctcagtacgtaaacttttttgaccagctgccgttagaagcaaatcaaagctgcgacgatggatgactcacgcgaagaaagccagttcattgtggacgacgtgagcaagacgattaaagaggccatcgagacgaccatcggcggtaacgcctaccagcacgacaaggtgaacaactggaccggccaggtggtggagaactgcctgacggtgctcaccaaggagcagaagccctacaagtacattgtgaccgccatgatcatgcaaaagaacggtgctggactccacaccgccagctcctgctactggaacaacgacaccgacggatcgtgcacagtacgctgggagaacaagaccatgtactgcatcgtttcggtcttcggactggccgtctagagtggaggaatggcaggactgccgga

SEQ ID NO: 15800 - DNA, 2468 bp, DROSOPHILA
tgaaaaacatcgacgcatatcaaggccgacaaatatcgctattaaatgcacagctgaaagcgattcgtgcagcacgtcgttgaattgaattaaattcgttatgggaaagtgccttggtgtgtgtgtgcgtgcgtataattaagcaaaagtatttagcaaatcgaaggcgcacatttcgcaatacacgctgcgaaataatcgggtgataattgtcgcagctgcaggcgcacttccttctccatctcctgctttcttcgtttttgtctctgcggatacgtgctactacttttgcagctgctgttcagctatttagcgcgtgtgtgtgagtgcgctccgcggctgctgctgttgttgtttttgttggctcacctctcgttaaccaccttgaatgcgagtgaacgagcgagagggggtgagaagagtgcaaagttgatgcccgcgagtgtgcgcttgtctctctgtgtgtgtatgacaacaaattgagtgcgactgtgtgcgtgcggcattagtcactctctttaacttttaactgttttggtccaccctctgcgaaccaaaaaggcaaagacaaaaaaaaaccactaaaccaactttgcggatcggttttttttttttgaatcgaaacgaatcggatcggaacgaatcggaaatcaccaaaagatagcatgaccattccatcgagaccggcgcccgcaccgcccggatcacgtggccagagcgcagcggctggggcaaatgccagcctggaacagctgcgtctccagctgcagcagcagcacctgcagcaacagcaaggcgccggcggtggactccaaaagctgaccatcaagctgccgccaccgcccaagggaccgctgcagtcgcagcacaaacgtaccaccgtcagcaacaataacaacggcagcctcttcgacgagccaacgggtggcacgagcattacgcggaagtttccacaggcacgctacacgccggccaccaactgggacgacgatccatttggaggcgggagcaacggaaatgatcgcttcaagaagatgccaccgccgcgaccgccgccgcccaaggtgctggtcaatgggcagaacatgaccaagtccaactcctcgatggcatcggcggtcactggcggcacgggcagactcatgtcgaacattttccatcgcaagaagtcgacgtccacggcatccgccgctgcttccaaggctgcagcggaaaatcgtgtctacggcctgagcagcggcaatgccggtgcaacaccaagtaacaacagcagcagcagtgcatcgtcggcggcctttagcaatgtggattggaatgcagcgtggaacacggccaccactaccacaaccaccacctcgagcagcagccacagctcccattatgcctcgcagcagacggccgatgcgcagctcatcagcttcgattcgcccccttcgtcgccaacctttacccagaagtccaatagcgactgcgtcagcgtggacagcttcagttcggacagcaactttagttcgcccaacaatggcagcgtttcgcagccggagagcggattcgaggacgattatcatcgatcacgaccctccacacagagtccgctggatccgtgggaggcggtggatagcgttggactcgggggagtcgatagctttggctccgccccagtgcgtcagacgtaccaagtgcagtcgcgcggctcggacaatccgctgtgcaatggcaagagtctgttgccgcccactcaatcgcttaccatgcccaccatcatcaagcccaagatatcgcaaaagccaaaggctccgaaaccaccgccatttattgggggccatttgccgccaggttatagcataccatcaggttacgcaggatcggagacaccaccatcgccgccgatgcccaaaggaccaccaccaccgccgccgccggcatctagcggaggaatctcactgctggacgtgatcaacgggaaagtggatgcgctagcgctcagcaacggatgccagggctacatggaggaggaagtggttccttacgccgttgcgctttacgatttcgatggcatcgagccgggcgatcttagttttagagaaggcgagaaaatctatctgttggaccatcccacgccggagtggttgcgcggacgcacgcgttccggatgtgagggcatttttccaattaactacgtggacatcaaggtgccattgggggccactggtggcgctgctgcagctccaaccgctagtgctgcagcaccgtcacccagtccgtcacaacagcaactgccgacggcgctttgtttgtatcacttcccgggcgaagtcgaaggagatctcgccttgcaggagaacgaattggttacagtgctttataggattaacgaggattggctgtacggcgaggtggcgggtcgtcagggacagtttccggccaacttcctggaccaggtgcccgccaatctgcctacgttgtaa

SEQ ID NO: 15801 - protein, 600 aa, DROSOPHILA
MTIPSRPAPAPPGSRGQSAAAGANASLEQLRLQLQQQHLQQQQGAGGGLQKLTIKLPPPPKGPLQSQHKRTTVSNNNNGSLFDEPTGGTSITRKFPQARYTPATNWDDDPFGGGSNGNDRFKKMPPPRPPPPKVLVNGQNMTKSNSSMASAVTGGTGRLMSNIFHRKKSTSTASAAASKAAAENRVYGLSSGNAGATPSNNSSSSASSAAFSNVDWNAAWNTATTTTTTTSSSSHSSHYASQQTADAQLISFDSPPSSPTFTQKSNSDCVSVDSFSSDSNFSSPNNGSVSQPESGFEDDYHRSRPSTQSPLDPWEAVDSVGLGGVDSFGSAPVRQTYQVQSRGSDNPLCNGKSLLPPTQSLTMPTIIKPKISQKPKAPKPPPFIGGHLPPGYSIPSGYAGSETPPSPPMPKGPPPPPPPASSGGISLLDVINGKVDALALSNGCQGYMEEEVVPYAVALYDFDGIEPGDLSFREGEKIYLLDHPTPEWLRGRTRSGCEGIFPINYVDIKVPLGATGGAAAAPTASAAAPSPSPSQQQLPTALCLYHFPGEVEGDLALQENELVTVLYRINEDWLYGEVAGRQGQFPANFLDQVPANLPTL

SEQ ID NO: 15802 - DNA, 3563 bp, DROSOPHILA
ttgcactcgcaatcgatcaaattgagcatcccaccatagcaatttattttggagcacacgtcacttgtacatgtagatcacaatgtagttcttagtgtcggcaccgagcatccagatgttgtatgtgaccatttgggatggtacatgagcctactaataccgatatcttctctactctattccgccatgatatccacgtccggatgagcagaagaaacccgactggtccaagggcaagcccggagatgccaaggtgaaggaggaggttgaggccgaagcttaagtgtccacacgtccactagtgtccactgacccgtgactcccgccctaaacaataattgaaattatttacaacaattatctgaagcaatataatttatatgaatctattaatatatatatatatccgcaaatatatatgcatgtatatatctcgccatatatatgtgtccacaatggatttgatcagaaatgaagtcaataaacaacaacagcaacaactaaattaactcaaaatcaaaatcaaactcagactcaaactcaaactcaactgcttataaataattcagatcaacgattcaaaacaacagccaaacatctgaacgccttgatgaattatttattatatttcattatttacaaattatattttttaatgtaaattaaattaaattacaaaaaaaaaaaacgaacattctttctaccttgccatgcccaaaatcatcttttgcacacaaacactgagcgaaataatctttaaaatggttgagattttcaggaggggatcgaaatctcacgatctcgaatatcataaatacagtatagttttgaatgaaaagacagcgatattgaaaatgtatgccaaaaagtttattgcatattgtattgtaatggtattatcgtgcatttttaaggggtatctgatagtcacgacactaatctacatcgtgcttttttgtttataatagaatgggttttggtttgattggaacatgctttgcaacatgtacaaattcaacaaggcctttataatttatttgaaaatagacaaaaaaaaaatgtgtttacgaactatgtatataccgcctagtcgaacagtttcaactcgtccagacgtttcaaggtgcacttgaggctctccagcgtgcgagtgtttccttcgaacatgagctgcaccttctgcctggcgaatgtctcgtcgtgaaagttcttcagtgagttgtcctcggagtccacaccgatcatgctcatcagcgggaagaatccgaaagccacaaagaaaccgtaggcttcgcgctttctgatttcatccatgatatcctcatagctgggcagctccttggaccagggcagatgcttcaggcagtccaccagggacctgtagtagatgtcgacaagctcctgccgccggtcacgtagcacctccagttccaagctggtgttcaggaagtagttgatgtcgaagcccaggctgccgtagaagcacagctggaagtcaatctgaaggggcagtaaaaagggcattaaaggatcagtcaattctgatataaacactagctactagctgctagttcttagttggtttatgaagaaataaataatctaatattggagattgctggaagcctcaatttttgtggccaaccttttggtacttacaatcttcacctgctgcaccgtgtactccgcatcgtacttgaagaatatgttgttcacccaaagatcgccgtgattgagcacgttatggttgccgcgcagtgggtacaccgccttcaggactcgttcggtgaagtgctcgtggtagcggtagagctttgtggtgatcccaccgaatccctcacagtcaccgaccagagcggccagctttaggagctgagtgccgaagagcagcttgaagggctccgaattgatggcatccatgtggagcagaccgaagggatagcggtccacaatggtttctggctcccgttcggccatgaccatggtgagggcatggtattcggccagtttggccatcaccagagcggcgtggtcaaagtccagacccagctggcggcacttcaactgatagcctgcggcgcaaaggtcctccaggatgatcgtctgctccggctgggtcgtggaatagtagtgcctgcaaatagaaaaacgaaagttactcctcatggatcctagacacactgccgcttagaactcacttgggagccaaagtccaagcgctgaaactatccaccgccctccacatgagtgcctccagcttgggcttgatgtgcatgtagaaaagcgtctccttgttataaatgtgcaggcgggccagaatggcctgcttctcgtccggcatggacttgacgatcagggatgtctccattgcgcagctctcggcattgcgatacttaatctgagctcggtaaatgttgctgcagtagttttccccgccacgcgtcagattggtcagctggacaccgatgacctgcaggtccagctgctgcaatccgtgctccagggtgcgcctgaagaactgcggcgtaaggtacaatggtggctcctccagtgcgtccgacatcgtgtatccgtaaattgcaattgtggcggtgaacagccggctttttatgcaaaatctcggagagcacttgccgatgcctcatttgttgcctaattgatcttaatggacagggcacgactggaccttcctcaattgccttgatggaagtgcatttgccgctggattagcggtttgcagattgaagaacatagccgatttgcagatcttccagcacagatcgttgctggagtacccatttattttattatttaaatatataacacgaaatattatgccattttgaggaaattggccctatacaatgtcttcagttcaaacttaaagattccaaatatgtaagtataaaataaaatatattagtccttgaacctaaaactacactttaaattttttaattttttaaatttaaagaaaacaggagtgtttacattttcaaaccataattaaaaacgcctgctactcttaaaggttagttttggttatctctagagtggagggcgttcgtatcgttggcgccgtggtggccagactcctgctgggcatggttccgggtgtggggcaatttttggatcgcttgggcagagtagccgcccgcaaatagggattatcgatgttggggttctccaaaatggccttgtttgtgttggaattgggcttgatatccagctcgggcttctcctctttggatttgtcgccatccatctcctcgttttcgctatcgccctcttcgccgtcgtctaaaagggtggaaagtgttagcactcgtggcatctgactatttgaaagaaacgcacctttgctgggctcatcttctgtgcgattggccaccagatagtggtactccagctcctcgaagtcaaacacctgatctgtgggatttaaagcggctgcatagggaggaaaggccggtttgcaggcaattactgaaaggaaatggttattaattattgttcgctggatgattatggtgcctcttacaaggaaacatgttgtcctcggt

SEQ ID NO: 15803 - DNA, 1340 bp, DROSOPHILA
atgtcggacgcactggaggagccaccattgtaccttacgccgcagttcttcaggcgcaccctggagcacggattgcagcagctggacctgcaggtcatcggtgtccagctgaccaatctgacgcgtggcggggaaaactactgcagcaacatttaccgagctcagattaagtatcgcaatgccgagagctgcgcaatggagacatccctgatcgtcaagtccatgccggacgagaagcaggccattctggcccgcctgcacatttataacaaggagacgcttttctacatgcacatcaagcccaagctggaggcactcatgtggagggcggtggatagtttcagcgcttggactttggctcccaagcactactattccacgacccagccggagcagacgatcatcctggaggacctttgcgccgcaggctatcagttgaagtgccgccagctgggtctggactttgaccacgccgctctggtgatggccaaactggccgaataccatgccctcaccatggtcatggccgaacgggagccagaaaccattgtggaccgctatcccttcggtctgctccacatggatgccatcaattcggagcccttcaagctgctcttcggcactcagctcctaaagctggccgctctggtcggtgactgtgagggattcggtgggatcaccacaaagctctaccgctaccacgagcacttcaccgaacgagtcctgaaggcggtgtacccactgcgcggcaaccataacgtgctcaatcacggcgatctttgggtgaacaacatattcttcaagtacgatgcggagtacacggtgcagcaggtgaagattattgacttccagctgtgcttctacggcagcctgggcttcgacatcaactacttcctgaacaccagcttggaactggaggtgctacgtgaccggcggcaggagcttgtcgacatctactacaggtccctggtggactgcctgaagcatctgccctggtccaaggagctgcccagctatgaggatatcatggatgaaatcagaaagcgcgaagcctacggtttctttgtggctttcggattcttcccgctgatgagcatgatcggtgtggactccgaggacaactcactgaagaactttcacgacgagacattcgccaggcagaaggtgcagctcatgttcgaaggaaacactcgcacgctggagagcctcaagtgcaccttgaaacgtctggacgagttgaaactgttcgactaggcggtatatacatagttcgtaaacacattttttttttgtctattttcaaataaattataaaggccttgttgaatttgtacatgttg

SEQ ID NO: 15804 - protein, 417 aa, DROSOPHILA
MSDALEEPPLYLTPQFFRRTLEHGLQQLDLQVIGVQLTNLTRGGENYCSNIYRAQIKYRNAESCAMETSLIVKSMPDEKQAILARLHIYNKETLFYMHIKPKLEALMWRAVDSFSAWTLAPKHYYSTTQPEQTIILEDLCAAGYQLKCRQLGLDFDHAALVMAKLAEYHALTMVMAEREPETIVDRYPFGLLHMDAINSEPFKLLFGTQLLKLAALVGDCEGFGGITTKLYRYHEHFTERVLKAVYPLRGNHNVLNHGDLWVNNIFFKYDAEYTVQQVKIIDFQLCFYGSLGFDINYFLNTSLELEVLRDRRQELVDIYYRSLVDCLKHLPWSKELPSYEDIMDEIRKREAYGFFVAFGFFPLMSMIGVDSEDNSLKNFHDETFARQKVQLMFEGNTRTLESLKCTLKRLDELKLFD

SEQ ID NO: 15805 - DNA, 2450 bp, DROSOPHILA
agccgccgaaaagcatccttaatctcactgtcggtggcatttctcggtaagcccagaacctggtagtgatcttcgtagacatcgctcattttggccaattggtctatttgatgggagaataattagatgattttatcgatagtagcacgatggtcagtggtttttggtgcagaagtcggtatttattgatgtttatgttgcgggatgtaaggcactgggaaaacctgagaaaacactaaagctgattctttcattacaaatagagatgcacatctgaaatgtgtgttatctttgtatggaaacaacatcgataaatacatcgtgtcatttgtcgtgtcatcgtgtcagcgaaataatattcgcgacaagaacatattgtttaaggaaaataaatgcgtctttcgtttcttcatttgccatcatattttattgagaatacgagtcattaggtggccaacagaaacaaaatctagaaaaatatgtcttttttttcagaacaaaccattatatttccgtcttatctggtacataccaaagacactagaatattctagtgttattctattctattctattattattattctagtgtctttgtacatactatatgtagtagcagactggctctgcttagcaacaatttgtaataagcaagtgcatttaattttctctactatggcattgttatattttttactatttgtatcgcataaacgttttttaaattaaaaaaaaacaaaactattagttcgtcttacagtatttatccgttttatcattcgatttggctaaaggtattagctattttcgagcaacagtcggacgaattccataatttttatttatcttactaaataaataaataaattaatcaataagtaacgcaggattcattagataaacagtcaataattaagttcctataaattaatcttaaagactattcagcgaagaacgctaggtacccgagattgcttcatcaagcccttggatccttagctcagtccgaggaggatccatcgccgtgggtagcctcttttttccggttgaagaactggaatgtcttgtaggcggcgaacgcaaagagcacggttcctccgacggcgcacatgaaggggagcatgtctggcgtgggctgggcgaaggtcgcagcaggctcgtcatcacatttgagaccctcctcgccgtgctggtcgtatatctcgcgcttttccttatcaaagagcacttcgaaggcggccaccacctccctaaactgctcctcggcctgcggatggtcgttcttgtccggatggtagcggagagccatccggcggtatcccttcttgacgtcttcgctggacgcattcctctcgatgcccagaatcttgtagtaatccttacccattgtggtgaaatggtattctccttgttctggctgagatggtcgtctagcggtgttgcgccgtgtatggaatgtgaggcagcgtctcgacttgttggtgcttatgtggtaatgcgagtatatattgctgattcgattcgctgatttaaaacattattacaaataaacagtcaatcgataaattatcggccgccagtggccagagtgaccctaccttaccaccagaagcactgttagttaacagaagagattctgacgatcgtagcagctgtataggagcactattagcctattagtaattaatgatctgttaaatctatcttttttgagtactttaaaaggaattacacatttcgaaaatagaaaatattcatatcgcttaccggttttggtattttttcagaccgtgcggtatcttattcgccatcgaagcggtcacactgggtgccgccgccaacttcactctttccgttctgtgagcgaaaaccgaaaagtctgtgctttggtaagtgttgctaaaagttcggaataatgttgcatcccgagcattttcgggtacataactgttccacggcggtggtccagcaaagactaatcgttatcacgcctttcgcagttcttaaattcacccgacgagtccctaatacacaattaaaatggttagggagaacaaggcagcgtggaaggctcagtacttcatcaaggttgtggtaagtatagaaccttatagaattcgctcactagctggcgcctggcttatgctgttaactgatccctcctccaggaactgttcgatgagttcccaaagtgcttcatcgtgggcgccgacaacgtgggctccaagcagatgcagaacatccgtaccagcctgcgtggactggccgtcgtgcttatgggcaagaacaccatgatgcgcaaggccatccgcggtcatctggagaacaacccgcagctggagaagctgctaccccacatcaagggcaacgtgggattcgtgttcaccaagggcgatctcgccgaggtgcgcgacaagctgctggagtccaaggtgcgcgcccccgcccgt

SEQ ID NO: 15806 - DNA, 450 bp, DROSOPHILA
acacggcgcaacaccgctagacgaccatctcagccagaacaaggagaataccatttcaccacaatgggtaaggattactacaagattctgggcatcgagaggaatgcgtccagcgaagacgtcaagaagggataccgccggatggctctccgctaccatccggacaagaacgaccatccgcaggccgaggagcagtttagggaggtggtggccgccttcgaagtgctctttgataaggaaaagcgcgagatatacgaccagcacggcgaggagggtctcaaatgtgatgacgagcctgctgcgaccttcgcccagcccacgccagacatgctccccttcatgtgcgccgtcggaggaaccgtgctctttgcgttcgccgcctacaagacattccagttcttcaaccggaaaaaagaggctacccacggcgatggatcctcctcggactga

SEQ ID NO: 15807 - protein, 128 aa, DROSOPHILA
MGKDYYKILGIERNASSEDVKKGYRRMALRYHPDKNDHPQAEEQFREVVAAFEVLFDKEKREIYDQHGEEGLKCDDEPAATFAQPTPDMLPFMCAVGGTVLFAFAAYKTFQFFNRKKEATHGDGSSSD

SEQ ID NO: 15808 - DNA, 3820 bp, DROSOPHILA
acacagttcccttgcttccgggtctgaagatgccgtcacgcaaaacagtgggttccgagcagtctgctgaatcgatactcgaatgtctggagatatccaaacagttcgagctcgaggcggaggagaaacccgagttacatcctctgatgcaggctttgcaggttaagaatcccgaagacttcctggtcagcaccctgatgaggatacgtgcgtccgatctggaggaggcacttcttctactccccttctccactgtgtgcgaagtcctcgaacgcctgcccactctgctgacccagcgacccgaccaactggagctgctttgccgcgtcaccatcttcctgttcaaggtgcacatgaagcccatttcggcggctaagaacatgaagccgctgctcgtcaagctgctctcgatgctcaagcgggacgttggtcagctgcgcgatgtcttaggatggaacctgcacggtctggccctgctgcaaacggaagtggagcagcgcgatggtgtccagctcttcagggaggccacacagacccgcaagaaacgggataagaagcggagagaagccagcaagcggaggctgcagattcaaatggtttgagacgcaataccctagacttagttgtataaatccaattaaaacgattagttattccgtgatttactggatttctatatttctgtgaacagagtttaatttgacaatgaggaatacaccataattcataagccatgtattggatcaccggcaattttctgtatatgcatatgggattgacaaaatcggataaaagcgatggtgcagcgaagcaaacggatagcgccgctcgattaatggatgcagttcgcaaagcgaaccctttgacaagcatttacaacagaaaacaacatatctctttagaagacgtggactgaaagatttagcttgaacataaaacgtagaactcgggatgagcttgggagacggattcttcagagcaaccataatgtatttccaggctaacaaatgccggctttgggaaaggtgccatcgttagcgccagttccacaaggacctgtttgggattatgcatttttttttataaatgctaggaagtaaatctggtgataacctacctccgcagcgctggaaggcacctggcggtccgtagctaagtttctggatggtacacttctcaataggtccggttggccggcagtaggatgtgtacctggcccacggcagtggctccttgggcggcacacagttcggcaagtagctgagtttgtatgtggtgcacttttccatgggtccctcgttccggcagaatccctgtcgtggtcggacggactcggcgcgtgggaaacaggtgacatccaccggcatgtacgacaacttgttcaccgtgcagcgctccatggctccagtgggccggcagaaggccgttctcggcatgatcggagccctcctcacgtggggcttggccacaaaatcgtgtttctgagtggtcatcgcatacatgggcccgtcgaatcgcagaccattttccatcgggcgaatcggaggagtgcgctccgtgcagttcggttgataggacagctaaaaagggagagattacgtgttttatacgaaactttggtgagttggatgacttgccttttgaatggtgcacctttccagcggtcctgagggccggcagaaagtgtccctgggcaggacgggcgccggtttggtcctggaggcatccacgggcatgtagctcagcttgtacaccgtgctgccggaaccggcgtcgttgccacagaagcgcaaggtggtaagcggcgtcaccggagccgtacgtgcctcattgcagttgggcatgtagcttaggttgtaggtggtgcagacattggagtagcgcggcggcacacaacgtattttgtcggcccagggcgtgggctccttggccggcaaacagaccggcatgtaggacagcttttggatggtgcagcgctccatgggtcctgccggcttgcagtagtgcgatccctggaccatggccttcggaggcggattctggcacacatcgatgggcatgtagctcagcttctggatagtacagcgctccatcggtgcattcgacgtgcagatagccacacgcggcttaatgggatcccgcttcacgatccccttgggcacgtagtcgtgcttctgcgaggtcatcgcatagatgggtccctcgaagcgcaggccgctctccatgggaacaatgggtggcgtccgcttaaccggacagggtggcatgtaggataacttctgtatggtgcacttttccagcggcgccgtggatgctcgtatttgggagcacggcattacgggtcgggccctaatgttgtcgccacagttagcatagaacgatcgtcggtatatggtgtccgtgtccagcggcgctgtggagcgcatgaagtgcgacttgggcaggatgggcatggtgcgcggcggctgctggtagcagcatcctgcatagtcgccgcagtcgcaaggcggacacgttgaattcggcggacagggcgagaaatccgtgggcgcctggcagggatcgcaggcattttggcaatacgtgttgcaatcaccggacatggctgattatgggacaataacctccagaaacttgaaatcaaacaaaccgacacggcgatgtggagctgacgaaaactggaaaattgtcaatggaaataattttgtttgctcggagctgggagaaacgattgagtagacttgacactgccgaaacgactaaagaataattttgcaaagacactagacaacgaaaagtttcccgatgtgttccacgtatgctgaggtggtcgaatggaatcgagtgtggaaatggaacaccacactgaaatgtaacacataggcaaccaacttgatttttgtgatcatcttcatttatttcggtttacattcttcactgctaggatatcctgatatttttttattagcgataagtcctacgaattgtgagagtagcactctgcaagggacaaataaataaccattcatcttctcactcggagatgaattgccctaagcatttgaaagaattattaatacatacataaacaaacggcttgcatcgtaaattggaatctgtaaatgtgcctaactaagcgtctaactaaactcaatttaaataattaaacattaatagaaatcacgtacattttaacttatatacaatattttttgcctgctctattgtgttggggtctatggggctgggcgaatactttaaggatcagcaaatcatttctaatacatatatatagaattatttagttaactaaacagtttcattcgcgggttgaacataaaatcaatacatcgatcccgtgtataagcgggtaggagagggatgggcatgtttccaatacacccatataaaacatttttcgatttttcgcttacaaactagttgtcttagactatatgctcgattcataagatttttcgaaaagaatatagtaaaaataatattatatatatgtgtgtgtgtatatgattcagttcgctcgacatctactcgcttatcgacaatgtttcgggtatacaatttatagatcgttaaagatcgggggctaattatggttacaacgtaggcagattggcgggcacctggtccaggaagttggccggaaactgtccctgacgacccgccacctcgccgtacagccaatcctcgttaatcctataaagcactgtaaccaattcgttctcctacgggataaagagttgttaaaaaatgatgttaaggcgctgcttcaaggataattacctgcaaggcgagatctcct

SEQ ID NO: 15809 - DNA, 1609 bp, DROSOPHILA
atacgtggaacacatcgggaaacttttcgttgtctagtgtctttgcaaaattattctttagtcgtttcggcagtgtcaagtctactcaatcgtttctcccagctccgagcaaacaaaattatttccattgacaattttccagttttcgtcagctccacatcgccgtgtcggtttgtttgatttcaagtttctggaggttattgtcccataatcagccatgtccggtgattgcaacacgtattgccaaaatgcctgcgatccctgccaggcgcccacggatttctcgccctgtccgccgaattcaacgtgtccgccttgcgactgcggcgactatgcaggatgctgctaccagcagccgccgcgcaccatgcccatcctgcccaagtcgcacttcatgcgctccacagcgccgctggacacggacaccatataccgacgatcgttctatgctaactgtggcgacaacattagggcccgacccgtaatgccgtgctcccaaatacgagcatccacggcgccgctggaaaagtgcaccatacagaagttatcctacatgccaccctgtccggttaagcggacgccacccattgttcccatggagagcggcctgcgcttcgagggacccatctatgcgatgacctcgcagaagcacgactacgtgcccaaggggatcgtgaagcgggatcccattaagccgcgtgtggctatctgcacgtcgaatgcaccgatggagcgctgtactatccagaagctgagctacatgcccatcgatgtgtgccagaatccgcctccgaaggccatggtccagggatcgcactactgcaagccggcaggacccatggagcgctgcaccatccaaaagctgtcctacatgccggtctgtttgccggccaaggagcccacgccctgggccgacaaaatacgttgtgtgccgccgcgctactccaatgtctgcaccacctacaacctaagctacatgcccaactgcaatgaggcacgtacggctccggtgacgccgcttaccaccttgcgcttctgtggcaacgacgccggttccggcagcacggtgtacaagctgagctacatgcccctgtcctatcaaccgaactgcacggagcgcactcctccgattcgcccgatggaaaatggtctgcgattcgacgggcccatgtatgcgatgaccactcagaaacacgattttgtggccaagccccacgtgaggagggctccgatcatgccgagaacggccttctgccggcccactggagccatggagcgctgcacggtgaacaagttgtcgtacatgccggtggatgtcacctgtttcccacgcgccgagtccgtccgaccacgacagggattctgccggaacgagggacccatggaaaagtgcaccacatacaaactcagctacttgccgaactgtgtgccgcccaaggagccactgccgtgggccaggtacacatcctactgccggccaaccggacctattgagaagtgtaccatccagaaacttagctacggaccgccaggtgccttccagcgctgcggaggtccttgtggaactggcgctaacgatggcacctttcccaaagccggcatttgttag

SEQ ID NO: 15810 - protein, 463 aa, DROSOPHILA
MSGDCNTYCQNACDPCQAPTDFSPCPPNSTCPPCDCGDYAGCCYQQPPRTMPILPKSHFMRSTAPLDTDTIYRRSFYANCGDNIRARPVMPCSQIRASTAPLEKCTIQKLSYMPPCPVKRTPPIVPMESGLRFEGPIYAMTSQKHDYVPKGIVKRDPIKPRVAICTSNAPMERCTIQKLSYMPIDVCQNPPPKAMVQGSHYCKPAGPMERCTIQKLSYMPVCLPAKEPTPWADKIRCVPPRYSNVCTTYNLSYMPNCNEARTAPVTPLTTLRFCGNDAGSGSTVYKLSYMPLSYQPNCTERTPPIRPMENGLRFDGPMYAMTTQKHDFVAKPHVRRAPIMPRTAFCRPTGAMERCTVNKLSYMPVDVTCFPRAESVRPRQGFCRNEGPMEKCTTYKLSYLPNCVPPKEPLPWARYTSYCRPTGPIEKCTIQKLSYGPPGAFQRCGGPCGTGANDGTFPKAGIC

SEQ ID NO: 15811 - DNA, 3413 bp, DROSOPHILA
ttatcacgtccgtccgtacgaaatccaatatctcgggaactttgagagctgttaattgggtactaaacacccgaattctagtttcgcttacgcagcaaaatatagtttttcttccgataacatagaaatggaattgtgaacagaagaagagaagggagaatgctatagtcgagttacccgactataagatactcagttagtagtgtgcgaatttcataatttttctggaatatcgatcgatattgaggaaatgtgtgttatctttgtatggaaaaacatcgataaataaatcgtgttatctgtatattatttcgcaccaaggacatattgttgtttaaagaaaataaatacgtctttcgtttctacatttgccatcatattttattgagataccatttactcagttagtagtgtgcaaatttcattaattttaagaacattttttaaaattgtttaaaagtgggaatgttttgggcgttttgctggtgtaaagagggacgtggcaaaagtgtttttgatacagatggaaattgacaagacacacaataaaacgaaaaaattaaaatataatgtatataataatataatatatataataatatgtataatatatatatatgtatatatatataatataaaaataataaaatataatataataaaatataattataatagacaaataaaaaatgaaaaaaatatcttaacaatttggacagttttgggcggcttgtgggcgtttattgggcgtgttaacatgggtcaacaaacttgcgctgcgtctatgtctctataatcgctataattattcttaacattctagctttcaaagttcctgactggacagggcacatattcaaaaataagtggaataaatagtcgataccgaaaagggacatggaaaaatatctgtatttcatatttcgcactgctatttcattgaacacagctgtatatacataaccaaatccgatgcagagtatgaaaacaatattttagtccgaaggtataaaaattttatttatttgaatttttttttgtgtgtatgccatatcgtattcgattctattttaaccctatttctttaatgcttcttgattaaaaaaagcaaaacatgtttcaggatatacctttagattgaggcggagctgctctgtctgagttgccttctacgcgtttttagcggagtcaccagatatggaatttttcaatttttcaagcttcctttaaaagattgtagtctttggaggcgtctaaaggtgggactaataaagcgcccggccaaagcgcgcaaatacgaagatattttggagcatgcatacatcaaggcagcaagggtattttttgctgcagatgaccaaactggtctggagttatgaaccaaaccagcaatggttgctggtgttgccttcccccatttcggtgtagttgcccaatttagaagagagcgcagatatgaaaccgctgaggaccaaactgttttcaaagctgaatatggtccagctcgtgatccctgggaaagtgttttagcgactgtttccgtagcagaattcactgaagctttgcttggtagggatttcacagccacgttcgcagccgatgctaaggacgaactggaagttgcagaagaacctacggctctttggcctcggattactgttttggccacgactttggcagccgaagaaaagggcgcgttcagagtcctaggagaaactcgagtatttgcccatggcgccagtttgccgagtcccagtattcttttcgatctcaatgccaatagcccggaggacaatgtccatagggatccgagatgcgaatcgcttagttcctgcgttggaattggccggggaactgggatagatggcggcggtttctggaatacccggtaccccacgtatgtaccaaccagcaagcctccgatgaaggcagcaactttgagcttttcgcgaaaactagcaggcggcgtttcgggtggcattgggaagaatggatttcccaattcaggcagttggccattagcgttctcagcgggaataatggcttcaacgtccatggactggaagcagcaatcgtacaaggcccttctctgatggtcaatcaggacgcgatgggcctcgttgattctaaggaactccttcgctccatcctcgtttttgtcgggatgatattgcagggacagccgccgaaaagcatccttaatctcactgtcggtggcatttctcggtaagcccagaacctggtagtgatcttcgtagacatcgctcattttggccaattggtctatttgatgggagaataattagatgattttatcgatagtagcacgatggtcagtggtttttggtgcagaagtcggtatttattgatgtttatgttgcgggatgtaaggcactgggaaaacctgagaaaacactaaagctgattctttcattacaaatagagatgcacatctgaaatgtgtgttatctttgtatggaaacaacatcgataaatacatcgtgtcatttgtcgtgtcatcgtgtcagcgaaataatattcgcgacaagaacatattgtttaaggaaaataaatgcgtctttcgtttcttcatttgccatcatattttattgagaatacgagtcattaggtggccaacagaaacaaaatctagaaaaatatgtcttttttttcagaacaaaccattatatttccgtcttatctggtacataccaaagacactagaatattctagtgttattctattctattctattattattattctagtgtctttgtacatactatatgtagtagcagactggctctgcttagcaacaatttgtaataagcaagtgcatttaattttctctactatggcattgttatattttttactatttgtatcgcataaacgttttttaaattaaaaaaaaacaaaactattagttcgtcttacagtatttatccgttttatcattcgatttggctaaaggtattagctattttcgagcaacagtcggacgaattccataatttttatttatcttactaaataaataaataaattaatcaataagtaacgcaggattcattagataaacagtcaataattaagttcctataaattaatcttaaagactattcagcgaagaacgctaggtacccgagattgcttcatcaagcccttggatccttagctcagtccgaggaggatccatcgccgtgggtagcctcttttttccggttgaagaactggaatgtcttgtaggcggcgaacgcaaagagcacggttcctccgacggcgcacatgaaggggagcatgtctggcgtgggctgggcgaaggtcgcagcaggctcgtcatcacatttgagaccctcctcgccgtgctggtcgtatatctcgcgcttttccttatcaaagagcacttcga

SEQ ID NO: 15812 - DNA, 1413 bp, DROSOPHILA
ttttctcaggttttcccagtgccttacatcccgcaacataaacatcaataaataccgacttctgcaccaaaaaccactgaccatcgtgctactatcgataaaatcatctaattattctcccatcaaatagaccaattggccaaaatgagcgatgtctacgaagatcactaccaggttctgggcttaccgagaaatgccaccgacagtgagattaaggatgcttttcggcggctgtccctgcaatatcatcccgacaaaaacgaggatggagcgaaggagttccttagaatcaacgaggcccatcgcgtcctgattgaccatcagagaagggccttgtacgattgctgcttccagtccatggacgttgaagccattattcccgctgagaacgctaatggccaactgcctgaattgggaaatccattcttcccaatgccacccgaaacgccgcctgctagttttcgcgaaaagctcaaagttgctgccttcatcggaggcttgctggttggtacatacgtggggtaccgggtattccagaaaccgccgccatctatcccagttccccggccaattccaacgcaggaactaagcgattcgcatctcggatccctatggacattgtcctccgggctattggcattgagatcgaaaagaatactgggactcggcaaactggcgccatgggcaaatactcgagtttctcctaggactctgaacgcgcccttttcttcggctgccaaagtcgtggccaaaacagtaatccgaggccaaagagccgtaggttcttctgcaacttccagttcgtccttagcatcggctgcgaacgtggctgtgaaatccctaccaagcaaagcttcagtgaattctgctacggaaacagtcgctaaaacactttcccagggatcacgagctggaccatattcagctttgaaaacagtttggtcctcagcggtttcatatctgcgctctcttctaaattgggcaactacaccgaaatgggggaaggcaacaccagcaaccattgctggtttggttcataactccagaccagtttggtcatctgcagcaaaaaatacccttgctgccttgatgtatgcatgctccaaaatatcttcgtatttgcgcgctttggccgggcgctttattagtcccacctttagacgcctccaaagactacaatcttttaaaggaagcttgaaaaattgaaaaattccatatctggtgactccgctaaaaacgcgtagaaggcaactcagacagagcagctccgcctcaatctaaaggtatatcctgaaacatgttttgctttttttaatcaagaagcattaaagaaatagggttaaaatagaatcgaatacgatatggcatacacacaaaaaaaaattcaaataaataaaatttttataccttcgg

SEQ ID NO: 15813 - protein, 353 aa, DROSOPHILA
MSDVYEDHYQVLGLPRNATDSEIKDAFRRLSLQYHPDKNEDGAKEFLRINEAHRVLIDHQRRALYDCCFQSMDVEAIIPAENANGQLPELGNPFFPMPPETPPASFREKLKVAAFIGGLLVGTYVGYRVFQKPPPSIPVPRPIPTQELSDSHLGSLWTLSSGLLALRSKRILGLGKLAPWANTRVSPRTLNAPFSSAAKVVAKTVIRGQRAVGSSATSSSSLASAANVAVKSLPSKASVNSATETVAKTLSQGSRAGPYSALKTVWSSAVSYLRSLLNWATTPKWGKATPATIAGLVHNSRPVWSSAAKNTLAALMYACSKISSYLRALAGRFISPTFRRLQRLQSFKGSLKN

SEQ ID NO: 15814 - DNA, 3102 bp, DROSOPHILA
ttctattcgttcgcgaaaaaagacaatttgttgttgtcgtcgtcgtcgtcgttgaatacctgttgaaaatttgacgttgagtttctttgagtgagtaatagagaacgcaagagtgggagttgaaggggtgtgtgtgctgtgaggggggttgggctcaggggtataatagagagcggggtgggcgtgggcggaaaatgcgcgaatagtggttgctaataaattaatttcccattttatttataaacacactgctgccgaattgcgcgcttttcttttctatccgctcgtcgccgttttgcaattactttgctgctggccaaacaacaaatcttctcacaattctggcagcgcgatcacacaaaacgtaccgtcttcacaaatattcgatgtgctgtgcacgaagagcaaactggtactgaaaccgaaaactgaaactgagagccatccgcttgccgctgctcgatttggatttgagtcgatttcagttgagaccactgagttttgctgagaaaccaccaccgagtggttgcagtgctggcaaatgccgttggttcatctgagtgcttcggtttgcttttcaaatgtttatagcaatagcgctgtttgatatcgctacaaaatgtatataaatctatgttttcttaataaatgtatggtccgatttcaatcgttaaattttttaaaaattatatgacctctaatggaaattcgagtgattttttatcttttatacatttttgtcgcatatatcaaggcgctatgtattcgacatacatttttaatctgtgcccttttttgttgctaaattatcgcgccttattatcaatttgtatattttcgaccgaataataagagatcaaaacacatttgtaagaattccaaatttattgcggtttctcctacataaaattaatgtaactatctataattgcattcgctgtcttggtttctttaacagttcgcaaagtcggaaatctactaatctgaataggataacatcctatcgcttgcgatataagcaaggtttgagagagaaagctttcatcttggtgttcttgggcacatgacgcatcttcttgaattggaagaagtagaaatagttaacagccacatccttcttgttaagatcgaatccacatgcattgaggcaacgcacaaactcccgcacatcctggaatcgcgactgaatctccgcgatatagacagtgccgtgcagcttgagcactcgattggcctccaggaagaactcgttcagatccgtgcccattagtgagaggcagtatacggccacgtccagagttcgagcttggagtggagtatccgtgatgttgcaggcaatgatgtcgctacgagcagcgaccaagtccatggagtacaccttgttgggcacggattgtgccaatttgccctcgccgcaaccaaagtcgccaattatggctgttttgggaatcttcttgatggtcttgatgatgcgattaagcggattgatgggccacttctccacctgctggcggtagccagcgtgataggcctcgaaggcggagctatccttgcggaaaagtgcctccgccttgcgactggtcgtcgagtagagctgctcgttgatgtatcggaaacgtccgcccaggagttccgattgcagcttactggccaacgagtttgcagccggcgtggttgagctggtggcctccatggcctccaaagccgcctgggccagttcgggtttcagtttcagttcttttttgccaccttttgtggcctgcgttggtggtcgctgtttctctattcttccggacttcaccttgtgcatggcccggatgccatcctccacatcttcgtagtcatcatccgaggagtcttggggcggggcaagaggtcctctgccctgccggtaagtgaatttttcagctgccttgttcacattcagattttcatttggcacagcggccttcttctttttgggtttcttcttctttggtttcttcttggcggcaactccatttcctgaaggatttaccggctcaaactcaatgatatcggctccttcctcccagggcggcacttcgaaaggcttcattttgcggtggaaaattgtaaacaaatgaaacacgtgaagtctacgttctatgaattatcgtatttttcgataacagcacaggcgcatttctgagaaatgcctaacgcgttttgacaaaaaagtgcgggttacttgaaaaatgttcatattattcaaaatttgctctgaagaatttaaaaaggtattaatacaaaagagaacatcatttctttcacgtattttttttttatttttgcactaagctagagttcaacaattttgtgagtttatctgtttgtttttctccgtattagtttgtaattttcggtttttgctttgttgttgtcgtatgaactaaataacttagcatctagtagaatatttatacaactcaatcgacaaatgtgctgttcggaaagttgtctgttttcatcgcttatcttatagcctagaaccgtaactatgacaatcagtttacttttttaacatacagatacagaccattaatttgcatttattttgttttgaattcgtgttactaggttagaaaagtcttactaactagttttgtttcccaacaaaccgtatcatcctatatcgcattcttcaatttctcgttcttgattttccgttgcggttttgagccaatcgaaagcagtttaaccagctaaaaacattgcgatttacaattgctatagactaaatataattgtttagttctaattgccttagtcggtctcgaatcgtgtggataattgcgtgtttaagtgtatgtatacttggattctcctgctggctgactatttgaaaacgtatctattggctttgtgaagcgtttacacaaatctctaacataactagacgtagcgattactgtagttcattaaggttagttgtataaattaaagcatttctttgtaatacaaaaatatagctacaacggaatcgggtagacgcagacgttcaatatatatcgagtgatcggcagatctaaagatagcgattcgggtcgagtatacccgtcagtgtgcatggtagtgtggaac

SEQ ID NO: 15815 - DNA, 1102 bp, DROSOPHILA
tttgtttacaattttccaccgcaaaatgaagcctttcgaagtgccgccctgggaggaaggagccgatatcattgagtttgagccggtaaatccttcaggaaatggagttgccgccaagaagaaaccaaagaagaagaaacccaaaaagaagaaggccgctgtgccaaatgaaaatctgaatgtgaacaaggcagctgaaaaattcacttaccggcagggcagaggacctcttgccccgccccaagactcctcggatgatgactacgaagatgtggaggatggcatccgggccatgcacaaggtgaagtccggaagaatagagaaacagcgaccaccaacgcaggccacaaaaggtggcaaaaaagaactgaaactgaaacccgaactggcccaggcggctttggaggccatggaggccaccagctcaaccacgccggctgcaaactcgttggccagtaagctgcaatcggaactcctgggcggacgtttccgatacatcaacgagcagctctactcgacgaccagtcgcaaggcggaggcacttttccgcaaggatagctccgccttcgaggcctatcacgctggctaccgccagcaggtggagaagtggcccatcaatccgcttaatcgcatcatcaagaccatcaagaagattcccaaaacagccataattggcgactttggttgcggcgagggcaaattggcacaatccgtgcccaacaaggtgtactccatggacttggtcgctgctcgtagcgacatcattgcctgcaacatcacggatactccactccaagctcgaactctggacgtggccgtatactgcctctcactaatgggcacggatctgaacgagttcttcctggaggccaatcgagtgctcaagctgcacggcactgtctatatcgcggagattcagtcgcgattccaggatgtgcgggagtttgtgcgttgcctcaatgcatgtggattcgatcttaacaagaaggatgtggctgttaactatttctacttcttccaattcaagaagatgcgtcatgtgcccaagaacaccaagatgaaagctttctctctcaaaccttgcttatatcgcaagcgatag

SEQ ID NO: 15816 - protein, 358 aa, DROSOPHILA
MKPFEVPPWEEGADIIEFEPVNPSGNGVAAKKKPKKKKPKKKKAAVPNENLNVNKAAEKFTYRQGRGPLAPPQDSSDDDYEDVEDGIRAMHKVKSGRIEKQRPPTQATKGGKKELKLKPELAQAALEAMEATSSTTPAANSLASKLQSELLGGRFRYINEQLYSTTSRKAEALFRKDSSAFEAYHAGYRQQVEKWPINPLNRIIKTIKKIPKTAIIGDFGCGEGKLAQSVPNKVYSMDLVAARSDIIACNITDTPLQARTLDVAVYCLSLMGTDLNEFFLEANRVLKLHGTVYIAEIQSRFQDVREFVRCLNACGFDLNKKDVAVNYFYFFQFKKMRHVPKNTKMKAFSLKPCLYRKR

SEQ ID NO: 15817 - DNA, 6585 bp, DROSOPHILA
aataccggatggcggctgcgacgagctgccggccttcgagatccgcgccttctcgccgcatggacgcaccccgtcgcccatcgacgatctcgatctgtcggacatcgagacgcccaagcagccgcagaggcagcatctccttccggaagaggaaccccagaacgatcctcagtacgttgccctacacgagataaacgcccagatcagcccgcccaatgacgccgacgactccaacagcttggagacgatcttcgagggcgttttcctgagcaccccgccccgcgataaagcttccagctcgggcaattcccgatttacgcccaagcgcggacgtgcaaatctcatcgagctgatggccaaccggctgcacggcggcaaggagaaccagtcgccgggagcgcgagtctctgacccgcatttaccctcgccactcaaggaccccacctagtgaccgcagtccagccttcccaaccaaagccatggagccctcgctcagactgccatcgatgttctagaataagttaccatttacctgaatgtattgttcacacccagcggtcagcaggtgtacacccagatgtgtatcctcggctgatccttcagtttacctaagcttcgtgtcacgcgttttccgatgtcaggctaaaagattttgtagtggtaaataaagattgtcgtctttccatgtttcaaacattaaaccaaggttatgctcttccctgccgggcagatggtccaggtaggcagaaggaaggtttatattgctcatagaacagactgatcagcggtacctagaactaaaccaaccactattgtaaacactggaaagttcgatggctaattgacggatctaggcatacattgctactacgtaatttgtagtacaaattgattttcgaagccagtatgtttacaacatattgtagaatgttcgatgtaacagtttgaaaaataaaatatcgtactacgatgttcgtttaaaaacttgtctgaataatatccttctcacgtttcgatttatttataaagaaaatgtcaatatttgcttattaatctgaaatgtaatggtaatttttggacctcgtgtaccttaggactactatttttacactaatcctattgtacctaggtagtacattgagtaaactagtataaaaataagtaattctgtgattaggtatattattggaagatactaaatcactactttcctgagtcgcattgcgaattcgcgtcgtacacaaactctacgctggaagcattattcaaacttaaaaataattgggacgagcattgaaagtaatatagagtaataaaatcgggaatgtttcataggttatagaacacattcgaaagtaaaacagcgaccaggacaggggaaaatgattacttaactttacaattttgtaggcaattacaaaagttaaataacacttgctttttttctatatggcagtgtgaaacgcattttgtccagcaagtcctgtcgtgcgattcgcatccaatcagaagttctttgaatgacgcgatgctgaaaacaccttgacgcgcagcaaccctggattaacttcttgccatctgaaataggttggtgaataattagacgacttttaacgaaatatgccccttactaaccgcaaacggcgttcgcccagcctggccttcaccctgttcttaatggtggacactccgtttgcgctgtgaagaccacggcccgtgataatgaatacgtgcttgtacacgcgggtggtgttgcgcagcacagttatgtggcggtcaaggaacaagtccaggcaactgatcgcctctaccgtgtgtaggtaatgcaggtctagcaggtccgggttgttctgggtgtgccgatgcacctccattatgcaattggccgccctctggttgaatacgtcgatcttctgcttgtgtaacttggctatctccgagtagtataacgccacgctactattgccgcgctgtaccgcctgtttggcctttagatagcactctgctttaagttgggagtgatgggcggccatgtttcgcgtctcttcaaagtcgcgaagagcggcgcacttgacctcctcttgcagttggggcgaccggccagaggcgtacgaactggagctggagcgctggccttggccggaggagttatgttgcttttgttgctgctgctgccgccgctcttccagcgccatttgctcactaagcttttcgccctcgcgaagggccttatcatagagttccgctttgctcagcatactcttaacgttgctgtccaagacctcgactgtttgaacgtaattgctgccggttgcggcaaagacctcaagcacagtgtcggtaggaacgtccgggaacgtctcgcacagcttcatcttggttaggtgggtagctatatcggtgggcgtttgtttgcgagcggtcaactcggctgccttcttggcggccagctgctcgctattgtatatgctccaggccaactccatatccaaaagctcagccacgttgctcggagactcgctgcaatcggcgtaacctggatgcttgagcaggcgggcgaactgctcgtcatcgcgcattgtctgctggcgtatctcctctagctggttaaacacagcttccatccataacatgtaaagctgcttggctagctgacgcggcataaatatttttgttgcggtgggaagctcctgttccggcggcaacaactcgtcctccgtgtggaactgagcgcgcagctgctcaattaaagtgccgcccaaatcaatttccagcagagtattttcttcagggtcctcctcctcctcctgctcttcaagctctggttcctcgggtgcttccagtagcttaggcactgtaggttgatccaggattccattgcgaatatcgcgaattttacgggtgtgctccgagtattgttcgtcgcctaaaaatcaataatcattagttattattagttatttaatattagttagcatcagatatcgaactcgaatctctaacataatataatggaaatacattaaattcattagtgccgtgagtgttaacgcaatataaataataagtttatttttaattgactcctattagaacaatatcttacctaacacaaagcaattctggattttcagttgcaactctttgttggtgggggccgatgctcgtttgttgcgcggttgacgttgcggcttggattcggtcttcgatactggtaaagttggtgaggcgcagatgggagttgaaatcggagattcctgggcttcaaccgccttgtcgcagtcgcattgaaactgcgccgcctcctcgctatcgatagtttcttcaaatccgatttgatccgaaccagtggccgcgttgagctcgtcctcctttaatagaatatcaacggcccaatccacgtcggcctggcactttacaaacagatcccagaggccggccagctgtttgttgggatacatctggcgcaggtgtgcaaaccctttcggttcatttgggcagtctaggctgtgcatctcaagaggctttgccccgctagactccgctttcgacggcaccacctttatttggttctcttcgcggagcagatcaataatagacaattcgctctttacgggagctgcggcacccaaagcatccggaatttccggaactgtcgcgtcgcctgtgtctactgagttcactgtttgcgaccagtatgaaggcgctccgtgctcgtagggcacccacgtttgggcattagcattcagcttaaaggcattttccgctggcgctgggactggggcttccagcagcttgctctcttcaaagctcgtgatgataggcacggcaggaaggggcgggtgattgcgtagttgcggcagctccacagaatactttgtctccttcattaactgtcgcataaaatattccggtagaggatgtgaaagatacaaactatagtaagtgccattacttaataagcttcggggtagaaaataaaatacaaccaagaacgtaatataccaaaaatttaccaataaaaaatgaaaacgagctagttgcctcaaattgtatgtgtatgtggctagactgccacattccgatcctcggatattcgatacccgtcttctctcagctacaaaaaagcgactgtttctcagattgccagcgactttctgactgaccatggtatgccctaaaaaattaagtagccaacaaaaaaggcctctactatgtttctgcaggtggtctgaatgtttttcgcaattcaaaggaagttcgccggaaaaataatgaaatgcaaagaagcaaaattgaattggtcagtgataatgattaagaataaatatatacctcttaaagattttttatcgagcttagttaaacgttttacactcgcgtaacgggtatacaattacacatttttggctgactcacaatgagattgcagttaacaataaatctctatctttatatacatatgtatgtatatagacgatttaaagtgccttcttacctgaatgagctctcccgcagtcgtccgctcgaatcgctctagcatgcgctgaatattctcccgtgggacgttgtggacgtttttctgggccagtttgctggcagacttgcaccaactagtattgggctcgagaagctcaattacgtaaccgtggcgcacggcgaactggacatatggctgcatctcccagaccattgtattggtgttatccacgatgatggggctccagccggaggcggccttatcgcgcactcgctgctggttccactcgtgggcagctggcagcagagtggggttgaagacatagccgcggcgcgtcttgaagtagtcgtctgagctcaggacaaagtcgcgcacctggtgtcgatcgagtagatgcgcctggcgcagcagagactctgccagtgtactcttaccgctgcctgaagggccgcgcattatgatcatcagcttatggcccgcctgcgcccgctggcaaatcgagttaaattgtttgttgctttggttgctgttcagattgctggcggggcacattctaatggagcttggggcttcagcagttgcatatttcctgtgagttccaccgctcttgctgcgaccgcaattgttattgtcattattattattgttgttgttgttgttgttattattattattattattcttattattattattgttgttgttgatgttgatgcggtccaacaaaagcgccaaatccgctggttcagctgaatgcgagcttcgctctgtcgacatggcgtttgttttccttttgctagcttgccctgtgaaagcagatcgtttaggggggatcgaccaacgtaatgcgcagtaaccacagacaccccatcacccaattcgcatctgaatctcggactcaccaatatctgaccagactgtaatcccccgatgtcgtaactgcgcgttgatgtctcaatctctctcattcaatcggttgtcatgcaaggatcaacctgcgggctgcaacttcgtttgcttgtttccagaaatcgggaagctatgcgtcgcattacatccgttaattcgctgcattgcaagttgggaaaaccacgtctgtgcggaggctatcgatggaggaggctatggtcacgcgtcatcgataagcagcagtgctggcggccagcttttttcaagccaagctattgcttcggaataaaatcgctaagtttttggatttttttttttaatactatgaaaacattatgttaagcacataaataagattcttaatatgattatgataaatgttataaaataacatgaaattataacgtcgttatcacgtccgtccgtacgaaatccaatatctcgggaactttgagagctgttaattgggtactaaacacccgaattctagtttcgcttacgcagcaaaatatagtttttcttccgataacatagaaatggaattgtgaacagaagaagagaagggagaatgctatagtcgagttacccgactataagatactcagttagtagtgtgcgaatttcataatttttctggaatatcgatcgatattgaggaaatgtgtgttatctttgtatggaaaaacatcgataaataaatcgtgttatctgtatattatttcgcaccaaggacatattgttgtttaaagaaaataaatacgtctttcgtttctacatttgccatcatattttattgagataccatttactcagttagtagtgtgcaaatttcattaattttaagaacattttttaaaattgtttaaaagtgggaatgttttgggcgttttgctggtgtaaagagggacgtggcaaaagtgtttttgatacagatggaaattgacaagacacacaataaaacgaaaaaattaaaatataatgtatataataatataatatatataataatatgtataatatatatatatgtatatatatataatataaaaataataaaatataatataataaaatataattataatagacaaataaaaaatgaaaaaaatatcttaacaatttggacagttttgggcggcttgtgggcgtttattgggcgtgttaacatgggtcaacaaacttgcgctgcgtctatg

SEQ ID NO: 15818 - DNA, 3647 bp, DROSOPHILA
ctccgcacagacgtggttttcccaacttgcaatgcagcgaattaacggatgtaatgcgacgcatagcttcccgatttctggaaacaagcaaacgaagttgcagcccgcaggttgatccttgcatgacaaccgattgaatgagagagattgagacatcaacgcgcagttacgacatcgggggattacagtctggtcagatattgggcaagctagcaaaaggaaaacaaacgccatgtcgacagagcgaagctcgcattcagctgaaccagcggatttggcgcttttgttggaccgcatcaacatcaacaacaacaataataataataagaataataataataataataacaacaacaacaacaacaataataataatgacaataacaattgcggtcgcagcaagagcggtggaactcacaggaaatatgcaactgctgaagccccaagctccattagaatgtgccccgccagcaatctgaacagcaaccaaagcaacaaacaatttaactcgatttgccagcgggcgcaggcgggccataagctgatgatcataatgcgcggcccttcaggcagcggtaagagtacactggcagagtctctgctgcgccaggcgcatctactcgatcgacaccaggtgcgcgactttgtcctgagctcagacgactacttcaagacgcgccgcggctatgtcttcaaccccactctgctgccagctgcccacgagtggaaccagcagcgagtgcgcgataaggccgcctccggctggagccccatcatcgtggataacaccaatacaatggtctgggagatgcagccatatgtccagttcgccgtgcgccacggttacgtaattgagcttctcgagcccaatactagttggtgcaagtctgccagcaaactggcccagaaaaacgtccacaacgtcccacgggagaatattcagcgcatgctagagcgattcgagcggacgactgcgggagagctcattcagttaatgaaggagacaaagtattctgtggagctgccgcaactacgcaatcacccgccccttcctgccgtgcctatcatcacgagctttgaagagagcaagctgctggaagccccagtcccagcgccagcggaaaatgcctttaagctgaatgctaatgcccaaacgtgggtgccctacgagcacggagcgccttcatactggtcgcaaacagtgaactcagtagacacaggcgacgcgacagttccggaaattccggatgctttgggtgccgcagctcccgtaaagagcgaattgtctattattgatctgctccgcgaagagaaccaaataaaggtggtgccgtcgaaagcggagtctagcggggcaaagcctcttgagatgcacagcctagactgcccaaatgaaccgaaagggtttgcacacctgcgccagatgtatcccaacaaacagctggccggcctctgggatctgtttgtaaagtgccaggccgacgtggattgggccgttgatattctattaaaggaggacgagctcaacgcggccactggttcggatcaaatcggatttgaagaaactatcgatagcgaggaggcggcgcagtttcaatgcgactgcgacaaggcggttgaagcccaggaatctccgatttcaactcccatctgcgcctcaccaactttaccagtatcgaagaccgaatccaagccgcaacgtcaaccgcgcaacaaacgagcatcggcccccaccaacaaagagttgcaactgaaaatccagaattgctttgtgttaggcgacgaacaatactcggagcacacccgtaaaattcgcgatattcgcaatggaatcctggatcaacctacagtgcctaagctactggaagcacccgaggaaccagagcttgaagagcaggaggaggaggaggaccctgaagaaaatactctgctggaaattgatttgggcggcactttaattgagcagctgcgcgctcagttccacacggaggacgagttgttgccgccggaacaggagcttcccaccgcaacaaaaatatttatgccgcgtcagctagccaagcagctttacatgttatggatggaagctgtgtttaaccagctagaggagatacgccagcagacaatgcgcgatgacgagcagttcgcccgcctgctcaagcatccaggttacgccgattgcagcgagtctccgagcaacgtggctgagcttttggatatggagttggcctggagcatatacaatagcgagcagctggccgccaagaaggcagccgagttgaccgctcgcaaacaaacgcccaccgatatagctacccacctaaccaagatgaagctgtgcgagacgttcccggacgttcctaccgacactgtgcttgaggtctttgccgcaaccggcagcaattacgttcaaacagtcgaggtcttggacagcaacgttaagagtatgctgagcaaagcggaactctatgataaggcccttcgcgagggcgaaaagcttagtgagcaaatggcgctggaagagcggcggcagcagcagcaacaaaagcaacataactcctccggccaaggccagcgctccagctccagttcgtacgcctctggccggtcgccccaactgcaagaggaggtcaagtgcgccgctcttcgcgactttgaagagacgcgaaacatggccgcccatcactcccaacttaaagcagagtgctatctaaaggccaaacaggcggtacagcgcggcaatagtagcgtggcgttatactactcggagatagccaagttacacaagcagaagatcgacgtattcaaccagagggcggccaattgcataatggaggtgcatcggcacacccagaacaacccggacctgctagacctgcattacctacacacggtagaggcgatcagttgcctggacttgttccttgaccgccacataactgtgctgcgcaacaccacccgcgtgtacaagcacgtattcattatcacgggccgtggtcttcacagcgcaaacggagtgtccaccattaagaacagggtgaaggccaggctgggcgaacgccgtttgcgatggcaagaagttaatccagggttgctgcgcgtcaaggtgttttcagcatcgcgtcattcaaagaacttctgattggatgcgaatcgcacgacaggacttgctggacaaaatgcgtttcacactgccatatagaaaaaaagcaagtgttatttaacttttgtaattgcctacaaaattgtaaagttaagtaatcattttcccctgtcctggtcgctgttttactttcgaatgtgttctataacctatgaaacattcccgattttattactctatattactttcaatgctcgtcccaattatttttaagtttgaataatgcttccagcgtagagtttgtgtacgacgcgaattcgcaatgcgactcaggaaagtagtgatttagtatcttccaataatatacctaatcacagaattacttatttttatactagtttactcaatgtactacctaggtacaataggattagtgtaaaaatagtagtcctaaggtacacgaggtccaaaaattaccattacatttcagattaataagcaaatattgacattttctttataaataaatcgaaacgtgagaagg

SEQ ID NO: 15819 - protein, 969 aa, DROSOPHILA
MSTERSSHSAEPADLALLLDRININNNNNNNKNNNNNNNNNNNNNNNNDNNNCGRSKSGGTHRKYATAEAPSSIRMCPASNLNSNQSNKQFNSICQRAQAGHKLMIIMRGPSGSGKSTLAESLLRQAHLLDRHQVRDFVLSSDDYFKTRRGYVFNPTLLPAAHEWNQQRVRDKAASGWSPIIVDNTNTMVWEMQPYVQFAVRHGYVIELLEPNTSWCKSASKLAQKNVHNVPRENIQRMLERFERTTAGELIQLMKETKYSVELPQLRNHPPLPAVPIITSFEESKLLEAPVPAPAENAFKLNANAQTWVPYEHGAPSYWSQTVNSVDTGDATVPEIPDALGAAAPVKSELSIIDLLREENQIKVVPSKAESSGAKPLEMHSLDCPNEPKGFAHLRQMYPNKQLAGLWDLFVKCQADVDWAVDILLKEDELNAATGSDQIGFEETIDSEEAAQFQCDCDKAVEAQESPISTPICASPTLPVSKTESKPQRQPRNKRASAPTNKELQLKIQNCFVLGDEQYSEHTRKIRDIRNGILDQPTVPKLLEAPEEPELEEQEEEEDPEENTLLEIDLGGTLIEQLRAQFHTEDELLPPEQELPTATKIFMPRQLAKQLYMLWMEAVFNQLEEIRQQTMRDDEQFARLLKHPGYADCSESPSNVAELLDMELAWSIYNSEQLAAKKAAELTARKQTPTDIATHLTKMKLCETFPDVPTDTVLEVFAATGSNYVQTVEVLDSNVKSMLSKAELYDKALREGEKLSEQMALEERRQQQQQKQHNSSGQGQRSSSSSYASGRSPQLQEEVKCAALRDFEETRNMAAHHSQLKAECYLKAKQAVQRGNSSVALYYSEIAKLHKQKIDVFNQRAANCIMEVHRHTQNNPDLLDLHYLHTVEAISCLDLFLDRHITVLRNTTRVYKHVFIITGRGLHSANGVSTIKNRVKARLGERRLRWQEVNPGLLRVKVFSASRHSKNF

SEQ ID NO: 15820 - DNA, 3123 bp, DROSOPHILA
cctcatactgctggttggacgacttgatgagcagccggacactggtttccggattcttttgacgggtggcggcatcgcagcccgcggctgttgcggctgcgggtggggcggcgttctcctccatctggctgaccccgcgaatcggagaactttctattgctaattaatgaccgcgatacgaagatcggtgatgggtttttgctgcgctagcggggacactttttacgcagccactgtttctcacttcctactccgctctgctctctgcgtattttcgagaaatagtttattctgaatttgacatttaatttggtattatgctattgtttggttttcaacagctgttcgttctgtggtgttttgctcgcagcacagagttattgattatgaaacgcagtaaacgttccgcagttgatcaaaaactactcttcatttggttctgacctgtggcaagtgatgagcgtcggtcacagggctgccgcgagtagcaggtatttttaagtcgcaggttgcacaaacagctgagaattgattttccaaagtgtgtgggatgtggcaatttaagtacacagttggaaaatattaaagtcgttgctcaaacacttggttttagtgtttttagaatttattcctttgaaaaatatacggtatctagttatttgcagttgtggattttgctcatcactgacagcaacacttgttaatgccatatactacgcaacagggttgccttgacttacggggatgccaactcgcgtcatcgtgacgtgtcgattatgtataacacttcagacgttgaactttgaatgaaaacaccgaatagcatataaaatgcatttgctccttagtaaaaaagttaagaaggtttgccgctgttttcgtattcgaattacgaattcaatactatttcgtgaaaatatttttttgacaaagcggcataaaataattcatttacagatgtcttcgtcaagatttcctattctatcgttgccgcttcgtgattcgcgtgccatctctaataacattgcagtgctttagatattttataaattatatatatggttatattctgttgaatgttagcacgtccgacgtgccttttccccttgaactcatggataacaagtcagccgtatctgctctacaggagttttgtgcccggacacagattaatctaccaacatacagttttattcccggcgaagacggagggtacgtctgtaaagttgaactattggagatagaggcccttggaaatggtaaatttaaattacaaatctcaaccactatttatattcgtatctaaaccgccacatatttatccaattctagggcgttcgaagcgtgatgccaaacacctggctgccagcaatatcttgcgtaaaatccaactgctgcccggcatacacggcttgatgaaggattcgactgtgggtgatctggatgaggaactgactaacctcaaccgggacatggtgaaggagctgcgtgactactgcgtccgccgcgagatgccactgccctgcattgaggtagtgcagcaaagcggcaccccgagcgccccggaattcgtggcctgttgctccgtggcctccatagtacgctacggaaagtcggacaaaaagaaggatgcccgtcagcgagcggccattgaaatgctggccttaatctccagcaattcggacaatttgcgtccggatcaaatgcaagtagcgagcacaagcaaattgaaagttgttgatatggaagaatctatggaggaattggaggcattgcgcagaaagaaatttaccacctactgggagttgaaggaagccgggagcgtagaccatacaggcatgcggctctgcgaccgacacaactacttcaagaacttctatcctaccctgaaaaaggaggccattgaggccatcaattcagatgaatacgagagctccaaggataaggctatggacgtaatgagctctttaaagataacacccaaaatcagtgaagtggaatcttcatcgttggttcccttgcttagcgtcgagcttaattgtgcattcgacgtggtccttatggcaaaggagaccgatatctacgaccatataatagactattttcgcaccatgttgatttaatgcgtataacatttattcaactattctagcttaaaactaagtaaactcgttttatttacactctagaatgcacatatttcatttaatcttacgattaatacaatctccaccaatttgtaggtgggaaacataaaaaaattattttcaaggtcttttagtaaacatctatgttaactttgtacacgattgagataggtgtaaaaaatccaaggaaataagtaaggggagtgggtacaacaacttttactttcgagaaggtataacataatgatattattaattacttttcgatgccaataccaatgttaattctattaaaatgtaaagtatttatacggtccgaacttattgtttgcaacaactgattataaaatatttgaagcaatttacataaatatgtattgcacagtgaaattaaaaatctgaacatttgcctttaaaaggaatgctagtaatcaaagacttacttgaaacaaatattttaaataatttgacggaaaaaaatggtaaaaatgctgcatttctttttttttttacaagtacaacttttatacgaataaaaggggtttcagtctaaaataaataaagtgcttcgtagtcttcagcatttttgattttatttttacaacacaatgctaaaatgaaaactaagcgttcctcttaaaaactttcaacaatgtattaacaatttcaatgtcaattgcttgccttttaatgggttatcttatattagtacaatatgttaaataacaaatccataacaatttgaaatgttttcctaaaaaaaaatgtaagtgtataaatgagattgttattgcaaataatttcctaatcaatcaccaaatttgattgcattggaatatctaaaaaatcattgcattcgccacatcaatctcatcatctcatcgggaaacgttcaatttactagtcaaaataatatttacacaactaaaggaaacaatatatgattagtgttcaatagctaatcttcttgcgcagc

SEQ ID NO: 15821 - DNA, 1050 bp, DROSOPHILA
attcgcgtgccatctctaataacattgcagtgctttagatattttataaattatatatatggttatattctgttgaatgttagcacgtccgacgtgccttttccccttgaactcatggataacaagtcagccgtatctgctctacaggagttttgtgcccggacacagattaatctaccaacatacagttttattcccggcgaagacggagggtacgtctgtaaagttgaactattggagatagaggcccttggaaatgggcgttcgaagcgtgatgccaaacacctggctgccagcaatatcttgcgtaaaatccaactgctgcccggcatacacggcttgatgaaggattcgactgtgggtgatctggatgaggaactgactaacctcaaccgggacatggtgaaggagctgcgtgactactgcgtccgccgcgagatgccactgccctgcattgaggtagtgcagcaaagcggcaccccgagcgccccggaattcgtggcctgttgctccgtggcctccatagtacgctacggaaagtcggacaaaaagaaggatgcccgtcagcgagcggccattgaaatgctggccttaatctccagcaattcggacaatttgcgtccggatcaaatgcaagtagcgagcacaagcaaattgaaagttgttgatatggaagaatctatggaggaattggaggcattgcgcagaaagaaatttaccacctactgggagttgaaggaagccgggagcgtagaccatacaggcatgcggctctgcgaccgacacaactacttcaagaacttctatcctaccctgaaaaaggaggccattgaggccatcaattcagatgaatacgagagctccaaggataaggctatggacgtaatgagctctttaaagataacacccaaaatcagtgaagtggaatcttcatcgttggttcccttgcttagcgtcgagcttaattgtgcattcgacgtggtccttatggcaaaggagaccgatatctacgaccatataatagactattttcgcaccatgttgatttaa

SEQ ID NO: 15822 - protein, 311 aa, DROSOPHILA
MDNKSAVSALQEFCARTQINLPTYSFIPGEDGGYVCKVELLEIEALGNGRSKRDAKHLAASNILRKIQLLPGIHGLMKDSTVGDLDEELTNLNRDMVKELRDYCVRREMPLPCIEVVQQSGTPSAPEFVACCSVASIVRYGKSDKKKDARQRAAIEMLALISSNSDNLRPDQMQVASTSKLKVVDMEESMEELEALRRKKFTTYWELKEAGSVDHTGMRLCDRHNYFKNFYPTLKKEAIEAINSDEYESSKDKAMDVMSSLKITPKISEVESSSLVPLLSVELNCAFDVVLMAKETDIYDHIIDYFRTMLI

SEQ ID NO: 15823 - DNA, 3269 bp, DROSOPHILA
gcgaaatagaccgcgatttgtgatgatccctggttctgcttttgctgtgcgtgctgcgggaactactcctgctgctggaggagctgcgcgaggtgctgcgactgctactgcgactccttctcgagtactttttcgacttcttggcctttttcttcttcggttttgaaacctgccggctgctcctgctgggcgactttgatctgtgtcgtctgtcgcggtctcgctctctgtctctttctcggtcccgatctctatccctctctctgtcgcgatctctgtcacggcggtcgcgatccctcataatgtgtcctttatcggcagttaattatttatttagttttttatttatgttatatttcttgtgtgccggacgtcgctcattcccaaaatacaaaatcgcctgtcaagaaaacgcaacatttttacgaatattccagctggccacactgattgtgtcaacatgtttaccgcctatcgatttttggacttatcgaccgattttaatttaaactaataggcgcgaattttaattatagtaatcactttaaaatatttaacttagaactatgtgtaatattaaatcaattaattctttttaacatattcatttaatatactacatttattgagttttgtccttaccggcttagcatgtcagtttacagactgatgtggggtcttttaatgtccagtttgccgtacgcccaaagcaggaaatactaattgctgattaactcttagcaattatacctaatcagcagttatcaagattataggagaccttatcgctgatgaccactagccattcgttaaatcaactgggatcgaaattcccacacgatctatcagtcttggcgaatcaaaccattttgcaggcaaaaataaacagtcataaattaggcagccaaatctaggaatccttatcaagttcctggggggcatataaaaggcacgggcggccaagtcagcggtcaaagcacctgcacctgtggaatacaaaatgttggtggttcagctaattgcggtttttttaagtctgggcttggctaatgccctgcctgcggatacggggcgcgccagttcggtgacaactgtaagttttaggatgccatgttctttggcacccaaaagtccttactaaccactatattgctctactttccaggtcaccattgttaggggacacggttacgaaatcgaggagcacgaggtgcagacctcggatggttacatcctcacaatgcaccgcataccgtactcgaagaacactgggtacgatgggccacgccctgttgtcttccttatgcacggtctgttgtgttcctcctcggattgggttcttgctggacctcacagtgggctggcatacctgctgtccgaagcgggctacgatgtgtggatgggtaatgccagaggcaacacctactccaaaagacacgccagcaagtcgccgctgctgcagcccttctggaattttgagtggcacgatatcggaatctatgatctgcccgctatgatggattacgtcctttactggacaaatgtgactcaacttacgtatgtgggtcactctcaaggaaccacatccttttttgtgctcaactctatgattccgcgcttcaagagtcgcattcgatctgctcatttgctcgctcctgtggcctggatggagcatatggagagtcctttggccacggtcggtggaccactgcttggtcagcccaatgccttcgtcgagctcttcggcagcgccgaatttttgccaaatacacagctaatgaacctgttcggggctctcctctgcagcgatgaggccatttcacagttcatgtgcaccaacaccctattcctgctgggcggctggaactcgccatatatcaacgagaccctgctcccagatattatggccaccactccggcgggatgctcagtaaatcagatcttccactacctgcaggagtacaattccggatacttccggcaattcgactacggatctacgcgcaacaagaaggagtacagcagcaagaccccgccggagtacgatgtggagggcatcgatgtgcccacctatctctattactctgacaacgactactttgctagtctgattgacgtggatcgccttaggtataccatgaacccgagcgccctgaaaagcgcatatcgcatgccggaagaaaagtggaatcatatcgactttctgtggggactgaatattaaagaaattctttatgatcgggtaattaacgacataaataatgcataaatgtgcgctggaaataaaaaaaagcgacatacgtttttgtgacattgtgataaaaaaagttccattggtcaccacttcaacgggggcttttggtagctaatgaaccgataatatacgagtggtcataaattcaaattgatttggtgacacttcacggtgactgaacaacgcaaaacgaactagcctgctaacattttttgccttataagtgcacctgctaaatacaatggattatattaagtgtaatataataaaatataagctgtactagatatttttattttatttgctgattgtgtactgttgagaaatattttgcactcttagtttgaattgcgcgccaactttcagggatgaagcatcttgtaaaatcatcgatagactttcagcgttttttgtggtagtcgatagtccgcaacatactgatcatagtaaaaaatatctgtaatgtatatttaggtgggaaaatatattcatggcatttatttatacgttaaatcaattcttgttatgatattccttaattgtaaaaaaattttattcttgttcttattagcagaatataaaattgaccagtttacgttaacacttttttttaaatacaaaaatttgatttatatttgtttatattttaacgaaccgatgtgtggtgcaccactgtgcgtgtgtcacgacaatacccaagccgatattatcgatgttttcatcgatgttatttactcgagcaggtacatccacgcaaggaaagctaattcgagcgaaaaaaaatttacttagctcttaatatttttaaaaacaacgccctcgctgggccagtggtcggttaactagttagctgtaagatgacgcgcgtaacgagaagtgaaatctccctggacatggagttctgggtggaggagctgtcgccggcacaattggcgtactacgagaagattactaacgagcacaacgcggtgaagggtgcactaaagaacgcggttagcgccaacgagggcaagga

SEQ ID NO: 15824 - DNA, 1197 bp, DROSOPHILA
atgttggtggttcagctaattgcggtttttttaagtctgggcttggctaatgccctgcctgcggatacggggcgcgccagttcggtgacaactgtcaccattgttaggggacacggttacgaaatcgaggagcacgaggtgcagacctcggatggttacatcctcacaatgcaccgcataccgtactcgaagaacactgggtacgatgggccacgccctgttgtcttccttatgcacggtctgttgtgttcctcctcggattgggttcttgctggacctcacagtgggctggcatacctgctgtccgaagcgggctacgatgtgtggatgggtaatgccagaggcaacacctactccaaaagacacgccagcaagtcgccgctgctgcagcccttctggaattttgagtggcacgatatcggaatctatgatctgcccgctatgatggattacgtcctttactggacaaatgtgactcaacttacgtatgtgggtcactctcaaggaaccacatccttttttgtgctcaactctatgattccgcgcttcaagagtcgcattcgatctgctcatttgctcgctcctgtggcctggatggagcatatggagagtcctttggccacggtcggtggaccactgcttggtcagcccaatgccttcgtcgagctcttcggcagcgccgaatttttgccaaatacacagctaatgaacctgttcggggctctcctctgcagcgatgaggccatttcacagttcatgtgcaccaacaccctattcctgctgggcggctggaactcgccatatatcaacgagaccctgctcccagatattatggccaccactccggcgggatgctcagtaaatcagatcttccactacctgcaggagtacaattccggatacttccggcaattcgactacggatctacgcgcaacaagaaggagtacagcagcaagaccccgccggagtacgatgtggagggcatcgatgtgcccacctatctctattactctgacaacgactactttgctagtctgattgacgtggatcgccttaggtataccatgaacccgagcgccctgaaaagcgcatatcgcatgccggaagaaaagtggaatcatatcgactttctgtggggactgaatattaaagaaattctttatgatcgggtaattaacgacataaataatgcataa

SEQ ID NO: 15825 - protein, 398 aa, DROSOPHILA
MLVVQLIAVFLSLGLANALPADTGRASSVTTVTIVRGHGYEIEEHEVQTSDGYILTMHRIPYSKNTGYDGPRPVVFLMHGLLCSSSDWVLAGPHSGLAYLLSEAGYDVWMGNARGNTYSKRHASKSPLLQPFWNFEWHDIGIYDLPAMMDYVLYWTNVTQLTYVGHSQGTTSFFVLNSMIPRFKSRIRSAHLLAPVAWMEHMESPLATVGGPLLGQPNAFVELFGSAEFLPNTQLMNLFGALLCSDEAISQFMCTNTLFLLGGWNSPYINETLLPDIMATTPAGCSVNQIFHYLQEYNSGYFRQFDYGSTRNKKEYSSKTPPEYDVEGIDVPTYLYYSDNDYFASLIDVDRLRYTMNPSALKSAYRMPEEKWNHIDFLWGLNIKEILYDRVINDINNA

SEQ ID NO: 15826 - DNA, 3250 bp, DROSOPHILA
aagtgcggaattacagctgaccggtagccaattactcagtttctgggggctcaaagtgcagcagttggacagacgactcaaggttcaacgagctctcgatcctcagatgtctgggcccaaaaacaagggcagtaattttcgtacacactgtcccaaaaaagtctgtcaatcatccagcagtcagctgatggtggcaatttagcgctttctacgtgctcccagctaatctagtcacactgatcccaatctgacagtcgtaacatgctcccgatgcccctttaatttggccagacgttgctcgggagcatgactaatgcgtggaaaggcgccaagtgaattgtgctttcgtaccccaacaactccgcctgctccccgcccagcaacagaatgggattatatcgcgaattcttatctggccgaccgactgcccgcgcctcagcttatttcacaatctatttcgactgggccaaatttgaaggagctctctggtggctctatacgcacttttctaattcaatctgcgcaattggatttaaatccaaactaaagatccggtgtgcgatctattttggttcttgtttgttgagctaatttggttagaaaagcaagatagttatcttacgcaataactgcggagtaaaataggtcacatttattctattttaactcatcctacttggctagataagctaaaaataagaagacagttgagatctttgttctatttaagtattcacaattttattcatgttttttttttggtagcttagtctaagtcttaaattactagaatcgtggcagtatataattctatatttgttcatcttattttcctagtgagattgtctagagaatctacatttttctttgggtttttcaatcttttgtgtctttttttttgtatatttcgtttttcgatatcttcacattcgagcgctaatttgtgggcgaatctgcctaagttgtatagtatctttccgatgatcattattacatgatcttacataatgtgggtggccgtgctgatgacctggttgatccactccgtgaaggcggagacgcgaacaaagaccgagggcgcgttcttctggccgcatggcatcttgccccaggacacaatgccgatgacaatgttggcctgctcgaagtgctcctcgcagcactgctgaatcaatggtccgccggagtcggcggtgcagatgctaacgcctcctgtcagcgggccagtgcacagattggtctcgtgcaatgggagtccggagcgggcgagaatctgttcgcataactccatgtccagtatgggcatgttggcctcctgcaggcggtgcggataattgggtaccgcagtcatcgagacattgccccagccgtacaaagttccatatccctccggctgggcatcctgctccggcagcgttgctggctggacataggtgtcaaagaccaggggctccttggtgtaaattagcgcgatgtcgtagggattcactccgccgagatagagctcgtgtcgcacgtagtagtcgatgtgtcgcatttgaatgttgctcgcctcgcccttctgatcgtgaatatcgtggctgcccgccacaatgaccgagttctccaccgcctgcggtgagctgaggcagtgggccgccgtcaggatccagtgctcgttgatgatggtgccggcacagtagtggaccagtccctgatcgggtgtcatcatctggatgctgaccacatacggcgccgaatggggagtcgcctcccgcttggccaggaactttttcgtccagtgcgtttgtcgcggtgcttccagagtgctaatccgattctccagcagcccgtaggccgccaaattcatggccattgtgtgggctgctcccgcagatctgccaccgccgcacttgcgcacagtgggcagctgtatggagccggaggatgcagagcttagtaccaccataatactggctatggtggacagcagcaccgagtagatgcatcggtaggataagagcatgatgtcctcgctctggttgcacgcgccgcacgaatttgtcgaatagtagaaggtaattttgacggttttggggttcttggttgtggaggcgcgactcgtttggggattcgatgtcgcgactactttagcttttcgcccttgttctggcgtatcgatagcacttcacttgtattccgtttcgctttggcatggaattcactttattcggcccgattttgccgtgttcgtattgttcagttgtctcttgcttgctgccaattttggatttgcccgtcgccagcgagtgtgggctgtatttatagggagagccgctctggagagagtgttccttgccaaatcgtaattggtggctccttatcgctaagaaagcgcgagcgagttttgcccccccatatatggtagacccctatcagtgacgagttgagatagcagagtgcgagtgccaatggtatgtctaaggtactttggggatcgggcttgtcttgccctggaatgccctacgtggaggagtcccaatctacacattgctatgtaaaacaagtgtgtacttagcacccagaatagcagagttctaaaggtttcaatttcaatcgaagtaattgagaagtggtttaaatttataacaataactaagtaatctaagttagcttgctaaccagtgtagttatgtttatgacacatagaattatcccgaattaatggttatacccataaaagtattatcgctgattttattgatgggagttttgttaaatggaaagctcacaatgaatcgaagttaagttagtgttttgctaatattgtgttttttccttttgtagaaagctttctgtgtagccaaagccaaagtagccaaacatattacatttcgcactgagcatacataccagtgcaaactggctacgcaatctctggagttcaatgatgtctatgtctatatatagggtatcgagacctgctgccttgaatgccattccactgacggatcacacatactcgctaacttactcattggcggcacactgccgtgcaatcagtggagaaattgggtgcttcccggccagctgtttcgcgaatgggcccatccaagaatgtggtacgcttatctgctggaaatcgtaatagggcaatttcgattcaatttagtcacgattcttcgcttttggcatgatctatcgtgttggtttcccgctggttcccggatagataaccggatggaactacggcgcgatgccatcaattcgg

SEQ ID NO: 15827 - DNA, 1250 bp, DROSOPHILA
agagacaactgaacaatacgaacacggcaaaatcgggccgaataaagtgaattccatgccaaagcgaaacggaatacaagtgaagtgctatcgatacgccagaacaagggcgaaaagctaaagtagtcgcgacatcgaatccccaaacgagtcgcgcctccacaaccaagaaccccaaaaccgtcaaaattaccttctactattcgacaaattcgtgcggcgcgtgcaaccagagcgaggacatcatgctcttatcctaccgatgcatctactcggtgctgctgtccaccatagccagtattatggtggtactaagctctgcatcctccggctccatacagctgcccactgtgcgcaagtgcggcggtggcagatctgcgggagcagcccacacaatggccatgaatttggcggcctacgggctgctggagaatcggattagcactctggaagcaccgcgacaaacgcactggacgaaaaagttcctggccaagcgggaggcgactccccattcggcgccgtatgtggtcagcatccagatgatgacacccgatcagggactggtccactactgtgccggcaccatcatcaacgagcactggatcctgacggcggcccactgcctcagctcaccgcaggcggtggagaactcggtcattgtggcgggcagccacgatattcacgatcagaagggcgaggcgagcaacattcaaatgcgacacatcgactactacgtgcgacacgagctctatctcggcggagtgaatccctacgacatcgcgctaatttacaccaaggagcccctggtctttgacacctatgtccagccagcaacgctgccggagcaggatgcccagccggagggatatggaactttgtacggctggggcaatgtctcgatgactgcggtacccaattatccgcaccgcctgcaggaggccaacatgcccatactggacatggagttatgcgaacagattctcgcccgctccggactcccattgcacgagaccaatctgtgcactggcccgctgacaggaggcgttagcatctgcaccgccgactccggcggaccattgattcagcagtgctgcgaggagcacttcgagcaggccaacattgtcatcggcattgtgtcctggggcaagatgccatgcggccagaagaacgcgccctcggtctttgttcgcgtctccgccttcacggagtggatcaaccaggtcatcagcacggccacccacattatgtaa

SEQ ID NO: 15828 - protein, 334 aa, DROSOPHILA
MLLSYRCIYSVLLSTIASIMVVLSSASSGSIQLPTVRKCGGGRSAGAAHTMAMNLAAYGLLENRISTLEAPRQTHWTKKFLAKREATPHSAPYVVSIQMMTPDQGLVHYCAGTIINEHWILTAAHCLSSPQAVENSVIVAGSHDIHDQKGEASNIQMRHIDYYVRHELYLGGVNPYDIALIYTKEPLVFDTYVQPATLPEQDAQPEGYGTLYGWGNVSMTAVPNYPHRLQEANMPILDMELCEQILARSGLPLHETNLCTGPLTGGVSICTADSGGPLIQQCCEEHFEQANIVIGIVSWGKMPCGQKNAPSVFVRVSAFTEWINQVISTATHIM

SEQ ID NO: 15829 - DNA, 4582 bp, DROSOPHILA
atttgctttaccacctcaactgcgtccatggcccacgctctagaaatcgcccttccaaaggtggactttggtcagctcagcactgccgagccattttaatttcactttacggtttccaaacacgaaatcctttttgccactaggtgtgctgccaggactcgttttttatcgtcctgcactgcccggcttccccgcaggtgtgtttgtttgggtcccctgtttgtggggtattaaaaagtgaaatggtggattccgaaaccccaaagcggacgtagaaggatgccagtcatatgtgtgtacggagaacgagaaggggagccattccatgccagagattcaccaagattgctctcgtcctgaattttagtttccagggtcgattaggtacgcctttcgtttggcggctttggttgcgcaacgatgatctgagcaaatcaaatccggatatggttgcaccagcggtaattcggtaacctgtttactttttcgaaataagcacaaaataatttcatcggttcacgatgcccgttcgtcccctttatgtttatagcaaattaaataggcaatcagaagcgcccaaccagaacggcagaagtcccatatgaaaggagcgccaacggcacgaggatggcaaataaaataaataaactccgaagtcaatctcaattgaaagcgacaatattatttttaatgattctcatagcccagacgcagtgccgaaatctttgggggaaaggaaaatctttttatttgactttttggctgccaaagggagcggagctggcaaaaaaaacgtggaagacgagctgataggagggaaaataacacaaagcatatgcatgggtggcccacaaaggccatggaaaatcaacaaggacgaagaaaattctagacggggtagtggtctcaaaatattctcgcgatggcgtggcaggaaaatcttttgagcaaacgcacgacaaagataacaatgcaatttacccacttatgcattagcttattagacttcattccccgaattgaatgtgctgccatcgcactttcgaagccgatttacattcgacatttgctgaatcagcgcggcatcaacgccatcatgaggagcaagtgaccacactaaagattacgcggtaaacaagaagtcatagactggtgattgagcagttcaaagtttcttagccaaagttgtgcttaagaaatcagagtaactttccttcctattgcaaactcttttccaccgtagtttggtattaatgtgtgtgtacttttttcatcaactgctatatagttattggaaactttccgaaaccgagaagttgccggttgaacaacagctgaccaactgcccgggacgaagtcctctgaataagcaaggatgttgaatacgagtataaagtaagtttggtgtattgacgttttgggtttacatgtacattcctagcaccagaagtctttcactttttacaacatcattacaagatcagtcggttttaattgggttttattcttccctatgtcggaataatgataagcgtagcggataaaattgtacttaagtatagaaaattaatgaattatgaaatatgaaaattaatgaataatgaatgagcagcacacaacaaaattaaatgtaatttaaataaaatttttattaaactgaaaacaattttgtatgtacaaatataagtagatataaatttatagagaattacgtagttcccatacactatagtgcatctcacccctatctgcaaaggacaatggccaagacttgcgtgttgtttacgcccctcttggcgaaatcctcaccggcaacatgggcaacaatggcacggaacggattagaaccgaatggaacggacagcggtgaagggttagactgggcagccaaggtgaagtggtggccaactggtgcaacacagcaggctgcacttgcttaattaaaaaactttcgtataagctttaactatctccctacgcctaaggattggaattcgacctcttggaccgaggatctcttactggcttgagggcggtatggggtccgattagctgcttgctattcttgaccgtgtattctaacgtctcttcgctctgatgccactcgtccgtggcgaagaatacgaagccagcgcgctcggccttgcgataggccagcaaaggaccccgtgatccaaagtcatagtgcaacgggcggggacgatccgaatcgatggtggcgagaacgggggagaatatgcgccaaatctcgcactgctcatcggagcgcatgaagagcgtctggtcgccttgaaacacgttgagcaggtagccgggcagtccttggagtcccttcggtccccgatcatccactcgcaggttgatctcgctctcccgaaggcagatatcctcgccctgccgcttgaggcgcatgcgcataaagacctcttccgtggggaaggatctcaggactagctcgttacgaatgtcagtactgtcgctgtggaaggtgtcgcagtccaccggcttgtactggatacgcacctccgacttggtgtcgttcaaggcttttcccgctctgagaatgaagggtaccccggtccaacggcggttgttgatgtgcagcaccaccagagcgaatgtgggcgtaaaggagtccttcgggatgtaggtgtgctccgtgtagccgcacttcgcggggtcagtctcccgccggttgttgcggtattgagccaagacgacgtcgcctatgttgggagttagcacctggcgaagaaccttcagccgttcggcacgcaggtcgtcagcagtgttggcgtacggctgatccatagccagcatggccagcatctggatcatgtggttggtcatcaggtcgcgaataatgccaaactgattaaagtagtctgcccgattcaccgacaccggcagctcacactttatggatatcatcaccgccgccacgtggcggtggttcagggtctcggcccacaagtggtttgagtagcgcagcgcaaagaagttctgcatcacctgccggctgaggaggtggtccatcaggtaaatctgcgactcccggaagcagttgcacagcgaggtttgaaaggccttgtaggagatgtcgtcccgcgcgaagggcttctccactattatgcggttccatcccgtggtcgagctgcattttcgactgacattgagggtcacctgatcgaaaacgatcggtggcagcgccaggtagaagattcgattcgcgcgcacctgattgtgctttgtctcctggtgtaccatcgcctccgtgagtgccacgtagttctccggcttgtcgtactcgccctgcacacagtgcacggtcgtccaaaagaggttgtacttcttggggtcccgatgcttgtccagctccatatagggaagaatctgcaaccggtacgtcttcgtctgcagcggggaccgggtgaaagtaaatattttggtgccctggggcagccgattctcccggaagagagcccaaagcgccggaaacaccttctttttggccaatccgcctgaggctccgaagaccacgatggaatacgcctcctcattgtgggggtccatggaaatcatttcgggtaatttaattgaagtataattttgagagaataaaagaaagcaaggtaacgtcaaattttggccaagaataaatagttgtaatttaaaaaagattagtgatagatattgcatggaggtatagactgaggcaaaaatcgcaaatcacacatttgttttatttaaataatagtttttaattggatatttattaaatcatgttcagtttttcacacttgttgctcgtgattttgactttggaggggtttaatccgtttttaccttgtgagtaaaatcattcaaataaaaaattttctggatattttagcaaatatggaagaccaatctgtaaaatataataaaattagttccataagaacaaactcaatgtaaagacccaactctaaaatacccgttccctaatagccttctctattgcgtaatattgcgttttagattggtgtaaattacatcaatcacttcatattatttccatctattttattctttatctatagcatacctctacctcccgcactctttctttagttgagtaacgggtatccgatagtcgaggagcccgtttgaagcgttttctctcgtgttagactgataaacaacgaagctgtcttacaataataggaattcgatcaaacttttccgtacatttatatacatttttaagaattgcatttcagattttcaacattttttttgtataaatagataagttccacataaggatttaggctaaaatcttttctgcgacctaaacgcttgtcctagcagcaaaaataaaatatttttagtcaacaggtcagaccaccaatccagaaaggggctttaagctcggaaggctgctgaacaggacaaactgctgggatcccagattgggtggcaataagcctcaagttcccataaacgcatccgagatgtgcagcagtcctttcttgccctgcaattcaaatttaatcaattcaaattccctaatccacagtagaagtgcaagcgagcgacc

SEQ ID NO: 15830 - DNA, 1746 bp, DROSOPHILA
atgatttccatggacccccacaatgaggaggcgtattccatcgtggtcttcggagcctcaggcggattggccaaaaagaaggtgtttccggcgctttgggctctcttccgggagaatcggctgccccagggcaccaaaatatttactttcacccggtccccgctgcagacgaagacgtaccggttgcagattcttccctatatggagctggacaagcatcgggaccccaagaagtacaacctcttttggacgaccgtgcactgtgtgcagggcgagtacgacaagccggagaactacgtggcactcacggaggcgatggtacaccaggagacaaagcacaatcaggtgcgcgcgaatcgaatcttctacctggcgctgccaccgatcgttttcgatcaggtgaccctcaatgtcagtcgaaaatgcagctcgaccacgggatggaaccgcataatagtggagaagcccttcgcgcgggacgacatctcctacaaggcctttcaaacctcgctgtgcaactgcttccgggagtcgcagatttacctgatggaccacctcctcagccggcaggtgatgcagaacttctttgcgctgcgctactcaaaccacttgtgggccgagaccctgaaccaccgccacgtggcggcggtgatgatatccataaagtgtgagctgccggtgtcggtgaatcgggcagactactttaatcagtttggcattattcgcgacctgatgaccaaccacatgatccagatgctggccatgctggctatggatcagccgtacgccaacactgctgacgacctgcgtgccgaacggctgaaggttcttcgccaggtgctaactcccaacataggcgacgtcgtcttggctcaataccgcaacaaccggcgggagactgaccccgcgaagtgcggctacacggagcacacctacatcccgaaggactcctttacgcccacattcgctctggtggtgctgcacatcaacaaccgccgttggaccggggtacccttcattctcagagcgggaaaagccttgaacgacaccaagtcggaggtgcgtatccagtacaagccggtggactgcgacaccttccacagcgacagtactgacattcgtaacgagctagtcctgagatccttccccacggaagaggtctttatgcgcatgcgcctcaagcggcagggcgaggatatctgccttcgggagagcgagatcaacctgcgagtggatgatcggggaccgaagggactccaaggactgcccggctacctgctcaacgtgtttcaaggcgaccagacgctcttcatgcgctccgatgagcagtgcgagatttggcgcatattctcccccgttctcgccaccatcgattcggatcgtccccgcccgttgcactatgactttggatcacggggtcctttgctggcctatcgcaaggccgagcgcgctggcttcgtattcttcgccacggacgagtggcatcagagcgaagagacgttagaatacacggtcaagaatagcaagcagctaatcggaccccataccgccctcaagccatctaacccttcaccgctgtccgttccattcggttctaatccgttccgtgccattgttgcccatgttgccgtgtggtcacttgctcctcatgatggcgttgatgccgcgctgattcagcaaatgtcgaatgtaaatcggcttcgaaagtgcgatggcagcacattcaattcggggaatgaagtctaa

SEQ ID NO: 15831 - protein, 581 aa, DROSOPHILA
MISMDPHNEEAYSIVVFGASGGLAKKKVFPALWALFRENRLPQGTKIFTFTRSPLQTKTYRLQILPYMELDKHRDPKKYNLFWTTVHCVQGEYDKPENYVALTEAMVHQETKHNQVRANRIFYLALPPIVFDQVTLNVSRKCSSTTGWNRIIVEKPFARDDISYKAFQTSLCNCFRESQIYLMDHLLSRQVMQNFFALRYSNHLWAETLNHRHVAAVMISIKCELPVSVNRADYFNQFGIIRDLMTNHMIQMLAMLAMDQPYANTADDLRAERLKVLRQVLTPNIGDVVLAQYRNNRRETDPAKCGYTEHTYIPKDSFTPTFALVVLHINNRRWTGVPFILRAGKALNDTKSEVRIQYKPVDCDTFHSDSTDIRNELVLRSFPTEEVFMRMRLKRQGEDICLRESEINLRVDDRGPKGLQGLPGYLLNVFQGDQTLFMRSDEQCEIWRIFSPVLATIDSDRPRPLHYDFGSRGPLLAYRKAERAGFVFFATDEWHQSEETLEYTVKNSKQLIGPHTALKPSNPSPLSVPFGSNPFRAIVAHVAVWSLAPHDGVDAALIQQMSNVNRLRKCDGSTFNSGNEV

SEQ ID NO: 15832 - DNA, 3445 bp, DROSOPHILA
agaaataaaaacagaaacctgtggtgaacgacacgaaaatgagcaatgttatcagcagttttgaaaaacatttccttatttcaactttaaaaatagtcggaaatgggttgtagttatctttacattcataaattaatgtttatagttatatgtatttagacgaactataaagtagctatttaagtgttagtataagaattctaattatttttctaatcccctgagttttgcgtaatcatattaattctattaagagtagtgtcaagggctgctcggatttttgtcaggggcagtggcgttagcccatgcgacacttcagtgcttatctcgggcattaccggcatggaatgtttgacgtactcgacctaggaccccgccaatactcctcaatagatagacaagtgggtgggttgcgcttgtaagatgcggtccttgaaacggccttatctcatcgtaactaagaaggcgtgttgcagctaatatcgccctgtgacaatttatggcttttagaaagtaaaaaagtgaaatacggccttggccattttttccggaaatatggcactctacgaaaagttatacaacaatttagtacaacggaggacaccttatttgtagatactgaaacactttttaatagtaatctcttaatggattcttgtgccatgcgatcggtgtccatccgggatttattcgcagagttaattgtgacatatttcctcctttccaatagtcggctaaagacgatctacaattaatttgtagggtgccgaatctgaagctattgccaccaattgacaagcggcaaacgagacaacgagcgattagcatgtcgcgcagttgtagtttcagattcggaatccgcaaatcagctacttaggtgtgttttcgtttttaatttgctacgcagcgcccatattgcagcggcagcagttgtttccaaggcgcactgcatctcaacgcctggctcttatcaggcacccagggcaactccaaatcgccgtgggctcgccaggcgcctggttagtcgttactcatcgttcgaggcggttacaactaagacagatagattagccaagcaaaatgctggacgcggaggtgcgagaacttatgcaaccctttgtgttgagtgattaccaggtgcaggaagtgtacagtcgcttttgcctggaagtggcccgtggacttaagcggtccacgcatccacaggccaacgtcaagtgttttcccacgtacgtgcaggatctgcccacgggcgacgagatgggcaagtacctggccctggatctcggcggtaccaacttccgagtactgctcgtctcgctgaaaggtcaccacgacgccacggtggattctcagatctatgccgtgccaaaggacctgatggtggggcccggtgtggacctattcgatcacattgcgggctgcctggccaaatttgtggagaaacacgacatgaagaccgcatatctgccactgggcttcactttttccttcccttgcgtgcaactaggccttaaggagggcatcctggtacgctggactaagggattcgattgtgctggggttgagggcgaggatgtgggccgcatgctgcacgaggccattcagcggcgcggagatgccgacattgccgtggtggctatactcaacgataccactggcaccttgatgtcctgcgcccatcgtaatgcagattgccgggtgggtgtcattgtgggaactggctgcaatgcctgctacgttgaagatgttgagaatgtggacctattgcgcgcagactttaaaaaaacgaagcggagtgtgattgtaaatgctgagtggggcgcctttggtgagggtggtcagttggactttgtgcgcaccgaatacgatcgcgaagttgacgaaaagtctctaaaccgatcggagcagctgttcgaaaagatgacggcgggcatgtacttgggcaacctggtgcgccttgtgctacttcgtgccctcgagcgcaagctgatctttaaacagagcagtcgacgtccagaattcgccagcgtgctgcagagaaacgaagaggttttcgagacgcgctacatttcggaaatcgaggacgactccttcccagagtttgccagcacaaggaagattgtgaaaaatctgtttggtctagagaaggcctccgtggaggactgccagactctgagatacatctgcgagtgcgtagctaagcgagcggctacattagtagccatcggagtcagtgggctggtgaacaggacttccaaccgccgcgtgatagtcggcatggatggctccgtctaccgataccatccaaagttcgatgcctacatgaggcaaacactccaaaagctggtgaaagcagacaaggagtgggacatcatgctctcggaggacggatccggacgtggagctgcgctggtggccgcggtggccagtaaaacaaagtaggaactcactactattgtagcaataatagaaggactcagtgtaataaaacaaattttaactcacaatcgttgggctggtcttttttgttagtatcctcatcgttttccatggaatactggcattcttgtaattccgattcagttgcttggctggctttgtcacacgaaaccttttcttcccggcttacctttaaaatagatcaaaaattaagaccattttagctcaacctttaattgggactcacgtagtgtaggagtttttgtttataggacgccagtttggtgtcgtatttgcggataatcccgtgcagcttttcgacgtactgcagtagttgttgctgctcgcaggtttccaggtcctgtatgctcttcaattcgatggaatcgtacttggcgacagtgtccgccaaatcctcctcttcagccggtaacgacattgtttaacaaccgtcgaatctaaatcaactttttatagggatcacaagccgatttggggagtttcagctagagatggagaaacatcgatgctagcatggatgtcatcaatgttttcaaaaaatcgcattcatcgatgttttcgaggaatcatcgatgtttttccatctctacatcgcatctgaggagaaaagcgtataaattgtaagtacaaattaattttccatatcttctaatacaattattaataccatattgtggcgtcgtgatagacatggaaaatatctgagaagaaagtttttaacacccgaaaaaggcttgcacatatgaatgcatgtcatatgcacgtctaaatgtatatacatgtatgtatgtaaacgtgcatttgtcttataggagcaattactggaccagcggaggatgaaaaggtggacaccaaatactgacgttttatttaagcaacattaaaataaaaagcaattatttttatttaaagcatcgatgtttaaaacgtcgatgttattcgccaaaaacatcgacatccgccaacatctagtttcatttca

SEQ ID NO: 15833 - DNA, 1445 bp, DROSOPHILA
tgggctcgccaggcgcctggttagtcgttactcatcgttcgaggcggttacaactaagacagatagattagccaagcaaaatgctggacgcggaggtgcgagaacttatgcaaccctttgtgttgagtgattaccaggtgcaggaagtgtacagtcgcttttgcctggaagtggcccgtggacttaagcggtccacgcatccacaggccaacgtcaagtgttttcccacgtacgtgcaggatctgcccacgggcgacgagatgggcaagtacctggccctggatctcggcggtaccaacttccgagtactgctcgtctcgctgaaaggtcaccacgacgccacggtggattctcagatctatgccgtgccaaaggacctgatggtggggcccggtgtggacctattcgatcacattgcgggctgcctggccaaatttgtggagaaacacgacatgaagaccgcatatctgccactgggcttcactttttccttcccttgcgtgcaactaggccttaaggagggcatcctggtacgctggactaagggattcgattgtgctggggttgagggcgaggatgtgggccgcatgctgcacgaggccattcagcggcgcggagatgccgacattgccgtggtggctatactcaacgataccactggcaccttgatgtcctgcgcccatcgtaatgcagattgccgggtgggtgtcattgtgggaactggctgcaatgcctgctacgttgaagatgttgagaatgtggacctattgcgcgcagactttaaaaaaacgaagcggagtgtgattgtaaatgctgagtggggcgcctttggtgagggtggtcagttggactttgtgcgcaccgaatacgatcgcgaagttgacgaaaagtctctaaaccgatcggagcagctgttcgaaaagatgacggcgggcatgtacttgggcaacctggtgcgccttgtgctacttcgtgccctcgagcgcaagctgatctttaaacagagcagtcgacgtccagaattcgccagcgtgctgcagagaaacgaagaggttttcgagacgcgctacatttcggaaatcgaggacgactccttcccagagtttgccagcacaaggaagattgtgaaaaatctgtttggtctagagaaggcctccgtggaggactgccagactctgagatacatctgcgagtgcgtagctaagcgagcggctacattagtagccatcggagtcagtgggctggtgaacaggacttccaaccgccgcgtgatagtcggcatggatggctccgtctaccgataccatccaaagttcgatgcctacatgaggcaaacactccaaaagctggtgaaagcagacaaggagtgggacatcatgctctcggaggacggatccggacgtggagctgcgctggtggccgcggtggccagtaaaacaaagtag

SEQ ID NO: 15834 - protein, 454 aa, DROSOPHILA
MLDAEVRELMQPFVLSDYQVQEVYSRFCLEVARGLKRSTHPQANVKCFPTYVQDLPTGDEMGKYLALDLGGTNFRVLLVSLKGHHDATVDSQIYAVPKDLMVGPGVDLFDHIAGCLAKFVEKHDMKTAYLPLGFTFSFPCVQLGLKEGILVRWTKGFDCAGVEGEDVGRMLHEAIQRRGDADIAVVAILNDTTGTLMSCAHRNADCRVGVIVGTGCNACYVEDVENVDLLRADFKKTKRSVIVNAEWGAFGEGGQLDFVRTEYDREVDEKSLNRSEQLFEKMTAGMYLGNLVRLVLLRALERKLIFKQSSRRPEFASVLQRNEEVFETRYISEIEDDSFPEFASTRKIVKNLFGLEKASVEDCQTLRYICECVAKRAATLVAIGVSGLVNRTSNRRVIVGMDGSVYRYHPKFDAYMRQTLQKLVKADKEWDIMLSEDGSGRGAALVAAVASKTK

SEQ ID NO: 15835 - DNA, 6209 bp, DROSOPHILA
ttattgcgtttatagcacttagaaagttttagaaaaaaacgttttttaaaagtaaaaattttcgtgtattattaaagtggaatctagcaaatttcatgcagagaacaatttcccaatcctcaaatcagaccccagataagaaacatctttaaaagaaaaccttttacttaccgcagaagtaaatgtacattacttgtttaactacgtgtaattggcatcactagcccgcacaatcttatctgcaaaaaagattgtgtgtgtgctttgcattgaatgaatgtgaattaaaatttgtaaaacgcgagattgcgcgctcccactccatgggcaactaaattgctgcccggcagagaggttatcagtctcgggctccacattttccacagtaattccagggagatgtgtggcctgtttgttgtttattacaattataaacgttaatgaccgcctcgcaaacggatccaatcggatcaccaaagatgttttatgccgcactaaatatagattgaaatcgggtttcttcatttaaaattagttcaagttcggatgataacccttcgcagatcgggttgccaggcgctacagggacaatcgaacggaaatcgaatcttaaagattaaatcgcacggaaaattggaatacacgtttatgatcataatcaatgttgtatattccaggccttctatatctttaaatacaatccacttatacagtattattattttccataaatatttaatcacttacaatcaggctcgtagtgaattcacgttaaggaaacatgtttcacaatttggacaacgacttcaacttgtttacgtacgtcaagtagctctagttataaaacttatttcagtattatgataacgtaatgacactcttatcaaacaacgaaatacccgagcgataaaacaagaagtatcacccgacgcggtgggcagtcaaaaaagtaatattaatgaagacttaagcctattttctcgggatcagttaagatcacttaatttagccatctggaggtttccgtggcagtcagaccctcggagcgcagacgttgcagcatgggacgataaatgtcgggagtgaagggcagcaggacgccgcgttcctggatctcacctgaaatgggatgatttggaattatttaaacggcttttaagagtactgataagggaacccaccgtctaggatcattttggctgcgatggcagccggcttgcccacagtcatcgccatggcggagtgaccctggggctgtccgtagaccacaaaattgattccacgctcctcacgacgaccatcgggccaacggatgccaacttcatggcgcagcaccaccaggtcgcgttcatcccgctctgtaaatgaatagtatgattaattataaaatcagtttagaattaaatggttaacccaccgaaggcaagtctcttcgagagatagtgactaagcgtatccagcggagtgttgagcttcaccacaggagtatcatccagcagacccaagctctcgatgccgtccacatctccaatgcgctcagtcagcttctgcttgaggttctcgtagaagatggtcgagtccgacatgcccattagatggatcaccagctggcgccacgtgacatccggcccactgggatgtagcaatgcatgtggctccggatcgataagtcccaagagctgcataggcttaatcgattccgaaaagcccttataacgtatggttccacgaagcaaagtgtgcacatccctgcctaagccgtaaaggttgccgtatttggtggaatccctgttggggaaaccctccagggcgaatcctggcaggaaatccaagctgcgaggacttgacatgagttccccacctccagaaatctccacaatttgtccctgactcagatattttgcagcggaaagtgtgttgagaagtactcccctgggtgaccaagagaacttatatcttagggcattattggaatgctccggtgcaggcagaccgccacaatagctcacgaaggactcgacaactgctcccttgtcctgcacctcgtggatgcactccagtgccagaaggtgatcgataccaggatccaagcccacctcgttcatgatggtcacacccttggccttggcctcctcgtgcaaaccggagatctcgtcgttcagataacttgcggtaaccatgtgggtgccctctgccacgcaataacgtgccaccatgccatggagactgtagggcagcagggaaactactacatctgccctgccgcacagctcctgcagatgaccagtgctctcgttcacatccagatagacgctgtccactccagcatactgctgagccaggcgatcggcttcctccttgacctgcgagcaaaccgttatgctgacgtccttttcgcgatgaagccactctacgagtggagcggacaccatgccagctcccagaaccaagaccttcttgtcagactccgaacttccctccatcttgtggcgcgatctgtggctttgcgactctcggagctcctgaatatactggaagccctccgtcagctgaccgttgctggcgataatagcctgaaaacgagcaaagagaaacggaatttattagctgataacagatgctgataacaaggcatgatgcacattggtttaggttaagaaaacaactcttcaaagcgtaagttacaatataaatcattaactttaggtaaatttataaatgtaatataaaggtaaggcaaagtgaactcaccgactgaatggggtatgagaagttctcctctgccaacggcttcttggcatcgctctttataatatcatgaacatgaggagccaacagctctccaaacaaatccgtcgattctctgggcaattgtgtaggcatattatcaatcgaacagactaaaactccgggtcccttaaagctcttggtatccttattcctgtccgcatcgtacaagcagaatggagtgtcgatggtggtgcactcgttcataaactcaatggagccaccgggatcagcggaaatgtcgcaaatggccagcatgcgatgtggcaaagccggactacccttgctcgtcggcagccagggagtgtttgccggacgtagcagattcttggcatccggaatgctgatcaacttgggactgcctacggcccagtagatgccgttaacaataaccgatgcgtacggagctatcttcgtgctaaaggtggagatgtatcgttcggggaactcatcgtattccttggcatcaaatccgccgccctcacgacgctccagatgatccgatcggctcacctcgcagccgtaaagcttattttgatctaacgttaaatacaaattgtagttcattcagaattaactaatgcaggattccacttgactcacttccatgttcggccaccttgcgtagcatctccggtggaacatactcaatgggcagctcggagaacacctcctgggcaccttgggaaacatttccagagccagtgaacacaaatgtaagtggtccaatggacttgggcatcatgccaagcgagatctcgtagccacaatcccggattgcctggcgagccatcgaggaattgcgatagttatgagcgggtccaatgtgcatgaatggtgtatgatgtcccagggccaaaagacgcagtccaatgccgtgcaggatgttcaccatgccagccactccggcatatttgccaaaggccacctgtcgtgctccgcgttcgtcgatgattcgctcatagtcgatgagccgaattttctatggataaaacagtggcaatataatatgaaaaacttcatttaactcttatgtgtgataggaaccttctccaaaatagcatccaaaagcggcatatttgattcctgcgctttaatcgtgtgcgaaaagaagcagtaggtcttcccaggaatcagtgcatctatgggcacctgtttcactccgaatatcaccgaagcatcactgatgtcctcctgaatatgagctccagcctgcatgtaggcctgttccggaaaaacaaatcaactcaatgttattatttgtttttatttagttaagtgccccgcttatctattctattcatcctgctacgtggtaatctttacaatgcatcaggcgaaagatgatgattgtactatacacgtgtgaaacatttaatccccttgcccctcaacttaattaaatctgattaggttttctaattttttccagtaccatttgctaatcgttttgtaattgcatttactgttggggtgtgtcagtggggtactttaaattaagtgctttaccttcttcaaaaattattttagttagtttagttctttctcacgtgaccctttgaaaatgttatcaactctaaaaatcaccttaatacattatatagattccttgaaatcattgctgcaaacgataagctttgcttcccattgtttttcctctcctcgtcgtttgttttgtactcgatttcaaggccgggccaattgccaaatttagagctccatggaggcttatcatccgagtttatatttatgatgcagcacttggggggcgtgtgtgcctccataccatataaataccatactatgctacctatacacgcgtacttgttgccctgacgactaccgaccgatatgatttccatgggcgattagccctgcagactcaataaatccgttgccaactggccatggaaagttacaacctatggataatgtgacgaaattttaatttcaaattgagctcacctgcatggggtaggcacgacgattggacggctgcactatgaccttgacattctgcttgaccaacttctggacgtgggttggtccaaacggagctcgtcgctcccacaccgactgatcctctcgccgaatggcaatcactcgactctgaaagagcaaaagattgggatatttatttagtatatatattttaaaaattaatatcttttacattcgtatgaatgcgattattcaatgtggctgcaattggggagttgaatcaactcacatgacgttgtctggtgaacggatgcgcgattgttgcgcgcagttgaatcactcgccacatgtttcggcagctttgtgggatcagttcgagcagatgaagtgcgaatttaattgtaaccgttgtgcttattcttggcctgagtggaatgatccgatccgttggctccgagctctggtactcttctaaaggcatcgatggaggcagtcagcgaaacagcctctaatcagcagttggacccagtcgtaaatccagcgataagccgtgctctccatgcatctcatcgcagctaaaagaaaccaattttgtgcgttagctgggcaaaaagagcgagctgctggtgattgtcacttacccgtgagggaatccggatctccgttcgattttcggctgaaaattttccactttgataagagaagtttctaagaattaagagaatcgtccggggaaaattcctcaagcgctgtttacacaatgcaattcttatacaaattttcgggaaaaaaccgattatttccttattgaatcattcaaaattgtttaaaataataacattttaaattttaaaaatatattttttaatagtcaatatgtgtctatgcatatgttcatatgtctatatgttattaaattaaagattcttttaagattttaaaaacaatgccaatgatgttgaaaacatttaaaaacagtatgttcttcatttaaatcgtagatatattttttatagataaaattgcaccttgtaaacaccacttttcgatttcggtttttggtgttaaagcatacgttttattttaattgcatcttggtttcataggttcgtctctagcacagattgcagtgcagattataaacattctactattcacatcaaaaacagagtacgttcttagatatctaaaattctacgagctattgaggcagcagtcaccatgttgtaacttggctaacactcggaaataaatatacatgattattacagctagtaaaacaaattgtttgtttttgctacattctcaggtatgcacaaaactcaaaaggaaaacggaataacagtttgattatgggagttttaaaagaggaaagccgtaaagctgtaaagctggtttgtggatggtcaaacacgtccctctgtataacgtacagttcgatcctctagagcgccggcgcctcgggcagcagcgaggtgaag

SEQ ID NO: 15836 - DNA, 2919 bp, DROSOPHILA
atgcctttagaagagtaccagagctcggagccaacggatcggatcattccactcaggccaagaataagcacaacggttacaattaaattcgcacttcatctgctcgaactgatcccacaaagctgccgaaacatgtggcgagtgattcaactgcgcgcaacaatcgcgcatccgttcaccagacaacgtcatagtcgagtgattgccattcggcgagaggatcagtcggtgtgggagcgacgagctccgtttggaccaacccacgtccagaagttggtcaagcagaatgtcaaggtcatagtgcagccgtccaatcgtcgtgcctaccccatgcaggcctacatgcaggctggagctcatattcaggaggacatcagtgatgcttcggtgatattcggagtgaaacaggtgcccatagatgcactgattcctgggaagacctactgcttcttttcgcacacgattaaagcgcaggaatcaaatatgccgcttttggatgctattttggagaagaaaattcggctcatcgactatgagcgaatcatcgacgaacgcggagcacgacaggtggcctttggcaaatatgccggagtggctggcatggtgaacatcctgcacggcattggactgcgtcttttggccctgggacatcatacaccattcatgcacattggacccgctcataactatcgcaattcctcgatggctcgccaggcaatccgggattgtggctacgagatctcgcttggcatgatgcccaagtccattggaccacttacatttgtgttcactggctctggaaatgtttcccaaggtgcccaggaggtgttctccgagctgcccattgagtatgttccaccggagatgctacgcaaggtggccgaacatggaaatcaaaataagctttacggctgcgaggtgagccgatcggatcatctggagcgtcgtgagggcggcggatttgatgccaaggaatacgatgagttccccgaacgatacatctccacctttagcacgaagatagctccgtacgcatcggttattgttaacggcatctactgggccgtaggcagtcccaagttgatcagcattccggatgccaagaatctgctacgtccggcaaacactccctggctgccgacgagcaagggtagtccggctttgccacatcgcatgctggccatttgcgacatttccgctgatcccggtggctccattgagtttatgaacgagtgcaccaccatcgacactccattctgcttgtacgatgcggacaggaataaggataccaagagctttaagggacccggagttttagtctgttcgattgataatatgcctacacaattgcccagagaatcgacggatttgtttggagagctgttggctcctcatgttcatgatattataaagagcgatgccaagaagccgttggcagaggagaacttctcataccccattcagtcggctattatcgccagcaacggtcagctgacggagggcttccagtatattcaggagctccgagagtcgcaaagccacagatcgcgccacaagatggagggaagttcggagtctgacaagaaggtcttggttctgggagctggcatggtgtccgctccactcgtagagtggcttcatcgcgaaaaggacgtcagcataacggtttgctcgcaggtcaaggaggaagccgatcgcctggctcagcagtatgctggagtggacagcgtctatctggatgtgaacgagagcactggtcatctgcaggagctgtgcggcagggcagatgtagtagtttccctgctgccctacagtctccatggcatggtggcacgttattgcgtggcagagggcacccacatggttaccgcaagttatctgaacgacgagatctccggtttgcacgaggaggccaaggccaagggtgtgaccatcatgaacgaggtgggcttggatcctggtatcgatcaccttctggcactggagtgcatccacgaggtgcaggacaagggagcagttgtcgagtccttcgtgagctattgtggcggtctgcctgcaccggagcattccaataatgccctaagatataagttctcttggtcacccaggggagtacttctcaacacactttccgctgcaaaatatctgagtcagggacaaattgtggagatttctggaggtggggaactcatgtcaagtcctcgcagcttggatttcctgccaggattcgccctggagggtttccccaacagggattccaccaaatacggcaacctttacggcttaggcagggatgtgcacactttgcttcgtggaaccatacgttataagggcttttcggaatcgattaagcctatgcagctcttgggacttatcgatccggagccacatgcattgctacatcccagtgggccggatgtcacgtggcgccagctggtgatccatctaatgggcatgtcggactcgaccatcttctacgagaacctcaagcagaagctgactgagcgcattggagatgtggacggcatcgagagcttgggtctgctggatgatactcctgtggtgaagctcaacactccgctggatacgcttagtcactatctctcgaagagacttgccttcgagcgggatgaacgcgacctggtggtgctgcgccatgaagttggcatccgttggcccgatggtcgtcgtgaggagcgtggaatcaattttgtggtctacggacagccccagggtcactccgccatggcgatgactgtgggcaagccggctgccatcgcagccaaaatgatcctagacggtgagatccaggaacgcggcgtcctgctgcccttcactcccgacatttatcgtcccatgctgcaacgtctgcgctccgagggtctgactgccacggaaacctccagatggctaaattaa

SEQ ID NO: 15837 - protein, 972 aa, DROSOPHILA
MPLEEYQSSEPTDRIIPLRPRISTTVTIKFALHLLELIPQSCRNMWRVIQLRATIAHPFTRQRHSRVIAIRREDQSVWERRAPFGPTHVQKLVKQNVKVIVQPSNRRAYPMQAYMQAGAHIQEDISDASVIFGVKQVPIDALIPGKTYCFFSHTIKAQESNMPLLDAILEKKIRLIDYERIIDERGARQVAFGKYAGVAGMVNILHGIGLRLLALGHHTPFMHIGPAHNYRNSSMARQAIRDCGYEISLGMMPKSIGPLTFVFTGSGNVSQGAQEVFSELPIEYVPPEMLRKVAEHGNQNKLYGCEVSRSDHLERREGGGFDAKEYDEFPERYISTFSTKIAPYASVIVNGIYWAVGSPKLISIPDAKNLLRPANTPWLPTSKGSPALPHRMLAICDISADPGGSIEFMNECTTIDTPFCLYDADRNKDTKSFKGPGVLVCSIDNMPTQLPRESTDLFGELLAPHVHDIIKSDAKKPLAEENFSYPIQSAIIASNGQLTEGFQYIQELRESQSHRSRHKMEGSSESDKKVLVLGAGMVSAPLVEWLHREKDVSITVCSQVKEEADRLAQQYAGVDSVYLDVNESTGHLQELCGRADVVVSLLPYSLHGMVARYCVAEGTHMVTASYLNDEISGLHEEAKAKGVTIMNEVGLDPGIDHLLALECIHEVQDKGAVVESFVSYCGGLPAPEHSNNALRYKFSWSPRGVLLNTLSAAKYLSQGQIVEISGGGELMSSPRSLDFLPGFALEGFPNRDSTKYGNLYGLGRDVHTLLRGTIRYKGFSESIKPMQLLGLIDPEPHALLHPSGPDVTWRQLVIHLMGMSDSTIFYENLKQKLTERIGDVDGIESLGLLDDTPVVKLNTPLDTLSHYLSKRLAFERDERDLVVLRHEVGIRWPDGRREERGINFVVYGQPQGHSAMAMTVGKPAAIAAKMILDGEIQERGVLLPFTPDIYRPMLQRLRSEGLTATETSRWLN

SEQ ID NO: 15838 - DNA, 5149 bp, DROSOPHILA
ccggagagtgtgcgctggctgcttagtcagggcaaggaggagcgggccaagaatatccttcggcgagccgcccatgtgaacaagcgcgagctgccggagagcgtgctggacaagcttgtgctggccaatcgggacaagttgcagcagtcgtcggaaagccgtttccccatacgagaggctttcaagaacttcaagtggcgcattgctaactgctccctctgctggattgtccacgtgctggtctactacggattgagccttaatgttgtgctgttggatggagacaagtacaataacttcgcttacatcgccctggttgagattccaggcttcttcatgcccctgctcatcatggaccgtttcggccggcggtactccctctgcgggctgatgctagccagcggtctttgctgcatcggaacgatattcaccggcgcggatcagccagtgcttcaattggtgctatttcttgttggcaaactgaccatcactgccagcttccaggtgctctatttcttcgcctcagagatctatcccacgaatctgagaaacagtctgcttagcttctgctccatgatgggcaggtttggttccatgctggccccgcagacgcctcttctggtgggtgctcaaagctacaaggatctcctgttatatctaagtgcttcctttccctttctccacaggccaagtattatgccaatgctcctgccatgctcttcgccggcgccgccatcgtgagcggcctgctcacgctgttctttccagagaccaccaacgtagttttacctacaacagtgcaggaagcggacgccataggcgtcaagaagcaatcgaagagcaaggatcttgatctagtcgtcacggccactcaagcgcagtagttctaacgtaatcttattttaaggcagcctgcaaatacaaagacaaatacatttctcttcaaatgtgttataacgctaagaacaaaccatactatacatataaaatatttagcattgacagagcgttgtgttttattaattaacggatggatggtaatggtaatgatcaacattaatacttaagcctaaaattggaaaaataaaacaaaaaaaattaaatctaagagtttcattactcgatttgaaaaaaaaaataataaacagcagtaaaaaaaagaaataaacaatcctaatcaatttgctgtccagagccagattgagattttaataactaggatatgtgctagcaaaaaattattattgttttttaatttggaattgaatgtgaaaatgttttaatcttaaagtgaagtaaatttgtctgtggtccattcgtaggtacttatacaggttcaaatacttggagcggtgtaagggtttctctaattgctttggctgaaaaactgggcaattgtctttgttccgcttgaagatgcagaaatggttgagttcagtttcttctgagattgtttctttggctgaactggagatattttttctttattcagagctgcggttcgagttcgcagatcctgctggtttagttcacgttgaaggtttctggctacgtggtagtctaagtgttccggcatgtctacacacttgatgaaagccttacactcggggcactgattcatctgtggatcactgggcgcttgctcctgagttggtttggcgcggaagaacttggttatgctgttactcggtggtgccgtactgtaggaactgctaccagaaccagccgtcttcttgctctttttgggtggcgtcggcttaagagatatcttctgtcggctctgcgtcctctcttcccgctcggtgcttcttagcgttcggcttagttcctgggcgaagtgatggtctctatgtgtttgtagggacttaacttcgtcgggaatgtttgctccgcactgatcgcatttgatagtaggcaagatatcggtgcgaaggttgggtactgcaaactctacgtaacactccttgtaattacttacagaactttcgatctcatcgaactttctttttgatgttgaaggcttcaattcgtcttcagtaagcgtgggaggcacaataccagtttcaacgtataagtcattccctgttgaatcattcaaggtgtttggatcctgttcttgtccggcatcggatgactgtccttcaggcttagacatgtgggtatcactagttaactccgtctcctcttcagtgtcttcttcaaaatctttcgaattgtcagcctcaatggcgtccaattcctcggccagctcctgcacatctaaggagtcctccctcgatgtaaccgacccttgctgtcctgtctttttttgttgttttaggtactgtgaaaaaaagctttccttgaactccgctggtgttgatgtgagaacagttccttcagtccttacggccgcatgaagcttatgtttgtattcctctacgaaattcttgtttggagcacctgctgcagcagccaagggattcgcagaaatgccgtctgctttcgcatcctcttttttagctccttgcaaatagtttgcaaagaagctcttcatcttaaattcgtccgtttgcttctgctttttctccatttcaactttaggcagttgccctggctcatctccacttacccttcgtttcttggcagcctggttagcaaacatctcctgcagcttgttttgcccactagagacggtttcgaacttgccaacactaatgccaaggaacttgatagcattgtttaaagcagactcgctaccaggacgcagaaacgttttagtgtttgccttgattaggtctagagaaagccttacgatggactcctggtcgtaatctctgagagcagtcgagcgggagctggccacctcctcgccgtcaatgtcctgcacatattgcaccaccatatgtttggccctgcgattgttctcgatgaagtccttctcaaggcggtcgttgatctcggaggaaagctcaccaagccaatgttgaagggttttcaaccccgtaatgttatttcgacccggaaactttttacagcagccaatgcttttcgaatagaagcggggagtcacggcttccaggtctatgccgcgagagatgttaaatagccaggttctggaataagaggaaataagttactttgaacgtggtctactcctcttaagggacccacccattcttctcgtcaaacttgcgctgcagatctacctccgaaaacttgaccacctggcccatgaactttatgcctaatgtctcacacaccacctcaccgaatttgccacccagccccttgatcttgccaacaggcaaggagtcgaagaggctggcggtctccgtcaacggcaaaatagtctgcttgttgggcttgttcattccagctgccaacttggccaggatcttattgtgcgctatgccagccgagcactcgtagcctgtctctttttttacagccgcgcggacttcacctgccacagaggctccaataagaagccgaatgtcgctttgtcggacggcgggaaggtcgttttggtcgtaggacatctggtagcgttcgtcgtccatgtagggattggcgaagcgatttgttatcttgttgacgtagtcgccaatgctgggatagcccacagcaaaggtgttcaccagttcctgcggttgcaatgcaaaggctccctgcaacgaggaaaataataataaaacgctttaaaattatgtgccagagcttacactctgcatctgctgcatgcgatggttaacggtctccgttatgtccaagtacgcctcatccacggaagcgcgctccaggagctgcgtaaatcgctgcagcacgttggccacctccttgccggcatcgcggtacttgctagtatcggccttctcccggatattcggcacctggcagagcacgatctccggacacaggtccttcgcctcgtcgccgcgcatgtggcgagtgactcccttggcacgagcggcgtagttcactgctatgatgccgccacctcgccagggattgtactggacgacggccagcgggcggttgcggtattccggatgctgcttctcctccacctggcaaaagaagcagtccatgtccaccagcaggaccacgcggtcgtacttgttctgcatgctgacatggctgcgtgcgctggacatgatttcatttcgtattattgcgcgaatttcactgcgcgccaggagtgtggccgtggcggggacttcttaaaataccgatgcatttttgaatactgaatacattaaagtgtttcccatatttaaatctgataaaagaattcggaataataataataaaaatatgctctttaacacatatcaaagcagttgtgttatatcttcgatataaatcatttcttagttagatattccttaaagtaaaagtaaagaattttgttgaaaacatattttcgatagtagtggagctttatacttttaaagactctcttattactaagctatttagaaattcaaaattagagagtattaaataacgtacccttgtatcgatgctttgtagtctagcgtagtttgaaaaatacttatctctacccaatccgtacttcgcattagagcaaaacctggtcacactatattggatattttatagtttgtcgtttctcactcggaaataatataaacaaacgcgagtaaatattatgtgcagtccggggagtcctgggagttatatttacgtggcataactaccacctaataataagtaacatatattgtcggaacatctacgccgaagaagaatgcatttcagaaatccttaaaccctgtcttctgtttttctgtatggaataataaaacgagtttaaacgtaagacattgccaaagagtaaattatttgccaagtttccagcggcaccttctaacaaaatgcttagatattgatttttccatataagccgctgccaaaatgcaactgaaaacgcacacacatctcttagtgaccccattccccgccgtaacacacatttgcatgttctggcttctccatttcccaagttcatttgggttaacgcacggattacgcgggaattattgatttgaccgagcgaccagaaataaatctcaatccttgtctatttccggctatgccacttccgtgtccgcctcctggccggctgttttgattgatgcgccga

SEQ ID NO: 15839 - DNA, 3037 bp, DROSOPHILA
acgaaatgaaatcatgtccagcgcacgcagccatgtcagcatgcagaacaagtacgaccgcgtggtcctgctggtggacatggactgcttcttttgccaggtggaggagaagcagcatccggaataccgcaaccgcccgctggccgtcgtccagtacaatccctggcgaggtggcggcatcatagcagtgaactacgccgctcgtgccaagggagtcactcgccacatgcgcggcgacgaggcgaaggacctgtgtccggagatcgtgctctgccaggtgccgaatatccgggagaaggccgatactagcaagtaccgcgatgccggcaaggaggtggccaacgtgctgcagcgatttacgcagctcctggagcgcgcttccgtggatgaggcgtacttggacataacggagaccgttaaccatcgcatgcagcagatgcagagtggagcctttgcattgcaaccgcaggaactggtgaacacctttgctgtgggctatcccagcattggcgactacgtcaacaagataacaaatcgcttcgccaatccctacatggacgacgaacgctaccagatgtcctacgaccaaaacgaccttcccgccgtccgacaaagcgacattcggcttcttattggagcctctgtggcaggtgaagtccgcgcggctgtaaaaaaagagacaggctacgagtgctcggctggcatagcgcacaataagatcctggccaagttggcagctggaatgaacaagcccaacaagcagactattttgccgttgacggagaccgccagcctcttcgactccttgcctgttggcaagatcaaggggctgggtggcaaattcggtgaggtggtgtgtgagacattaggcataaagttcatgggccaggtggtcaagttttcggaggtagatctgcagcgcaagtttgacgagaagaatggaacctggctatttaacatctctcgcggcatagacctggaagccgtgactccccgcttctattcgaaaagcattggctgctgtaaaaagtttccgggtcgaaataacattacggggttgaaaacccttcaacattggcttggtgagctttcctccgagatcaacgaccgccttgagaaggacttcatcgagaacaatcgcagggccaaacatatggtggtgcaatatgtgcaggacattgacggcgaggaggtggccagctcccgctcgactgctctcagagattacgaccaggagtccatcgtaaggctttctctagacctaatcaaggcaaacactaaaacgtttctgcgtcctggtagcgagtctgctttaaacaatgctatcaagttccttggcattagtgttggcaagttcgaaaccgtctctagtgggcaaaacaagctgcaggagatgtttgctaaccaggctgccaagaaacgaagggtaagtggagatgagccagggcaactgcctaaagttgaaatggagaaaaagcagaagcaaacggacgaatttaagatgaagagcttctttgcaaactatttgcaaggagctaaaaaagaggatgcgaaagcagacggcatttctgcgaatcccttggctgctgcagcaggtgctccaaacaagaatttcgtagaggaatacaaacataagcttcatgcggccgtaaggactgaaggaactgttctcacatcaacaccagcggagttcaaggaaagctttttttcacagtacctaaaacaacaaaaaaagacaggacagcaagggtcggttacatcgagggaggactccttagatgtgcaggagctggccgaggaattggacgccattgaggctgacaattcgaaagattttgaagaagacactgaagaggagacggagttaactagtgatacccacatgtctaagcctgaaggacagtcatccgatgccggacaagaacaggatccaaacaccttgaatgattcaacagggaatgacttatacgttgaaactggtattgtgcctcccacgcttactgaagacgaattgaagccttcaacatcaaaaagaaagttcgatgagatcgaaagttctgtaagtaattacaaggagtgttacgtagagtttgcagtacccaaccttcgcaccgatatcttgcctactatcaaatgcgatcagtgcggagcaaacattcccgacgaagttaagtccctacaaacacatagagaccatcacttcgcccaggaactaagccgaacgctaagaagcaccgagcgggaagagaggacgcagagccgacagaagatatctcttaagccgacgccacccaaaaagagcaagaagacggctggttctggtagcagttcctacagtacggcaccaccgagtaacagcataaccaagttcttccgcgccaaaccaactcaggagcaagcgcccagtgatccacagatgaatcagtgccccgagtgtaaggctttcatcaagtgtgtagacatgccggaacacttagactaccacgtagccagaaaccttcaacgtgaactaaaccagcaggatctgcgaactcgaaccgcagctctgaataaagaaaaaatatctccagttcagccaaagaaacaatctcagaagaaactgaactcaaccatttctgcatcttcaagcggaacaaagacaattgcccagtttttcagccaaagcaattagagaaacccttacaccgctccaagtatttgaacctgtataagtacctacgaatggaccacagacaaatttacttcactttaagattaaaacattttcacattcaattccaaattaaaaaacaataataattttttgctagcacatatcctagttattaaaatctcaatctggctctggacagcaaattgattaggattgtttatttcttttttttactgctgtttattattttttttttcaaatcgagtaatgaaactcttagatttaattttttttgttttatttttccaattttaggcttaagtattaatgttgatcattaccattaccatccatccgttaattaataaaacacaacgctctgtc

SEQ ID NO: 15840 - protein, 885 aa, DROSOPHILA
MSSARSHVSMQNKYDRVVLLVDMDCFFCQVEEKQHPEYRNRPLAVVQYNPWRGGGIIAVNYAARAKGVTRHMRGDEAKDLCPEIVLCQVPNIREKADTSKYRDAGKEVANVLQRFTQLLERASVDEAYLDITETVNHRMQQMQSGAFALQPQELVNTFAVGYPSIGDYVNKITNRFANPYMDDERYQMSYDQNDLPAVRQSDIRLLIGASVAGEVRAAVKKETGYECSAGIAHNKILAKLAAGMNKPNKQTILPLTETASLFDSLPVGKIKGLGGKFGEVVCETLGIKFMGQVVKFSEVDLQRKFDEKNGTWLFNISRGIDLEAVTPRFYSKSIGCCKKFPGRNNITGLKTLQHWLGELSSEINDRLEKDFIENNRRAKHMVVQYVQDIDGEEVASSRSTALRDYDQESIVRLSLDLIKANTKTFLRPGSESALNNAIKFLGISVGKFETVSSGQNKLQEMFANQAAKKRRVSGDEPGQLPKVEMEKKQKQTDEFKMKSFFANYLQGAKKEDAKADGISANPLAAAAGAPNKNFVEEYKHKLHAAVRTEGTVLTSTPAEFKESFFSQYLKQQKKTGQQGSVTSREDSLDVQELAEELDAIEADNSKDFEEDTEEETELTSDTHMSKPEGQSSDAGQEQDPNTLNDSTGNDLYVETGIVPPTLTEDELKPSTSKRKFDEIESSVSNYKECYVEFAVPNLRTDILPTIKCDQCGANIPDEVKSLQTHRDHHFAQELSRTLRSTEREERTQSRQKISLKPTPPKKSKKTAGSGSSSYSTAPPSNSITKFFRAKPTQEQAPSDPQMNQCPECKAFIKCVDMPEHLDYHVARNLQRELNQQDLRTRTAALNKEKISPVQPKKQSQKKLNSTISASSSGTKTIAQFFSQSN

SEQ ID NO: 15841 - DNA, 9086 bp, DROSOPHILA
cggatctacgcgcaacaagaaggagtacagcagcaagaccccgccggagtacgatgtggagggcatcgatgtgcccacctatctctattactctgacaacgactactttgctagtctgattgacgtggatcgccttaggtataccatgaacccgagcgccctgaaaagcgcatatcgcatgccggaagaaaagtggaatcatatcgactttctgtggggactgaatattaaagaaattctttatgatcgggtaattaacgacataaataatgcataaatgtgcgctggaaataaaaaaaagcgacatacgtttttgtgacattgtgataaaaaaagttccattggtcaccacttcaacgggggcttttggtagctaatgaaccgataatatacgagtggtcataaattcaaattgatttggtgacacttcacggtgactgaacaacgcaaaacgaactagcctgctaacattttttgccttataagtgcacctgctaaatacaatggattatattaagtgtaatataataaaatataagctgtactagatatttttattttatttgctgattgtgtactgttgagaaatattttgcactcttagtttgaattgcgcgccaactttcagggatgaagcatcttgtaaaatcatcgatagactttcagcgttttttgtggtagtcgatagtccgcaacatactgatcatagtaaaaaatatctgtaatgtatatttaggtgggaaaatatattcatggcatttatttatacgttaaatcaattcttgttatgatattccttaattgtaaaaaaattttattcttgttcttattagcagaatataaaattgaccagtttacgttaacacttttttttaaatacaaaaatttgatttatatttgtttatattttaacgaaccgatgtgtggtgcaccactgtgcgtgtgtcacgacaatacccaagccgatattatcgatgttttcatcgatgttatttactcgagcaggtacatccacgcaaggaaagctaattcgagcgaaaaaaaatttacttagctcttaatatttttaaaaacaacgccctcgctgggccagtggtcggttaactagttagctgtaagatgacgcgcgtaacgagaagtgaaatctccctggacatggagttctgggtggaggagctgtcgccggcacaattggcgtactacgagaagattactaacgagcacaacgcggtgaagggtgcactaaagaacgcggttagcgccaacgagggcaaggagctgtttaacggccaggtgttccaggcctactcctttaagggcaaagtgctgcaggagctcaaggaggctacgctgcccaaaaaaccacccaagccgacggactctccctcaacacccgccgcccaaagcggtggcacagggcggggtcgtggccgcccaccacgacaaccatccaacatcgcctacctggagtcctccgatgagggagacgacgatatgccgctggccaagcgactggcgctgtctgcaggcaaaaaagcagtggccgtggccaatgcatcttcctcgttcaccccgaaatccagtaagaaggctgcatccgctgctagtggaggatcttcttcaccggtacctaagagcagtggaaaactatttaaggaatccaaaccggacatcgaatcgccgccgaagaactaccgccccgccgaggttaattcggtgggcggtctggtggtgggcagcaccgacgaaagcaaggatagcaaagacggcaaggatggcaaggataacaagatgcaaggaaagacatatccatctctggtggtgctagcaaagccttttctcaagatcaaagacatggctgccacccgcagcaagctggactcgaaggttaagctggtgctcatgcttacgcccaataaattctgcgagtggctgctccaggagggattgctacgcgctcaacagcattgcataaaccatcgcaacaacgagctcaaattgggtaagagatatatgatcaactgaattcgtttattaatgtatttatatttaggaatttattcggatgtgaccaagtttccctacactggtggctatgtgtggatcagcgaatgttgcccctaccgcttcgtctccgtgttcaacaattccattttcgaaggagctcagcacccacccacattcctgttgaagttaatttaccactgggcttgccagaccagtattcaaaatgtggtgcagtgggttaaggtggacagtgtttatatcaaaggaatctacacctggcttagagccatttgcactttggcagtgcatcaaaaatgcaagaagctgggcggtcccggcaagtttgtggaggtgggtgttatttccctaggaaccacatcccaagatggctcccagcgacaagtgaaagttgaggttctgggcgtctatgattatgcggagaagtccatccgactgcgggctgtagagccaatcaccgatggtgatcgtaactacaaaaagcgattccaggccattcttgagccactgtcgcgctgggtgcacaaggacagcaccatttgtatagacttgactgtcgacaagatcaccctcttcagcatgggattcaaaaatattgtccaagcagctgccactgacaacacagccaagcacaacaactcagcggtaatggaatatttgcgacggattgtgccgcgcatgttccagaacaccctatcgttgctatctcgccagatgattcaacaattcctcgacgagttggtatggcgagagtcctttggtacatatgccttgcaggcattcaacaatatcataatacacattgccgagcagacaagagtaaccaccaatgagacaatcactcagcgtctgtatcaggtaagcagaatcgaaaaatttttattagcgattagcctttaatagctctttcgtttaggtggcaaccaatccgttcaaggactggagtattttgccggccaactacaaggagacacctgccaatgctgctcccaagcgcctcaagaaacgttagtactatcgtacttttgtagcaagtttttatttaggccgtgaatagaatagtgcgttatgataatctgttaagtgcctgcgtttctcactccaaactgaaatgttttcgttttgtttgattagttttggttaatcgaacccaacagctgagctcaggtccacttattgtgttatgtgaattgtgaatttatataatctatataggtgaaatgtatcattgatatattcacatatgtacaatttaagcattacttcctgacatttctcgtgtctaattattttaaaacaaccccattagagaaaccataaataaacttgcaagaaatttaataactgtttttatttgatttcctttttcatttggagtgataaaacgcaagaaagaatttactaattaaattgattggacccattccaccagattcaacaaaaatggacaaatatgtaatgtttaagtttgtatgttgagattacatctttttaagttaacatcttcaattgcagctatcaacgatgctgactacgttgtttctaacaagattcccaagaaggaaaaggatcgtgatatagcatcatctggagtcaagcgcggccgtccaccgaatgcattaggcaccccaccacctcaattgccaattaaaaagggtccaggtcggccgccgggcagtaccaaccagacaaaaggagacagagcaacgacctcgtcatctaaatcactgtctaaatctctgatagctaaaggccttggtaaaaaaccgaaagaaaaagatgaaaagattccaatggtcattaagaaagaagaggatgatctaaggggcttggaggagctgtactatggaataagtgatggtacggacgagtaccacgagatctttccatatagcacaccccgtacggttcacaacgaactggccaagaccgtggagtgtccaatctgcctgaacggcgactccttcgattccaatgagaaactccaaacgcatttagtatcgcatatttcgccagagggtaagcagcaccagttccagtgccttttttgcttggagaagcatcccaccgagtcggttttggccaaacacaaccagatcatgcatccaactgagacaaaaacggagggttcaccctcgtactactgcctaatatgccagcagcgtcacaattccctgcatctgttgacggctcatttgcagaaggtccacagcaccctggaactaccatattggtgtcactcctgcggctatcgatcatcttcgcaccgcgatttggtcaggcatttttatgacgaccacaagcatcaaaactttttacagtgcccctattgcttggatgtaagtagctgtcatggtaaagtaatcttgtaaagttctctctattaaaaactgattctttttagattttctacttctcaaagcttggcgtcgttaaccagctgcgcatagaacattacttcatgcatttggacgagcacatcaacaagcgtgatccctcgctgcgctgccagaaatgctcgctatccttcctcgagaagggggatctaaagcagcacgcagtgcagcatcatgtgagcatgactaagaccaatagaccggtgcgtctcttactcaacaactcgatgttgataccaccgccaaagattcgcacccatcaccgcgagcagccgccgttctccacctacaagcggccagtattctttgcttttctggagggtaagacctgtgccgagtgcaacaccgatttcgccagcgaggagacacattacacgtaagttcaaaaatattttatttacctaagcaataaatcgccatggataaaggtgccagtattcacaagagaaaaccagagctgacagtatccaaccaattcccaagacacaccagcccagtctcaaagtatccacatcgatactttgatagcccaggacgttatctacaaacctaacgtatccagcacgcatggcatcgttaaagtcggaaactacccagtgattcagcagtccagtatcctgaatcttcaatatgaaatggttaagggatgtctccaagtggctgtcaacgcgcattggatagccaatatgtggagatcccaagcaagcagatgaaaagcgaaaaatcggcttaaaggcatattgctgttgcatggcaaaaaactgccaacgttcttctgtaaaagggtacgcgaagctgcgattaaaactcagcaaagcggacacctgttcactggcatttacaggcaccaaaagccgagatactttttccactaatcgaggttcaacatggcgcagaaatgtgttaatttcatactccttgacgagcaccctttgctgctggtggacaagctgatccatgctatttacttgctcgcccactactatggttgtgaagaagctgtccaactcaatgttgtaccaacttgtggacatgaatcccaggactgaaagttgtaggaaaataatcaaatggcgccatgttggtctgtaaattgttataggggggctgataaaaagtatcttgcttatcgcatctagaaaattcaatcccaagcgttgcggccaagaacttttattgagtttcgggcttatgcaatagagaattccagtgatgtagaaaactgcgaataacagaatataccagctgtacaattggaatggtcgcaataggtacatgtgccttggaatctcatttctcatgggcacaatcaagcagtttggatatattagtaaggggtaactcttggttgctgttgggggtgtgaaaacgtacgggtgcaaagagatttccaattgaccgtctataatcaactgcacaatgtggttcatattcacactagttgttgggtctagattctcatctggattggtcaaacgcagcgaggcattatagtgatccaaatattccacgaatgtgcgatatgcgtatcccagcacctttctgctcttcgttaatggatcgtgcacatgaaacactctcggaatatcattttccgccggagtggatactacatatccatggaaattccttgctgcatgtggaaatagcggttccgtatgaatatcgagtttgaaaaaacgcatcgccggatacggagtgtaggaataaagctgatccctttgcaggacaagaacgttgaggaattgatattgccataaggcgttgaatattgatttaatagcaccttgcgagccacttctttgattacgcagaatgatgatcaatcgaatgcgacggagttttcgtagatttctatccagagtaagccacatgatatcatgtttatcatgacaaaagaacaaagctatgccattgtatctagtgattttaaaatgaccaaggggtcttatatgttcaggttggagaaataaattcattgtcaagctagtaactcccattgtttgatggagccaaataatcaagtcgttgaggtcgcctccttgcgtattatgtccgacgaatattggtgtatttatccacggctcccgtgtagagatgagacttagaacggatttcaacaatgtcacattgtaagcagcgtttgttagcgccagtaataaaataacgaccaataaggttaacactttgcacatggtggttgattcaattgtgacaagccagaaccgcgggttgaggtttataagtcagcagctaattgatttaatagtggctgattgatctcttggggaaaactcattagaatgtgtgaggcaataatttgtaataaaaggttttggcgctctacgcactcatttaatcacttttttatattaaatcttttcccagtggttggctacactgcgttaagtgcaattatcagacatgttgcgagcgagcgcaattccgtcatggcgtggaatgtaatggaaactttgtggacgccatggaagtgaatatgccacaggagatgcactgcatctgcggctttgccaccggcaacggcaacaagatggctcagcacttggcaaattgtggacttagcacctgctacccaagtttggaggctgccagtgagaatgccgtcaagcgtaatatgctggacatgttgggcctggttcgacgcgatggagaaacctctggtgaaggtgcagatattagcgagactgctgatgatgtcgcggatcagagctccgacatgttgccgccgcaggaggaccatcatttgcagcaacaccatcaacaggtgggacatcagcaacagatgcagggacagccgaatgaaccgcaagcggaacttcaacaggaatacttgtcggcgccagttgagcatgagcccgtgcagaatatgccagtacatcagagcatgccggtgcagcagaccggtccaatacaatttggagaaatggaggcggccccagttttgctggatacccagcagcaggtacaacccaccccggattatgctcaagtttcggtggtgcaacagcaccaacagcaacagccctacggactaagcaactacggccaaagctctttagccacggatatcgacatgccactgattggagagctctctgagccaaatgctccacccacgccccagttcctgggcgaggtgcacacgcccatgttcgatgcagtcgctgccgccgagcagcagcactatcacgcccagcaccatcaccatccgcaatgatacaagccccacggaaagctcaaatcacgcgactatacccttcactggcagaactattagttaaagttcattcatattcatcgcacattggccatatcccgaattccgtatcaccaatacgaaggcaaataaattgtatagcacctatttatgaattgtatattggccccttttaaaattaatgaaacatcataaatgaaatctcagttgcacaagggatttgaatgctggatgtgagttgggattttcaaaagatccgttttgaaaggcgtaatcaatcctctgcaatgggatctttatctttacatctaaaatatctttcaattcatttgaatattggaaccttattaattgtaaatgacaaacaatttaaattgtaaatgacaaacaatttgtaagtttaaaatataccttcatatccttaattacgacttttatttgttttgtattgaaaagtttgtgaattcttgaataccacgcacacatgtggtctacgcaatttcgtttaattggcatgaattcaaattatggtaaagtgggagggcacaaaatattttattgacaggtaaggtaaccattattgtaataaggttattacaacgctaattatgtgaattagtggtaaaagcgccagcgctcgcaaagaaaaatcaaggtggatagcagccacccacataggagtactgcccaccgcaggcgcaaggaatcgacatctaacgagtgaaatcctaggaagttttccagaagtcgaacatagccagcgcgcattgcatcgttaaaatcggatactacccagtgccgcagaagtcctgcggcctggatccgcatgatgaacatgttcaatgacgactgcaggtggcagtcacttttcatgggatagcctataatcggggagcccaggcatgccgatgagaatctgaagattggcttgaaggcgtattgctgttgtagtgagaagaactcccatctctccagggtgaaggggtaggcatagctccgattgaatcccagaagagcggacacctgctcactggcattcacgcccactaatagttgcgctactccgtccaccaaatctggttccacatgccgtaagaatgtactgacttcgtaatattttacaagtaccttttgctgttactggatgagctgctgcatgctgtccacctgctcgcccactaccaaggtggtgaagaagctgcccaacataatgctgtagaggttggtcaccacaaagcccagaatactaaggtgcaccgaaactataaaatacctcagggatgggttgtaaatcctggagggagagcatatattaattattcggctgatgctatctaggatgttgaggccaatccgctgatcccaggtgcggtgcagcagaccaggctgaatgtagtagagcactccgctgatataaattacagaac

SEQ ID NO: 15842 - DNA, 4274 bp, DROSOPHILA
agcaggtacatccacgcaaggaaagctaattcgagcgaaaaaaaatttacttagctcttaatatttttaaaaacaacgccctcgctgggccagtggtcggttaactagttagctgtaagatgacgcgcgtaacgagaagtgaaatctccctggacatggagttctgggtggaggagctgtcgccggcacaattggcgtactacgagaagattactaacgagcacaacgcggtgaagggtgcactaaagaacgcggttagcgccaacgagggcaaggagctgtttaacggccaggtgttccaggcctactcctttaagggcaaagtgctgcaggagctcaaggaggctacgctgcccaaaaaaccacccaagccgacggactctccctcaacacccgccgcccaaagcggtggcacagggcggggtcgtggccgcccaccacgacaaccatccaacatcgcctacctggagtcctccgatgagggagacgacgatatgccgctggccaagcgactggcgctgtctgcaggcaaaaaagcagtggccgtggccaatgcatcttcctcgttcaccccgaaatccagtaagaaggctgcatccgctgctagtggaggatcttcttcaccggtacctaagagcagtggaaaactatttaaggaatccaaaccggacatcgaatcgccgccgaagaactaccgccccgccgaggttaattcggtgggcggtctggtggtgggcagcaccgacgaaagcaaggatagcaaagacggcaaggatggcaaggataacaagatgcaaggaaagacatatccatctctggtggtgctagcaaagccttttctcaagatcaaagacatggctgccacccgcagcaagctggactcgaaggttaagctggtgctcatgcttacgcccaataaattctgcgagtggctgctccaggagggattgctacgcgctcaacagcattgcataaaccatcgcaacaacgagctcaaattgggaatttattcggatgtgaccaagtttccctacactggtggctatgtgtggatcagcgaatgttgcccctaccgcttcgtctccgtgttcaacaattccattttcgaaggagctcagcacccacccacattcctgttgaagttaatttaccactgggcttgccagaccagtattcaaaatgtggtgcagtgggttaaggtggacagtgtttatatcaaaggaatctacacctggcttagagccatttgcactttggcagtgcatcaaaaatgcaagaagctgggcggtcccggcaagtttgtggaggtgggtgttatttccctaggaaccacatcccaagatggctcccagcgacaagtgaaagttgaggttctgggcgtctatgattatgcggagaagtccatccgactgcgggctgtagagccaatcaccgatggtgatcgtaactacaaaaagcgattccaggccattcttgagccactgtcgcgctgggtgcacaaggacagcaccatttgtatagacttgactgtcgacaagatcaccctcttcagcatgggattcaaaaatattgtccaagcagctgccactgacaacacagccaagcacaacaactcagcggtaatggaatatttgcgacggattgtgccgcgcatgttccagaacaccctatcgttgctatctcgccagatgattcaacaattcctcgacgagttggtatggcgagagtcctttggtacatatgccttgcaggcattcaacaatatcataatacacattgccgagcagacaagagtaaccaccaatgagacaatcactcagcgtctgtatcaggtggcaaccaatccgttcaaggactggagtattttgccggccaactacaaggagacacctgccaatgctgctcccaagcgcctcaagaaacctatcaacgatgctgactacgttgtttctaacaagattcccaagaaggaaaaggatcgtgatatagcatcatctggagtcaagcgcggccgtccaccgaatgcattaggcaccccaccacctcaattgccaattaaaaagggtccaggtcggccgccgggcagtaccaaccagacaaaaggagacagagcaacgacctcgtcatctaaatcactgtctaaatctctgatagctaaaggccttggtaaaaaaccgaaagaaaaagatgaaaagattccaatggtcattaagaaagaagaggatgatctaaggggcttggaggagctgtactatggaataagtgatggtacggacgagtaccacgagatctttccatatagcacaccccgtacggttcacaacgaactggccaagaccgtggagtgtccaatctgcctgaacggcgactccttcgattccaatgagaaactccaaacgcatttagtatcgcatatttcgccagagggtaagcagcaccagttccagtgccttttttgcttggagaagcatcccaccgagtcggttttggccaaacacaaccagatcatgcatccaactgagacaaaaacggagggttcaccctcgtactactgcctaatatgccagcagcgtcacaattccctgcatctgttgacggctcatttgcagaaggtccacagcaccctggaactaccatattggtgtcactcctgcggctatcgatcatcttcgcaccgcgatttggtcaggcatttttatgacgaccacaagcatcaaaactttttacagtgcccctattgcttggatattttctacttctcaaagcttggcgtcgttaaccagctgcgcatagaacattacttcatgcatttggacgagcacatcaacaagcgtgatccctcgctgcgctgccagaaatgctcgctatccttcctcgagaagggggatctaaagcagcacgcagtgcagcatcatgtgagcatgactaagaccaatagaccggtgcgtctcttactcaacaactcgatgttgataccaccgccaaagattcgcacccatcaccgcgagcagccgccgttctccacctacaagcggccagtattctttgcttttctggagggtaagacctgtgccgagtgcaacaccgatttcgccagcgaggagacacattacacgagatgcactgcatctgcggctttgccaccggcaacggcaacaagatggctcagcacttggcaaattgtggacttagcacctgctacccaagtttggaggctgccagtgagaatgccgtcaagcgtaatatgctggacatgttgggcctggttcgacgcgatggagaaacctctggtgaaggtgcagatattagcgagactgctgatgatgtcgcggatcagagctccgacatgttgccgccgcaggaggaccatcatttgcagcaacaccatcaacaggtgggacatcagcaacagatgcagggacagccgaatgaaccgcaagcggaacttcaacaggaatacttgtcggcgccagttgagcatgagcccgtgcagaatatgccagtacatcagagcatgccggtgcagcagaccggtccaatacaatttggagaaatggaggcggccccagttttgctggatacccagcagcaggtacaacccaccccggattatgctcaagtttcggtggtgcaacagcaccaacagcaacagccctacggactaagcaactacggccaaagctctttagccacggatatcgacatgccactgattggagagctctctgagccaaatgctccacccacgccccagttcctgggcgaggtgcacacgcccatgttcgatgcagtcgctgccgccgagcagcagcactatcacgcccagcaccatcaccatccgcaatgatacaagccccacggaaagctcaaatcacgcgactatacccttcactggcagaactattagttaaagttcattcatattcatcgcacattggccatatcccgaattccgtatcaccaatacgaaggcaaataaattgtatagcacctatttatgaattgtatattggccccttttaaaattaatgaaacatcataaatgaaatctcagttgcacaagggatttgaatgctggatgtgagttgggattttcaaaagatccgttttgaaaggcgtaatcaatcctctgcaatgggatctttatctttacatctaaaatatctttcaattcatttgaatattggaaccttattaattgtaaatgacaaacaatttaaattgtaaatgacaaacaatttgtaagtttaaaatataccttcatatccttaatt

SEQ ID NO: 15843 - protein, 1181 aa, DROSOPHILA
MTRVTRSEISLDMEFWVEELSPAQLAYYEKITNEHNAVKGALKNAVSANEGKELFNGQVFQAYSFKGKVLQELKEATLPKKPPKPTDSPSTPAAQSGGTGRGRGRPPRQPSNIAYLESSDEGDDDMPLAKRLALSAGKKAVAVANASSSFTPKSSKKAASAASGGSSSPVPKSSGKLFKESKPDIESPPKNYRPAEVNSVGGLVVGSTDESKDSKDGKDGKDNKMQGKTYPSLVVLAKPFLKIKDMAATRSKLDSKVKLVLMLTPNKFCEWLLQEGLLRAQQHCINHRNNELKLGIYSDVTKFPYTGGYVWISECCPYRFVSVFNNSIFEGAQHPPTFLLKLIYHWACQTSIQNVVQWVKVDSVYIKGIYTWLRAICTLAVHQKCKKLGGPGKFVEVGVISLGTTSQDGSQRQVKVEVLGVYDYAEKSIRLRAVEPITDGDRNYKKRFQAILEPLSRWVHKDSTICIDLTVDKITLFSMGFKNIVQAAATDNTAKHNNSAVMEYLRRIVPRMFQNTLSLLSRQMIQQFLDELVWRESFGTYALQAFNNIIIHIAEQTRVTTNETITQRLYQVATNPFKDWSILPANYKETPANAAPKRLKKPINDADYVVSNKIPKKEKDRDIASSGVKRGRPPNALGTPPPQLPIKKGPGRPPGSTNQTKGDRATTSSSKSLSKSLIAKGLGKKPKEKDEKIPMVIKKEEDDLRGLEELYYGISDGTDEYHEIFPYSTPRTVHNELAKTVECPICLNGDSFDSNEKLQTHLVSHISPEGKQHQFQCLFCLEKHPTESVLAKHNQIMHPTETKTEGSPSYYCLICQQRHNSLHLLTAHLQKVHSTLELPYWCHSCGYRSSSHRDLVRHFYDDHKHQNFLQCPYCLDIFYFSKLGVVNQLRIEHYFMHLDEHINKRDPSLRCQKCSLSFLEKGDLKQHAVQHHVSMTKTNRPVRLLLNNSMLIPPPKIRTHHREQPPFSTYKRPVFFAFLEGKTCAECNTDFASEETHYTRCTASAALPPATATRWLSTWQIVDLAPATQVWRLPVRMPSSVICWTCWAWFDAMEKPLVKVQILARLLMMSRIRAPTCCRRRRTIICSNTINRWDISNRCRDSRMNRKRNFNRNTCRRQLSMSPCRICQYIRACRCSRPVQYNLEKWRRPQFCWIPSSRYNPPRIMLKFRWCNSTNSNSPTD

SEQ ID NO: 15844 - DNA, 90104 bp, DROSOPHILA
cgacgacacgcgaccaaaggcacacacacattcgcacctacacccacacacggacggggaacgcggacagacacacggatacgtgaacgcagacacgaggtaacggtaacggacagagaaagcgagcacgtccacccgcagcaacactcgatgagcatctgacgaagtgttgccaggtgacacaactcagagcgtcttaacgagtttatcactaaaaaatccgagcatgttaataatgagcgcgcgattcaaaatggttgtattttaacgtatactcaaattatcacagtaagcgataggcaaatttaaatcagtagataaccatagcaaatggccctatccagcttattagcatagcaacaaaacaagcttctgatgtaaacagcttatttgttaaatatatcaaatttctaatagttttcattataaatctaaaatatcaaatgtggcaacactggttccatatgataaaggttgccaccaggcgtaaaaatattttcgttgaagtggacgagggctgcaaaataaagtaattttggcgccttttttgaatttaagtgttcaaaaaaaaatttatgtaaatgaacgaagaagtacacaagctcacaaaacaaaatgattttaattttaattcaattaaacaaattctctttagagtttaaaatattattttgcaatagcttaatttaaataacataaataacatttgtatttgctgtataccttatgcgtaagtatcaataatgtttaaatatgtttaattagctgaaaagtaagtgctgttgcctaaataagttttatttaatgaatctaactattattaatatactatagtgaatacgatgagtcattgtatcatctctcgtcaatatcagtattaacgcacacgaaaactaacgcattagaaagattatctctttttatgatactggtcactctaagactgaagtacatttgtatatgtggtgagaaatcgggtagtttaaaaaaaaccaccaagcgagttggacgcgtaactctttgtaacggatctcggaacgccgtgggagtcggaaaatcgctggacgcgtgttcgtgcgtttgcatgtgtgcgtgcgttcgtgtgtgtgtgtgtgctaatgtgcgagcgggtgagcgaataaaaataaatatatatcgtcaagtcaggcttaagaaatgtgcgctaatcaaagaaaatgcccccaattctggccaattgagaattgtggctaaacaaaaaattcgaccggagttcaagtgagtgccaattgcggagacaaaatggctgcatttcaacgcatttaatttactggcaacacatagcaaacgagagtgagagagagaaatgtagagaggcaatccgagaagcaacataaaagagagagcatgaaagaagtacaagacgaggcacacgaaaataagtaaacatgcaaaaacattgttaaattagccctattgcgaagttaaactacacataatactattcacgaaaacatttttctgtttaattattttgaaacagcattgtaaacaaatcgatttgttgttcttttgtgccagcaacaacaagcgttttaaaagcaacaataattaatttaatgcattttgttgcgtttgcgccgcagctgtcgctctctccttttccgtcttccgtcgctctttgtcgtctctgttgcatctccctctcttgctctcctctccgcgcttgctcattgcctctgtgtgagtgcaaaggccaatagctgtttttgttgtgattttatgtttgtttgtattgctaatgttttggttttccaactattcataaacttattaaacaagaaaaaacgcataccgaacttatgaatatagcgtaaatagtaaaaaacataattataaaaaaaacaataaaacaaataaaattgcctatttttatatttaaatagtatatttttaataatattaaatcaatcaaaatgtctcgctcttctgccttcagaaataaacaatccagtgaataaacacacaaaatcaatcaaaaaagaagatttttcttttttattttcgcttttaatttattaacgagaaaatattggaataaaacaaaaataaaaatataagaaaagtgtacgtgacaagagctcgaaaagaagttgcaacaaatagcaaaaataattcgtgcgtgcgaaaaagtgctgcgaagttttatggcccatgcaaaaagtgctaaatttgtaaatggcatggaaagtgcaaagctctgattaaaaaacccgcgaagattggagtgcgaggtgccgcccaataacgcaaccaactactgccacaaggaaattattaagaccaatcaacgaccttcgcggaaataaaaaaaataaaaaataaaacaaaagcaagcagaaatttggtgctagttctgtttagtcgacagccatccacgttggatccccatcgcaaataatgtcatcaaaatgtgctttcaacattgtattcgtatcgatcattttcatcatcatcgtaaatggtaagttcgaaaaactaacattgattaacaatgtaatctaaatggtttccgttcctatttcatataattttttaaatattttaatttaaaaatacataaagcattggtgttttttttctgcacttgactcactggcaaccgaagaaaccacaacaatcggggcttaaaatgaaatacagccgagggtgctgcaaatgacgcatagacaataacattggaataagtgctcaatcaggcggaaacaaagttaacattttcacccagaacccttcgagcaacaaaaataattacgtactttgccaggataattgacgagtgaaggatattagggggaaggggaagggtatcgttttgagggtggaacacagagggtttcttataattttagtagacactttgggtaattgtctttgggttttctcgcctccctaactatgctgtgggtgtattttgttattaaacaaatggggttgctttgcataattaatttaatttcgctattgtcactccaagcgaattgacagaatgattttcttgtgacccagagtgtttgctttcagcaatattctcacttgcaggtgccaaggtttcaaactcaaccgactctaataacaatctatatagccgtgaatgtactttttttacacttaagttagctactcatatatgtatgtatgttcatgtaaatatacaaattcagattctacctatttatttccacaaagcaagtccattgttggggcaaaaagagcgaagaaggcgaaaagcataaggtataacgtgagtcatgaaaacctgagtaaagctcaggggactcatccatttttattgtgaaatcgttagcttgggtttaacaaaaggggacttacaaaattttaaaactatatacttcggtatgaaacacacagtaggaatgaaacatttagcttatacatctacatatataaatatatatatcagagttgtgctacttaatttatgaatatattgtgttttgtgataaaaaaaatgtcgttactgcattgaagaccgttttttcgccacttcaactaatttgtttgcatggcaagattttcctaagttcaacgttacgaaattcgaggcggggcgagggatcatgacaacaacttccactcttggctaattagccaaagtcaagcaacatgaacatgggtaaaagagtgaggattgagggccaagaatcaagccaagaagagtggcggaggcaaaaactggtttatccacttggccggctaatctgacaacaaagaaagagagcagacataagaaccgagaacccagaagcgaggcgaatagaaaaggccagagacaaacaaaaaatctgcgaaaaaggtcaatgtctcggcattatctgtctgggctgcacaaaccatattataatgattaaaaatgaaaaaattataaaaaaatatatatatatatatatgcaacagctatcggagaagagtttttctcccacaaataagcagcggaagcgaaagaaatatataaaccaaaaatgctgtgaaaagcaacagttctgagatacagtaacaagatacagctgggaattaagataaagatactgtatccgtatcttagtttcagcttgagattgcggctactttttacgtaacttatctgcagttttttggtttcgttttttttttttttttgatcttgaaagagacaaaaaaaacttgaagattcgctgacgagtgaaatgagtttctagagtcacatctgggtttttccggattttattattgttattgataagctgttgactaaaagttgtttcaaatataatttcagtcgggcaaaaagctttcataaatcacatataggagatgtgggagagtttaggatgggaggagagtttaggatgatagggcccagagaacaatggacactttgcccgggcatttatgcaattttcctttgctttatttcccgtacgtgccgagtgcaacatagtaaacaaacaaataatgaagccaccatcgaaatctagagatgacaacgtgaccgtggatgaagaacttcgtgctgtttcataatatactcgtacaaagaaaatgacccacaaaactcgtgggtttatttggtgaatccgacccagatgatagacgcgtttgttctgtatttgccgtcgtatctgccagatacaaatgtatctgtcattgcaaagtgtgttactatcaccaggcggctgacatttattgtttgccgagtgcctctgccaaataaatgaaataaaatgtaataaaaaaatgaaatgcatacatgtagcatttatatgcgaatgtatacatgcggtgaataaatcccttaagcttgttgaatgactgaagcgcctggcacttcaaattgatgagtagctttaatgaaagggcgtgactcgatgtaaattgccctcttctagggcgctgcacatgcagggaaatgtaaatggcttttccgagggtgaaagcattggttgaatcgacacaaatgtcgttatcctggcaggtgaaattcgtgttggcaatttccgtaaccgacttaaaggtttttgcgtgcgcattttaatatgccaattataaacataatccgccaaatctttatctgatatatgattttagtatatttaaaatggcataaaatatatggacgttaaaatccgttttttgagacattactaattattctagatatgggcttagcacttcctttgggaaagtgaataatgtgtgctcttgaaaccttcatttccaccaggaagcccaaagttagccactaaaaatgcgcttaaattggattttatgtgagtattatgctgcctcattatgccaaatggcctaaataacaatcaaagcgggactcgcatgacaccagtggatttggggagtttgaggccggagacttggaggtttggtagaatttaattaaattattaaagttacgcggtaagccacagaaatacgaggggtatacataaacaaacagacgagcatcagacaaaggcataaaaacttttcttttctttcctttttattcccctttgctccctttcttcccctttgcccccatttcttctctttttccccccaagtcaagttgcgaagcataaacaaacagaaggcaaacgattcgccaagacggagatacattatgcacagacgcagctacagatacaagatacaccatacacactactcaccatcgcacagcaacaaagcgagtgaacgaaaaaaaaaaacaaacaaaaatgaaacggggaagcgctgataaaggagaaaactaagagaataagaccaagtcaaagaacattttcgtgctggcattcgcttttcgcattcgcattcaactgcagattcacattcatttgactcgggcacacaattacccacatagatacatatttatccagatatacatatgtatatgtatgcataggttcgtcctttaagccgctggatatgtttttttttttttggttagaactctgtttttgcttcacactcatattttaataaattaattatggaatcttgcaattaactgttgggatttttggggggaaaaggaaagtttttaaaagtgaagtatttatttattattacatacacttttttatatatatcgtgttaggctttcgaaatacctatgcattaagtacatatatgttttttaacaattactttcactttttactcttgtgggtaagagcaattctgattttgtgaaatttctgccttctattttcctcattgctgctgtcttcatctttatgcgtttttccactttgtctgtctcgcaattttcttattgttgctcggggttacgacgtctaaagttggctggaaaatgggaacgggttgctgggggggaaaggtcgatgatgatgatggtggtggtggggcggcgttggcttttatttttattgtgtctccactctgccacagaagtcgacatttttgtgctgtgcgcttttcaagggggtatatttatcatcatccccttttcggcttgcgcccctttggtgtaccggcttttccggcatttttcgtcggtgtgccaaagttgattttcattagttttaatgccgctcattatgtttcgggctctgtcggtctgcccgtctgtgtctggaatctctgtctatctgtttttccccatgcctgcggggcgaaaactcgcatcacaggcgacaccgtgcacgcagattgctgccaataaaggcaaactttcggccaaagagtcgtgtgtgcggttaaatatttcatttgccattccggtactcagatatccagaggaatgtgtgtggatgcgaaaagttttcacgtcgatgattgctgtgcattttttttgggaaaaaaatatgtctatattactttgctaagaaaaactaaaaaatcagagggaagagacttttataaatctaaatacatacgaaagatttattttttaaatttgacatagtagagaaccaaataaatccgttcgtacatttcaaaagtaaaaatttcactgagcattcttttaattactgcatgatcgtattatttattttgcagcttaaagtgcacatacatatgtaaatattgccaaatgcaacagcaaatagttgcaatatttctgctttttaacatcatacgatatattcctcttttagccttttatgtatgctgacaatataactgaattgatatgcagcaaacagatatcaaacatttccataaaagcagccagtgaaaaaaaattgaaaaatgggtctgccaatgttcgtttttttcctcaatcaaaaatggcattaaactgtacataaagtgttagcttaaagttgtgaaatcatttttaggaaactgtataccatttgttgcatacacaaatcaaataccttaaaaaccatagtactagtactggaactaaatgaactaaaaataatttaattttcacaatacttgtagtaaaatggcaacaataaaaaagcagaacataggactaaaagttaaaaatgaaaaaagcaagaaactaataattttaatgacttgaaaatgtataaaaaattgcttatcactttttttttaatgctgaccaaccgcaaatttacgcagtagcaaaaagtcctcattggtttgattttttttatagattttatctataacaatgattttgttgaatctggcagaaaatttaaattatttaaattataaatagccgttggttcatttctcggtttagaattcgaaataaattgagtaaaatcaaattaaagagacattaaaaaccattttgaaattcgaatatgtatgctttttcccccgaaatcttaccaaatcgagtaaatgaatgggcaatgttagatgtacatataccagcaatgcttcagttcacttaaatttgatttatataccattcatttgtatttatgtatgtaggttgccatgggtgatagaggtacgtagaaactgaaatgaatgtgtaacaatctgagtggcgtttcctgcaaaagtgtatttcattgtcatatttagcatagagatgaatgttttaaaaccaatatacagtatacccgtatataaatataaattaataaaaaaaaaaaaacagtattattcctatataaaaaaattcataagtttattcatataaagacatcaagtgtatttgagaaaataaagtaagcctattaatcgaatgcaatttattaccaaaatacaaccctttggaagtaacttgcttatgctgcaccaccaaaaaaacacccttaaaataaaccccaaaaattgacagtacataaaaagctgccaataaaattgtgccacaattaaagaaaaaacgcatagaaataataaataatttaaagcttgcctaagctcaataaattacattaacgattcacttggcatccgttgaacaattatagattgcaatattaacttttaactttctctgaagccttttgcaatttggaattatacattatttaatttcttttgttactacaaaatctccatactatggagaaattgtacatttggttcagcgttaattttatgtgtcagcaaataagaatagaaacaataccacattttacggtgaatataaaatgttgacagtcaaatgaaaataattgttgcaaaaaacatttccgtgtatatttatttgtgcacgaaaattcatttacctgtcgaacaaaatatttaaatgagcacgggaattttaatgagtgcgtaaataaaatggataaaattttattcgttttatacgtcgaattttaattcaataagatagatagtattactattagatagtatagtactagagtactattagatagcttaaagaattaagaaagggtcattcactactcactctattattatacatatatcttaagattgcataagcattgtttgatgctatagatttcgacgttttacgagaactttaactcattatattattatatatcttaagattttggttctcaatgacagcatctttgtttgatggtatagaattcgacctttaacgaaaattattctcgttggcttgtcggcctgtcaggaaggaaatattttgccctcccatcttatttttctgcccttcgccgaaaagctgcactctgcttactgaagtggattttaatttgaatacttttgcgtgtttttgtgctgcaagcttaccctcttttaataaaagaaaaaaatacctgaatgagtggagtccccttgccgcttgtcgggttttgtgtgctgctcgcatattttggtctttgagaatagatttaaaacaagagagaacgctgtagtcgagtcctcgactgccagatactaaaagtgagtgggagaaactaaaaatattgtgggcatatcaatagaattttggagaaagaatacttaaaccttaatcaaactaaaagttttcagcttttagagattccgattatgacagacaaacggaaagacagatggacggatcctgttccaattactatttctgatcaagaaactataaacttaagagggaaaacgaattttgtatacctttatattctaagagtaatgggtatacattccagagaaatccaattagtaaacttatgaatttatctaaaattgaaaatgtttgctttatactttcaggttacgcaaaagatatttctggagttaaaagaggtaagcgtacgtataagttaaattgttggctaatggattgcgaaacaaactgtagattataatcttgggttcttgggtaaactttagtttgaataggaaatttaaaattggatttcaactaggtgttcgtagtaagtcaattatctgactatgaatttattggaattcgtattaggaagttgaatattttttcagacatttattcatgcatttgtggtttgaaatgtaatagtatttgattataaaacactgattgcttttttgattgcttgtgtattgcttttatatagttaaactgttgcggttacgttattaattaattcttggcgatcggagactgctaaatgctgaatcggaaaagctgaaagtgtttgcaactcccttagtttcaactcaatctcttccacatatatgcacctattttttttcctagagctccacacatttggaccattcacacgccggcacttcggcacggctccccgtggtgcaatttataatatgtggcggcaaaggaagtcgaaaaaagagtagttggaaaaatgcccgacgtcgagtagctctagaattcgtttaggctgtccccactcttgctagccagcccactcgaaacaccgggcttttcctcaactcgtccacgtttttccaaccatttttccacctttgtcaccatcttttttttttctcctcctcagcccttgccttttgcaggttgcatcgctgttgacttgtcagttgactgacgggcaaaaaggaaaaatcgcaaagaactgcaaaagtagtgccttttattctgttttgtttttttttcccccgctcatgcaaatgattgggtcactcgacaaggcgtggcacacatgtattaaatatatgtatgtatgtatataaaattgttcgattttttatgattcaattttatgcttgtagcggttgtggttcctggccaaatggcataaaatcaatgaagctgcggcgcatttggcttggaaatggtggccattttgagcgcccccgcccagctgattgtcattatttattgaaaatatagtttgatgagtttttacttggcccgatcccgagggagcagtgcggtcgcgccagttggcaaaagctgcagatgctgccgcgcgcccacacacctttttccgagccccggaaaactccttcttttttccggcagtgttgttttttctgctgcggtcaatggaatggctttttgtgtctgccttctgtctgtttgcctgtcgaggttgtgtgttttttaaaattggttaaatcagcaaactttcaccctactcctctttttattttattttatatgctccgtggaactttaacttttttgttagggttttttttttatgttggcggttgacgaattcataaattggcggttagatgtgcatatttttgtctgatgaaattctaatttattataattaaattttatctggcaaatatttttagcaaaaaattgtgggaatatttaaattactatctataggataaataacaattcacattgtatcagaatcattatattcatttgaatttaatatccaatggagtgatacaaaataacgatcagtaatattatcataaatgtttcgttgcaatttctcttcaattgcaatttgcaattgcaattttctctcttctcaaaaaaaaaaaaaaaaaaaaataattcgatcgccgacgtgtgaagacgtttttatcgtgctccgcacaaaatcggttgttttgagtgaagtgaacgccaaataaaataaactaaataaaaaatctgaaagcgaaagagacgctctatgcgatgcaagatcgcttaaatacatagtgaattgttatcttaaataataaaactatgagtcagaatgacactcgcgcccagcgtcagcgcgagcatgacgaacgccgactctcaattcagcgcaacaacgcgtacttctcctacgtctcaccgacaatcccaaacgcagacatcgagcggtcaataacccatagcccaggaaaccttcttctaccaacaaatcaagaaagagcgcgctcctgctctcccgctctattggctccaacagaagccccgctacctccaacaacaacagctggagagggaccggcagcccgctctgcctcgtcatcggctgcacccgctcacggtctgactaagtcagcgaaagcaaaaccgctagcaataaacggtactgctgcactgccagcaaaacaaaacgaaaacgtaaacaaaaaagctgggtcgacctggcagactggaatggaccggctacattacaataaagcgaaagctcagcccggaaaattcagatttgggaaacaagccgaaaaatacaccgcgaataactctaccttgatcaaaaatgtagcccctgcaaatccaacagatttgccttgctggtagataccgctgaggaccgtgccgctgggatccgttgatatcgaaccgaagaaaacaaagcctcccgcccaatatacatccgcgagaagagcacaagccgtcttgtaaatactttgattggccttattgggaaagatagctttatataactcccctcgtaagaggttctatcaacgaaatcaaacttcagacgaaaacggaggacgactacagaaaagtcacaaactattttaccgcacaaaaaataggcttctacacctaccagcttaaaagcagcaagggcctgcaagtagtcctgaagggcattgagtctgatgttacgcccgaagagataactgaggcgctaaaggaaaagggattttacgccaaaaacgtgttcaatatcaaaaacagaaacaggcagccccaaccactcttcaagattgagcttgaaccagaaaacaagcctcctagaaaaaacgaggttcacccaatttacaaactccagctccttttgcaccgtaggatcacggtagaagagcctgcacaaacgcaacgctcctgtacaatgtacaaactgccaagagtatggccacacgaggtcatattgtacacttcgcccggtgtgcgtagtctgtggagatctccacgactccaaacagtgtcaaattaacaaagaaaatgcatgcgagaaaaaatgtaataacctgcgggggcaatcacacagcaaactacagaggctgtccaatctacaaagagctgaaaatccgtcttcacaaaagaatgaacaccggcgcgggcacaccaaggatcaagctccctgataccatcagagacaaatcctgaagtaattttctcgaaagcagctagtttcgctccctggcctacattcaacactaacaagacaacatttgctaacgttttaaaatcaggtatgacgcctccaacccaaaactcccgaactccacatgaagtgcacacaaaattagacacacaacaaaactatcaccccagctgcgcagcaggaaacaaaaactgaagctatgatgcaagccttacaacagagcatgatggaatttatgacatttatgaagaccaccattcaagacatgatgcgtaatcaaaaccttttgatacaaatgcttgtagcccaacaatcaaataaataatggctaccttacgcatagctacgtggaacgccaatgggcgtttcacagcgcaaacttgagctagctcaattcctacatgagaagcatattcgacggtaatgcttctttcggaaactcatctcacaagcaaatacaattttcaaataagagactccatttctacggtacaaatcatcccgcggaaaagcacacggtggaccgcccatactcataaggaaccgatgaagcaccactttacaaagaatttgcggaaaatcatcttcaggcccatctatcaacattcagctggatgacaacactctccttacactagcggccgtatactgcccccccccgtttacagtattagaagctcaattcctggatttcttccaagcactagggccacacttcattgcagcaggcgactacaacgctaacatactcacttggggatcgcgacttgtgaacccaaaaggaaaacagctttataagacgataataaaagccactaataaacttgaccatgtttcccccgggagtcctacatactgggccatcagacctcaataagctgccagacctgatcgacttcgcagttaccgaaaaatatttcccgcagtttggttaaagctgaatgtctgccggatctctcatctgatcactcgcctgtactaattcacctccgccgatacgcagaaaacgtgaaaccaccaaccagattgacctctagcaaaacaaactggctaggtataaaaaatatataagttcacatattgagctaagcccaaaactcaatactgaatctgatatagagagctgcaccgtgtgcattgcaatccatccttactgcagcagctcttactgcaacacccaaaataacaaataatacaattaattcaaagaagaccaacgtacaaatcgagcaactcggtccacgtaaaacgtcgcttcgcagagaatggaatcttccagatccccaactgcaaacaaaagctaaaagtagcccacggaaactggccaacggctctgaaacaagaagaggacgacgatcagcgccgatacatagagcaactcacaccaacaggcacaaaacaaaagtcactgtggcgagcccactcaactcttcgcccaccgactgaaacccgttttgccgataaggaattcatcaggggctgggcccgtagtgatgaagacagagccaacacatttgccggctcacctacaaaatgtgttcacggccaaaccaggctactagcacattcgcgctaccgtcctatcccgtaaaccgccatcagcaacacaccccaatttgtgtttcgtcctaaagaaataactaaaataatcaaagacaatctcagcccgaaaaaatcccccggctacgaccttatacaccggaaatgatcatccaggctgccacattctgcagttcgctacataaccaagctctttaatgccatcaccaaacttggtacttccacaacgatggaagatgatgaagatcataatgattccaaagcctggtaagaaccacacagtcgcttcatcttacagaccaataagtctactctcatgcatttcgaaactatttcgaaaaatgcctgctgatccgacttaatcaacatctgatataccacaatataatcccagcccaccaatttggatttcgcgaaagccacggaaccattgaacaggtgaatcgtattacaacggaaataagaactgcatttgaatatcgcgaatactgtacagcagtatttttagacggtatcccaagcattcgacaaagtctggctcgacggcctaatgtttaaaattaaaacatccctacccgaaagcacacacaaacttctaaagtcttacctctatgacagaaagtttgcagtgcgggtgcaacactgccacttccactgttcatacaattgaggctggagtccccaaggcagcagttcttgggccaaccttatacctcatctatacagccgacatccctacaaatagtcgcttaacggtatccacatttgccgacgatacagctatccttagccgttcaaggtcccctatccaagctacagcacagttggcactgtacctcatcgacattgagaagtggctctctgactggcgaataaaagtaaacgagcaaaaatgcaagcacgtgacgtttacgctaaacagacaagactgtcctccgctcttgttgaacagcatacccactcccgaagcagacgaggtaacggtaccttaggagtacacctagacagaagactcacatggcgcaggcacattgaagccaaaaaaacccaacttaaactcaaagccaacaacttacactggctcatcaactctggttctccgctcagcctagatcacaaggtcttgctctacaattctatattgaaaccaatctggacctatggctcacagttatggggcaatgccagcaacagcaatattgacatcattcagcgagcacaatcaaagattctgagaaccatcactggggcaccgtggtacgttcggagtgaaaacatccaaagagacttaaatatcccatcagttaccaacgcaatcacggaacttaaggaaaaataccatagcaagcttcacacgcaccccaaccacctagcgcgaggtctaatccagctcagcagccgttcccgtctccggcgaaaggacctaccaacccagcgaataaattattagggccgtttaaacatagaacagttggaaaaataatacaactgttcaaaaaatacttgttatagttaagatttttaaacttattgttagttcttatacaagaagattcaataaataaaagcaaagttaaataaaaaaaaaaaaaaaaaaaaaaaatttctctttatattctttgatttggttctgcctatttaatgaccaatacttttgatcaggctaaatcattgatctcctaacacctggtattacaagtcagtcaactaaataaaatatacacggcattaaaaaaccgtctgcggccaacaaactatagtccattccttccgcttcatattacaaatcttccgctgatacgattatgtggcggcttctagacatcgcaaaaaaaaagtaaagaaatcgaattgggattgggaatgggaattgctggcgtctatgctcgtatatccatgtgccttgaagcgaggggtcataaaaaaaagcggaaaaaaaacattgctattccgtggggtatgaccagttaatagcatttcccccccggttacgcccacgcaatcgacacaatattcaagcgagtatgtgcaacagcttttgctctccgtttttttttattattttttttttattttagtttttctccataccataaccctgtgtaccaagtatcttttcccgttcgcggctgaatctgaagctatgcagtttttttttagcgggaaggaaaatgagggaagtatgaagagttgattgcaccaccggatgggcatataaaaaaggggaaaaatttggagccataaagggacaagatagttggaaaaagtccatgcagaggatagggttacatgcaagagaaatatgcaaacgaataggttgaccgactgattagtttgcgctccgctgctctcacggaaagtgaaataaataaggtgtcagtagatgtggaaagtttgtttaacaatataaaccttatatactgtacatatgtatgtacttttatcactagtgatcttaggagggttgttataactattcaaagtacagtatgccatatcgaaagcagttagtaagcggatttgttaacaagcttgtaaattccctcgatttttgataatttctttatcctgtgcagcataacaataatcgctggagcgctttaatttccgtcgttcaacgcattttcatctgctttccttggttgataaacaaaaaaaaaagaagcggattgcaatcctcaacgaactaaagagctgcaaacattgtgcttgaaaactttctgttgccgggtattgtgcacttgccatatttttttttttaattttccccctattccttttttttgccaaacagatttgcccgtatcagagacagagcagacatttctggagtttgagctaaatgcgaagtggtggcaggatggcagatcctgacgagaatgcggggatagctccccagttcccatggccatcctgctatttagccatgttttgtttgtttttgtgctttggctgcagtttgagcactgccattctctatatatccctccccactcttaggattttcctccaccagtgttcttactcgctttgcagccatttttatcttcaatacacgctcatttacgccgtctgatggctttagggtatattcatatccgttgtgttttcagacaggaattcgcgaactgcgagctgagtagctaagctatgtgggtgcatttcgattacactggtgaaccaacaaaatatgaagcgaataaaaatatgaattttttatataataaaattgaatataacttaaaatttaaattacaagtgatgtaattatcaatctaatatagaatataatttattaaaagatttgtacgtaacataaaacgtgaatagtgtaggtagctttttaatattcctgaaaagcgtgctgactgttttttttgctgccattgtctgtcaaatgtctggcaaaaaaacagcggataatccactgtctttttggcaatacatatttactcgaaaaaagtacattaagtgtataaagctgtacatattttaaatcggctcaccgaaatacgctgccagccagcattttcgctaataaactttgtcgccggagatttaatcaactttattttattgctcatccttgcagccaagtctggcccatccttttttacgagcagcttactcctttctaagccacggcatcctttttgtgttggccaacaggatttccattccattttgagctctctgagctgcctgcacccattgaatggccttgttgggtattgaaagcattgattaccaaatgtgaggcttaaatgtctgattcggctgcaactctcaattcgtttgttctaccttttgccatttatcggcttgttaaaattgcgttttattgcatgccacgtattcattttgattgttctctttatgaggcgctttgtgagcttttcaatgctactgcggtatttttatgttcatggcaaactctttgctttctaccacaaagtcaaagtataatataatggtatctatagttaagtaccttcatataaatagcaacagttcccttttaacgagttacaaaattaacctacaaaatcatgatatgggaaatataatagatattcatgataagcctacgcactttctccacaaatacacacccaattcagcaagaaagcagccattttctctgggacaatctgaaaaaactcattacccaacgctaatcaaaggcacacgcagtgggccagcaaacgtttttatgcttggtaattaggatgtttgctgtgccaagaggggaggagggggtggtccacatgacccacccacgaataactcagttatcagacacgagctggctaatagaagcattagacggcaggacttcgcctccgcaaatgagtaaaaagaaaagagaggaaggacggaacaagaatgtatatgtatttatgtatggctcacgcagtgggtcgcaaacacgcaagccaactaatgtacacaacttaattatcaaaggaaaatcgcagacttatgtatgggatgctcgatataaataatggcgtctcgcctggaaggggggcagaagctaacgctactttaatgggcaaaggtgtatctaatatagatgccatagatactaaagatactatagatgccattaaatcaagaaaataagttgaaataagtttaaatatggattttacttacaattatttcctaccctatctttattcttatataaagtatctaaagttttataaagttaagcttcaaaagttgttggttgaaggtaatcatgttttatgtaccaaattgactgtattcataattgatcaacattgaaaagactgcagtctttgtttacaattttcgagacgaaaaaggagaaatatttgtaaaaggatttcgtaatattatgaatacacgatattttcagtttatatgtttttcaacagcgccagcctttcgtctgcaagtggaacagtgtttctttttgtttttttttcgttgtgttcagttcagttttattttcacaatttcatcgtccacttgtttttgcgttcatcgctgtccattttgcaatctgtagctcccccttgatttttttctttctgttttcggttcgttggagcatttgccgtgttcattgtgctatgctgcatgttattaaccccggacagaaagtttggattcaaaagatcgataaattacaatcgagggctgtgggctactaaattgaaagcaatggagataaacccaattagttgaaaacagcggattagagactgattgatatgcatgccatttatccagtttttgatgtactttttatttaactctcgataatcaataatttaaagatatctaaaaattgactggcttagcatcttgaatttgcgttcaacttttttccaatttttccctatcaaacattcacagagctctaattttaactttgttttcgttgattttcctttcaaccccacaattttttgcaatcagccaatttttgaggattgcctgtgaaaagccaataaaacgcgcagggaaaaacaaataaaaagggaaataaaacacccacaaaagtcacgttaatgccgccttggcaatttcaatttgtgttttgaacaatttaatttttaagccgtcgacggatgcagttgatgattttttcgtttatagggttgcgaaatatatatatatatacatacatatgtacatatatatgtatatggccaccaaatacaatcaaaagctaaaaatctattattcaggaccgccgttccccattgtttattcagtcaaagctgaacgaaacaaacaaaaaactgaaataaaaaaaagcaaagtgtggaaacttgaaactgaaaaaaggcaatattgctgtgcaaagaaagaagctaggggaaaagcgaaaaaagtattgaagcgcatctcagtgaaattttctgttgtcgtccataacagaacagaacagaccagaatagaatggaatggcagtggaaaaccggctcaaccttcagctccagctacagcttcagctttagcttcaggatatatccaaagtgtcagatgtggagaggagctgaggatttccaattccacaattctcttggcgcaaacgagcaggcaggcgacacagaactgaaattgttgaatccccccaaaaaaacaaaaaacaaaaatacaaaaaacggaagaaaagaaattaagtctgaaacatgaaataaagatgaagtgcctgtcgaagaatctgactcagtcagtcagttagtgcactttgggtttggggggagaaggagtagttgtcggatttccaactgggattgcgattgaaagtgggtcttgttttgtcatttctgctcctggtgataatggctgacgagaacgtaagaacttctttacttttgtttgataacaccatattttcaccatattccaaaagcaattacacttacgattatttagcagcttaattgaatgaatttaagttaaccaaacgaaacgagaaaggaacgaaatctttatctcttatatatttgtcattagcacatattttccacatatgcttcatatcaattgttctcagtacattcggggtaaacatctggcatgtcttgtagcttaaaatcgttgtcttcgcccgacgtcgctccgactatttgtctccttcaatttgtaatcatttaaattgatttttcttgtcgtttctttctgacgacgtcgttcaatctgcccgccattgcgttcaacttgaatgcctcgtacactcatggctcgttttaattgatgaatttacggactgccattctatacattgatagggataagcatcttaacctttttatgagcctgagatgcagaccttatacaagaggaaacctacatacctactgccactacttttcctgcctcgaaattgtccttttaaattgattttatcatttgcctcggacattgaacccatgcagtgcagcacaaagaaacagatttatgaaccgacatctttcgttattgacgtcaagaacaagcccaaatgagttgcgttgaacttcctgaagtttgccctggttcagagcatttaccaaaataaaaaccttaattaatattgcatgtcacacacacatacttttgctgcagcagcatgggtaaaaggcaggactcgggggcacaatataattgagattgatgcaattgcatataaaattcatataaattacttgaaactaacacaaagacgactcctccgactccaacgggctcccaactgcgacagcattatgttggccaaaagggcgaggagttttgtgcagcggggtggggcgtaggagaactcgtttgcccaaatgagtcataaacactgaggaggccaaaaacgagtgtcaaatgcacacatgtgcaccatcatcacgattgggatgaaccaaactacatttgaacttgaaaaagttttcgccgaaattcgtttttcgtctgcaagcgagcggaaagttgctagcaggtaacttatttgcatattgaagtagtggatgtgtgttgcattattatccagtggggtggtgtagtttgggttaatgctattaaccttgaaaaaagtgttttttttttttgtaatgacttagtttttaattatacatatatgaataaactgttttgtgcgataatacttttaagttttctaaacctacattttttgtggatattccaatgaattttttttaagcttcacttggtccaccctaaacacacccgagcgcagcaggagaaggcttcagttttcctccatgtttgttatatatcgtcatcgccagctgcttttgattagcgcctccctacatatgcatctcgatacatacacttatgcaattcatttatgtacatacacacatatctgcatacgaggatggaagataaagtattggggcgtttggtttttgcaactccgcttagtcagcaatatatattttgattcataaataatgcaaatattatgaagggtgaagtattatttaagaaccatatcagcaacattgtattgttattgttaaaaaaataaatattatgtatattaaaaatcatttttgagaacagttctttaactcatcgagtgaacctctgttgtgtttcagcaggggtcttgcatgcaaggcacaacaaaatggcatttgaaacatgtgtcaagttccatgcacttgtttatgtttgtcggccaaatttcccggcccaaggccccgccccaaagtccttctaccccctccccctccccccactcatcaagtttttctgccaacacaactacaactaaaacggagagcagacttgactttggcttatttattgtcatgtgcccatttggcttccttagcagctgagagagcctcgtgaaacgtgtttgttgataaacacagccatgaatcatttctcgtcaccgttccccatccccaacatagcaccccccctccccctctgaccagctccccttccacccacctaccctcttacgttttgcttgatttgcatatgtgagcgtgtgtattctgcacacagaattttcttgttgcgctttttatacccattacccttgcgctaagcgggtatattaaattatgtgcaatttatgcaacccaattagatatttacttttaaaagagtttaatagtataaacaataaataaatattttatattttaaatataaaataaaaattgaattaacaattcaatattctaagaactatttcattataactttctttttttattaaatatgtagcaaatcttaaatagttttaaaatcctgattacacggtatctcacgtgtcgagttgtcatttctttcttggtttttttttttgtatgatttgttggcgattttcacgcctcgtttggttaagtttcgttgcgtttcgcttttgagcttcagctactgtttcgagaatttcatttgtttcccatgcatacatgtcgcaatttctgttgtatctatgcgactggctgactggatgactactgcctgaatggctgaatggctgaatggctgactggctgggttgtgtatgttatctcgacagggctacatgtccattgagcttttgtgttttgaattcgctctggggaattgctagggttctgccttacccccaccccctccccattggggagcactgggaaactctgagccgagcccagcggcatgttatgctgataaacacgcataaaattcataaattcgagctgcggatttagctagcacgacattttaagctgttaaaatatatcgcaatgttttgcaagtagcagcacacatttgttgaatgtctaatgaatcgctagttttgtggcagggatgtgaagaaatatgtctagaatttaaatggcattgaacaaactatgataagaaaatactctatttctaaattgttttaagacgtattaatggaaaatgtcttctattagttcaaatgcggatggggtaaatgggtaattgctttctatcaaatttattaaaaatatgcaaaagtttaacatataagatacaacatttcttaaccaaaaatctagtgaaaatatccctttaaacactgtatcttcctttaaattttatatcccgtcacttttctttatttttgtccccaattccattttcgagattcctttgcagcgatgtcgtgtcgcaaaattgacacatttagcagtcgtcatttacttttgttatgctaatctgctgccatggtggatttagccactccctttttggcagctgccacaccccctagcgcccattgtcgggagtaaccctaataagccctattataacgctttgctgccaccgttaatgcccatcgctccaattattttaaacatattacaagcagatttggcacagattacaaattaggttggatgctgcggcttgttggtgtgaattagtgtgggaggtgtgtagatatgtatgtatgtacatagttacgtatagttagttggctgagtggggtgctgactctcgtaactttgaagtgttgcgaacttggcgcacttgatggcactaatttatgcagggccaacaatgccacaccgcataatcataatccagaccgcgtggctaatttgtttataattttcataacttaacgtgtgcgctaagcgtaactcatttccattccttagccaaccatacattttcccgacgccacgtatgactaccatagatttcgtatccaaaatacgcatctctgggtttcctttatctacatatatacatgccatgtgtgtctgtgttttcattttagtgttttttttttttttgtgcaacacttggcatcgcacgactcgactcttggcagccggtggcaggggtaattttgccgtcatgtgctggcaaaatgcaattattataattattttttgttaaacgtgccacaaaaacaaaaagattggaacacaaaggccagtgcaaacaatagaaaaagttaacattttatatgaaaaagtgaaagttgcgttaatttatggtctgaaaaatcgtatctgagccagcctattattcttcttttattaaattgttctgatttttttaaacactgatttttattaatgattttggctttattaaggtattagtggttccatatattttataattatatatatttgaaaagaaaatccacatgcacgaatttcataataagtttttcagcttgaagtttattggtaaaagttgtttgcaatttttttaaggctcacattgcgtataagttttaatatttatgttgcatacaaattatgtttgcgcatatagtaataacgatggaatttgtatcgagaaatgtggcacagaattcattagtgctgctgcgctgtgaaactattcattattgaaacgctgtgttagccagcggccaggatatctgcttcaaggcacccacatccaatttcccaagttacgtgacttggacagcattgaccgttaaaccgaatgttgcatcaacccggtaattaaaggtaaagcgctggtcggatgaggtggcaggacatgggggaggtcctttgatgatgacgaccaccaccacgacgacgactatgactctgactctgactttaccgacaacgcgctatgtgttttgtgtgtgtgcactagttaacgccgttgttgtccctcgtaactgtcggaaccggcacccattcctctgggtgcagtcctgcttttgattggcatacgcgggatggatgccttcgtatataaacgtgaccataaccaaaattccccccccctcccgcaagcattgcccagcccctcctgctgccccccgccccaaaaaacaaccagcagctgggggccatacgcagcaaatggcgacgtcttgtcggccgttgaatgccgcatttcattaactagcacaacggcatcgccaagtgcaactgcaactgcatcctgcattctgcagtgtgcattgtgcacgttcattgtgcgtgtgcattagcgatcgggcccaaggcctccgtcctgccaccaactgccacccacagcccaacaccccatcatcccacccattacccattacccacgggcgcattgtttactgtggtgtgcagcatattggttgaagtaaaacccatttaaaaatccaaaagcagttccattgaaatgcttatgtagtggaattttggtattatgctcattatatgctgatacctaattgattcatgattcatttgaatataaacttaaaactttaaagttttaaaaacactccaaatatgtagttctagtaagtcctgcatatctatatctatacatctatagaaaacaggcaaattattagaaatattgtttaataaacatattagaattttcattggaatgccaatattacaatgacatttttgaagcaaactcctttagattatctattgcattcatccagataacttcgggcgcacagtgcatcggggaaaatggttgcactgggatggttgcagtggacttccgttatggtcatagcaacctgctcaacatgttaatgcaacggcgaaccaaaatccaaattcccatgcagctgctgcttgacaacagccccacagagattgggtcggtggcaactggtttgggggttagttggaatcgggtagggtgcggttgggtgtggggatcttggcgtgatgggttttgctacgtgcatccaaaatattcagccctgttccatttgcacagctgctgcttttccgaggtgctactgcgacctctctccatccgctttgaaaagataattccacattcttgggtatccgttccaggatgccgatgtccaggatgtccccttcttccttgcatttttatttgattttagtgctttagccctttgttttggttctatttttgcacagctcaaactgtgtgctttgcacttttattacttctgcctggtgtccgttgtactgtgagttcaactatctatatatatatggttggctaagttacaaaaatttggagcgggtcatatatgtctatgtgacccagagtatttgctttaagtttggaatgcaatcaaagatttaatattctcaaagcacagaaataaaaatttaattactaggtaaattaataaattaaaacaattttaaataataataatgattggaatgcttttattggtttctttgtttcaagttaatgatgcgaaacatctgtttaaatatttaaaaagcgtacaacgcgtatatatcgctacaaaaaagaactcagtaattatacaatttgtattttcgcacaatatcttctattccactgggaatggctactgaagtaagattcggcgcagtttccgataaaattgcaaagcaactgtagctcagccactggagaccccatgggattgcacttcattcaatcgctggtctctcagctcatggcgtatttataaatggaatggttttgtggatttcttatcagctcagcgctaacacgaaaattgaccgattgggttggtgtttttataacgagcacaacttgagtaataccatcatttaacaaagggttgataacatataaataacacgaatgtaaatatatttataccaagtgataaaaatagaaattagtacacattcggatagagactagtcgttgccgaatcgaaagagcttgactgctactttatcttgcgttacccccaaattgcttgctataaatcgaatctaagacaacatactgttccacttaaatcgttaagaaattggctattaatttgccagcttgacatttgaacttagcatgcagtgcgtagcaaacttatgtcaatgcccctaattaatcgagttcattgccttgaccagtggcgaaaaggcaatggcaaaagagaactaacaacagcaaagtgcaaaagggaaaaacgaaatcaaaagtaaaagccgagcaacagagacaagaccgatgaccttcgcttaaagttcagatgtaaagtgcccaagcgatccaatggaaactgacaccctggcaaaactcggccccaaatgcatggatacagatacagatacaaatacaaatacaagtacaacctaccatttccgtttcctccccatccacctctatggcatccctctcattccttccttcgttcagactatgccgtcatgcaaatgacaggtaattgacctcataaagtattctccactcggttggtggggtgggtggtttggctggttggttaggatggttacactctttgggggtgggatgcaacaatttttacttttcatgtgtaatttgatgtatgtgcgcggtgcatgttcgcccctttttccttttgctcgcccatttaagtgtaattttgtatgtctctgttttatttcttgttatatttttttttcgtacacatttgtcacgttgccaggagaaagaaggaataaaaaaaataaagaaattctaaaatgttaatgtgcggagagtcgactactcccttgttcttgttccgctgtggcacttgaagtaaacgctcaagtatttcgcggatcgggggtattgtgggggcgttgatgtgtgcctactttactttctttttcttttacattttttttctgcattttttgcctttgcctttaggccgccatatgtgggctgtatggataaacgagcaattacgattaattgcatttgataaaatgccattaaaaaatgtaaaacagacagaagtaccagtaacttgtgtgcctgtatctgagtgcccgaccctctgtgagaattgtctttggaaaatgccaacgttttgcgtaggccgtttaagatcaacggccagatgagaccacaaaatgggtgcacttaatgcgaaaattatcgctatcataagtagtttttcaaatgttatctgcaatttttcagcattaaatgtgaagccaattcaaatttttaaagatgtaaatgtaatattttctatggacctctttatctgcacggttttgtgtaaaattcacattatgctttttagcataatccctgaaagattaggaagattttctcttgacaatttcaataatttattttgcgtttagcccgccctgttcggagcacggagcagcagacaatggcataataaaccataatcaaatatattgtaatgtttatttttcgtcttctctttacaggtgagtgctcggtttctaacgctgaaaatgtacttcataaaaacggagttcgctgctccaggtaaagtttgcttttattatcagaagcgacagggacaacagtagcaggacgaggatgactggttccattttttatatacatacatacatacaaatatatatattttttgtgctggcagtttaaggaagcatgccccatttcctcctgctcctctccaaacgatgtccacataaataatcgcttttgtgcgaccagcatccttgcaacgaagcacaccttcggcttttctgcctcgccgtttcatgttttcctttataatttaaaattaaatgttgcatttggcacataacgatgtaaaattgttagcagcttttctgcgggcaggccgtgtaaaatatgcacaaatcccttgggtccttcagcgagtgcatgtgctttagatatgtacatatggagcagttggggaacctttgccacttcggcatggaggagagtatcctccattttcccgcctgaccttccccaacggcatttgcaatgtctgtgtgtgtgtacattgtgggtgtttcagggctgtttcctgcaaggataattgcaatttcctttgcttttggtttttgtcaattaaaataatttaattctcagttcgctttgagcacttaaatggctatgtaccgctggcgattaagcgagctatagtttgagctgtaatatggagtttataaattgaattttatacatttaataatattgtatacagaatttttttaaatgatcttgccataattgtaatgtctgcctttgaatttatgagcaagggttataacagatggttgttagggagaattgtaaaactagtttaaagtacatggctaaaacttatacatattagttacagttaggaattggaactttagatttttaaagaagcacataattcaattaaaatatgtattttattatgtcgtgggggcttttgaatggaacttgccaatgctgctgtcatatttgctttatattcacaattttttcattcgtttttcatgcaaactcagcagtaaattcgctccatatctccacacgcgtctgtgtgtgtatatggcatttttattcgctggatacgaaataatatttacggcctgtggagcgaagttgaacagcagggaccaaaaaacatggacgagttctccccaaacgtcactagctgcaaatcaaaaaggataaactgtgctttcagctgccatccaatcctcttgctctgtaggcttagttatatgctatgtagtgctgtagtgtgtgggcgttatgggggggcgtggctggtcgagggggttatccagcatgattatgaattcgttgcgaaaatgcaaacttccgtcattgagttgcgagtttgcttgtccgtttgcagtttgctctttgatttcgagtttgcatttgcaatactatatatgtatgtgtatgcgtttttgtatatgtatatgactgacagagggcgaaggataaatggatcgaggatggtctgaagggtggtggtggtggggggggtaggaggattggattaatgccggatagctcactgaatgcgttgaacttttgtgtaaagtgcaattgcattttatttcatgctcactccctttgccactcgccttttttgtgcacaaatttttagtaagctgagaatttccatggcgccatttggccatgtttgtgcggccaactagtcccacgctttgagaaacaaaccaaaaaacaaatttagaccacaaggaaattggtatatcagcataaaattgtgaaaacagcttgcccagaaataagagcacgtaaaatgaacttcttggaaatatgaatgaatgttttgttatgatcttacagcatagttgttttttctgtaatcatataacaagtctttaaatacttacaaatattataatagtgtccttaatacgtttataaactatttttcgttaagagagcattcgatattctttacgttgtactccttttatggccatttgctttgctaatgaaaaggattcgtttagaattttaagcaaataggacgtgagtagcaggaaaatgtggcccagcccaactcatttttgctaccttgactagtgtaatttatgcacgtgtgtttttgtataattccgaactatatatatgtgtgtatgtatgtatatgtatgtgtatgggagccatgtcagtgccattgcagttacattttgctttcatgggtttacccgaagcattttaatgctcattatgcatttttgctggcgtggcctggtcgttgccattggcattacaactgccgccgaatccacccactcctgttttattatgtttattactgttaaataatttgtatgcaattaatttagctgcagcgaaaataagaggaaccagaaccagccagaatccagcctgattatggcacggccgagtttccagtttcatttaccatctctcattagcacgcagagcactttaactatggctctgttctgggccaaatgggcgtgaagttgaacaaagtttgtagtttcatatttaaatgagctatgcgagtgttttccatgccagctagttgtagtttgtttcaataataataataataataataataataataataaaaaataacaggcatatttaattgaattttttcataaatccggtctaaacgaataatatgtagagacaggattcggtaatgtataatatcttttcatgcaaatttatgtgtgagagtttttcactgtttttagtatttgctgtaattagtatttccattaatttttaaacaagaattttccgggcaaaaaaaaaaagaaaaaaaattaaatgtatagcataaacaaaaacagaaatgccggcgaaacaagaaaagaacaaaaagcgcttcaccataaaagccataaaaagtttggctggaattgggaaagcccaaaaagtcagcatgcggccataatttagccgtaaaaacacaataggcaaaaaggctctgccctttaggtatagccaaacacacagtaaatacatatataattatattgtgtttattgacaatcagcagccattaaaatgccaagtctgacaaaacaagaaatgtgaaagaaaatcagcctttctatgtccttggagcggagaaatttcaagttcatgacttcaaattgaaaatatcgccaaggatatgaatcaataaaagttcaagtatcaaaagtaatggttttctatcataattattataaggctaatttaatttaggcttctcaaggtcgtcacttaaattaatgctaatgtgtaccgtcaagcaagtctaatctgcgaaacaaatcaaatgagattgtgaaattagcttacagctaaaaacgaaaaccaagtcaaccaagcggcaacttacaatgccagtggttaaaacaaggttgtcggaatgagttcttcagcatagacatcgtatgtaaaatcgtatgtattcaacttgttaatgagttttacgaattgtgttgccttcgcgtgcaaggtgggccaactaactgaatctcaattatagctcatttaagctcaggttcttcattaccagcaattaaatcatacgagccagttcgtttcacttgcaagttattttaaaattgtataatcctagtaaaggtttaaaattatacattatgtataacaaatataggtttaatattaaacaagagagaacgctattgtcgaatgtctcgactatcagatacccacttctcatagctagctttattcgctcatcatctagtcttgtatcttcatccaatttatagcaccctttaaagcaattagtaacatgtataaacatagataaagctgattaaaataaaagtgcaagaagtagatcgggcttatcaattaataactgctacacttaaattgattgatgacttaatgaggttttaaatcaatatacccaagacaagtgccactgctgcctggcatccggttcttaacattattatgttttataatcacaataatgaacacccatctgcacccttgagatgagaatatgcaagtcgatgcaatgggaaatgtatcaagtgcacggagcggaaaagcagtgcagcaatcgagaatgattattatggggattgcgatagcagtgatggctgggttggagattcgaacaggttccagctaagcgcttgcatcgacatcgccatcgcaagttggcttttagagggcatttgctttgctaccgtccatgttgcgttgtcatcgctgaagctgctattgtggatgttgttgctgttggttatcttgttgcagtttatataatcaaatctcatgcttcgttaattcaaaatgtcgttacgtgtaacatgacaagctagctccttgggcacaactcgaaagtctgcacattgtgccacatcatcctgacagcaccagcggcaaacgagaaggaccatgacgcaggacgaacccataactgagcaagtgaaacgtaaataatactgaggcgcaaaacgaatcgaatcgaatcgaatagaacaacaaactttggcgtaaccacatcaacactacccacccgcttatcacttatccgcagtgccgcaaaagacgcccccttgtgtgtgctacacattttgagagaccaccaaagtctgtggccctcctgattgcgtgtatcttgcaacacttcccttcaacaatattttcacgatgttgttcgacatgtgtaccttgtcaggcattttgataagcgtcactcaaaggggtacattaaaaatataatagaacggtgtctttcaatttatactgcaataagagtaaagtgttctgtaaataaacttgagtgtagtgctaactttaaagttcgcagagaaaggtgtgattaaactgaaatgaaatagtaatttttagggtaaatcaaattgcggctagaaacacgacgaagctggtttttgttatgtaaggaattttctttcatccttttatcccttttaagacttgcgatatttctcgcaactcactttttggttcgtcacaagatgctgaaatgattacggcattgatgatgaagccgatgctttcaagtcttgtaaggcctcaattgtggctcgaagtagaattggtaaagggcagtttccataacgaggccgtacccttggcgctgacaaaaaaattcaaccataatctatatctgttcatctatagttctgttgggcattttccggctcgccgctgtgtttagcacggtcataaactttattttcgtttattgttattggcattgtctgctgccattttatgttgcctataaatttgggctggcttccgaagccaagaaaggccgaaacaggaatgtactttatttattccttgtaatttcatgttaatggttttgttgttgtttgccagatagttgctcccggatcagaatggttaaattattccaagggtcaactgtgaataaattctatgtactgtcatcttaactctttctttatgttaaggtgggttagggcttaaagtgcgtttaatgtccataaaaatagaaaaaaaaataagtttcaaaaatattgacattttccttcccagaatttcagcgcatacaaaacggtgaaaaggaattctggcgagtctttgaaagtctgagcacacttggcagcattttcctctcatctcctcacgtctattggtcatttttggcaaacaatcaaagcaattatggcagactctcagttaatgggagttttctcaacctcttcgaaatgtttttcctggccaaccagacgaactcggcctacaccaggctccaggcttctggctccagacttccagattccagacggtctccttaccaattaacgtcaatggaaagtaacacaaatgtcacttaatgatgctgacgactttttcatctttctaccgaattgtgcccagcattttaccctcttttgtgtgtatctttaccgaccgcaaattaattggcgcactcacaatttattttgtaattgttaaattaataagtttgtggtctggctcctgtgtgtgtgtgtgtgtgttgctgccacaaaattcagtgccaaaagtgggcgtcgctgactgcctgcaactttttgtggaacatttttaattgctagtgtcggcgctgtcgtcatcatcgtcgcaaaccgtttgccaacttccagacgacggcaattcccaactacggtttatactttttttctcttttaattttgtattttttttcgaattttagacagcattgggccgtgtttgcctgttgaaactcttgggggtactcaggctggaagttacctggtacatagagcagtcgggcaggaggaagaaccatcagcataatgaaaaagtttcgaactgttttcagtacagtgggcgcaaaaagtcagcattctgcaagagtgagcgaagtgctcactgagagcagccgtcaaaattatttccgctaatgcattaaacatttgtaatcatagaaggattacacacaattatataatatatataataaaataataaggaaataacacaatgttgcatccactgttcaatcgtagctctggtgttcatttcctttgcgtttttcttagttctgctttggcaatatgctcattataaatgtgcagggcttgtgtgcaaaaaagcgtgcttataaatcagtagtatgtacgaatatgcatatatatatatacatatatttttacttttttccaactccagttgtaagttgtatgcaaaaaaaggcaggcgcaacttttgtaatgctttcctcgcattgtctctggttttttttatgccttttttgttggcgttgccatcgtcataggcatggttacccagctgctgtggtttttgctggggggctgtagctatattagcaacgccatttgataatggattccttatttatgtatgaacaaaatccccatataaaccgggatgatggcaccgaagcggagtttggggtctagctgtcatggcttagctaacacgctcagtcgggcactggcaactgaaaacatgctaaacgctgacagactcattaacaatttagaaatgaatttcttgtgaaaattgaaaacagaaaaagcggcatacaaaaaaaaaaaattgcccatttgtttttttctaattcggcgaaaaatcccttatttattatttaaatgaatcgatcgatgaaacgacattaaagtcattaaatgtgaataacgtgaatgttagaaaacgctctaacttattctattaaatttaatcctatgatgtgatgacaatggttaggtcagaaactcaaatgagataaacgattgaattgaaatataagccatgaattaaatttaaatatgcgaatgcgtaacatcacttgaaacgagtcctaaaaacacatttgataaagagaaaactgtattgcataggactgtaaatacaaaatatgttatagggacagcagatcaacaaagcgcaaagaattgttaccaaatttgggaatggcaaatattcagagtggatttctcagtttgcgcataacccagtttctggtttatacatacagacatacatatatatgtatatggcaatggcaacagtattgatatttgcatatgtgccatatgtgaaaaattgcacatgtgccggggcgggggacggatataacaagtgggtgaaatggaaggatgtgagggtattcatttaccacaaaccccttttctaggttattcattgcttttgactatgaaaaatgctttggggcttgctaggtcagactgagccgtttgttactgtgctgccttcataaatttatgaatgtatttaattgaaattttgtttctgcatggcagaagctttaacactcaaatttacaaagggctacctattggaaatcatcaaaaaaagcattcaaaagttaatgggtcgcatgcatgcatcatcatcaagggaatgtatttctgctttttttttattatgatcgttaaataacgaatttatgtttgccttacaccagtgaaaacgtgctgagtgatatttaaatgagtcattaaaatatacaaaaagattaaatacagacacagtctcctcaaagttaagctatctgtatgagctaaaaataacaaagtgatttgcgagctgcggattgtttgtttacgctaattgcacttgttaaaagtatatacaagttggcccaaaaatatttgcttttccaaacaatatactttttaaaaacttatctaactaaatgacgataatggtaatgataactggttaaataaccagctaaaatttgagcaaaactcttaaatgggaaaatcccatgacagccgaaaaacttgcaataaaagttgctcttatggcattcgatgttaaatggaacgctttaaattctaatgcccaaacgctcagggctcatgtttgtggtgttgttagcaacatcgctgttgtgccctccagtgcagcaaatgacattattaacccagtttctcgtactttaagctcacaatacacactctcacatgctttcagccatcatgcgcttcgacacccacaacaaacaacaaaagcgagaaaaaaacgacggcccaaaccgatcatgcttatacccttttatacccgtaatataaaccaataatatataaaaaatagtttgtaagctcaacataatttcctttagttttaacttaatcttttcaatatatgacacttaacaagaagtgaattgaaattcgttagcatcttttctaagcttatttgttaggcgggcctttggttgttgtttatttgtcgcttcacatgcttcttattactttttacttctagttagtagttggtgctaagctaacgtcttcgccctactttaagcggagaacaagcaactaaacttcacagagggcagcttcagtcagtacttacacagtcaacgcctttctattaaaccagcaatttatcacacgtatgtgtaaattaacaaagaaaaaacatatgtcaagcaaatcgaaagtctcagtaattaactgggtttcttcacctaaaaataagacagttaaggtgcataggtgcattcactgctgtttgctggtaaccctattagttggattttaagtgaacatagttattaactaatcaaaaccgaatgtgaaacattcgtgattaaaaaacgtagttcgttgcaaactatttgaaaataattacataaaatgttcgatgtcttcactagggcctgccaactttttaattatcccacatttttctaatttactttttcggcgaactacttttaattacaagtctcgttgagtttgaccagttccccgcctaactgttggcaatttatgttgcactcgaagtttctcaagtggtgaaggcaattttgtacttgacatgatgtggctctgctttttggtccgcctgccaagtggatctctgaatgtggatgtggtttccggtgggcggagggtggtgggtggtgacttgctacggttaaagcggcgaaatcgttagttaaatgaagcctagtttaggtaagtttttggtgtgcaaataaatctgtgtaattagaaagtttctggccatgtttttcaagctctatagtagtttaaagtcctttaacttataattaaaaaagtacctgtaaaggcatttattattaggtaatatgaatgtcaggaaaacgcatgtgttttttttttaatctgaatcaacgttgttagtctcattcgatttcaattaatttaaagctcacaacaaaaaagttccattcgtggaaagcaaaacatttataattactttgaagagtcattcacaaaaggtgctggctgtcgaagttttataattgaaaatacttgctgtgattggggagcaggccagaccgcctttacatcacctacaccgcctcatgttgcacttagtcaacttcagggaaccctttcctttaaacttttcccaattaaaaagtttcctattcgcgttccatttccagttaactcacttaacgtacttcggtatttacacgcgtgaatatattgtaagtgaaacacgttcaattaatgcgagtgttattaacatattagtaactcatctggtaaactttttggggcatcgaggcagtcgaattctaattgaacgaaacactattgccaactttcggacttgttgggcctgttcaaaactctagcaaattaattctgttgaaaagttttcgcatttcacaacatattgccgaaaaccgcgcgctgccacctagcaaaatcacaaaacaatttgcatatacatctacaatatatttctatgtatatgtatatgtatatgtatgatgtgcaaactttgtccttggccaggacgaaacgaatgacgaagatgacgatagtgactgctgggcaaaagatacagtggctagacgaaactttcatccaaactaataacctttgaaatatcataaagctgccagcatttgaatcatcaacttttataataacaaaatagcgatgaaggagtagaaaatatgcttaatgagccagaagttcgttgtgctgtttgaattaaactgagcgacaagtttgacttgactacagatgctcgcaacttcttcatagaaataaacattataaaatattggcagagatgagttcaacttgggccagcatggtttttctcagcgtcaaacttttcggttcaatgggtgcatgaattgattgctggaagtcaagttgcaacttcaaaaagttcggaatcaggagtttatctgttttcgcaggacagtgactaatatgagctaatgaacacttaatatttatatatatttcttgtgctaatataattttaacagtttcttcctagttgttatcagttgagttacgcgaatacttttcaatgttttcttttcatatagaaagttgattcgctttcaagtttttaattacgcaaacttccccccttcaagcttttcgaacttctttcaacaaactgactagctttaatctaattatagtgattcataccttgatggttttaaatccaagcatttactgcatagaatgtctggcgcgtaagcaataatcatattaaaaggtgagagactcgagggctgattaaatagtggagctatttttaagcacaaagaagctctagtttcagctacagaatgacattctgtcagtcgggggctataaattaaattccatcttcaagaaaagccaggtctggctaagtgctcaaacagacctcgcagcgcttttgtttgcctgtgactgtgtgtaatttattagattttggcaaatattttgccagaagcgcatttcactgtcagaagttgtggcgtcacgaccagacagacagacagacagtcagtcggagaggatactcgcgatattcttgggaaaaatgcttatgatgtaatgtttttataagctccactatgtccttcctactccttgtcccacgcaggagccccttgtttgaagagaagttgctttcctagacagttttcccttttggactgaagccttgaacgttttccttcctttgttttccttgtttgagcaaccaaaactcctccgtctcacttctattctaccagctccttgtgcttttcccgtttggttgcagctgacagctgcctgccaatagttgattttaccaatatacgttttccacttgattttccccatggctgcattcagtttcctaggcgaaattcactggtcaagtgacgcggacacatagaatgtgctccattttgttgaattataccaaatttcaaatgcaagccaatttgaattataataatattataatattagtaaaattatcaagattctgggcagctttccttgatataaggtatacattgaaatttaaacatttgtagcaaacttttgtattttgattacccactggaatctactttattattcaactcccaatagctaatagggaaataaatcttctgcaccacttttccctgaagactacgtactccccataatatctgccaatacgatccactgccaaaaacttttctttttattttcgattggctgtaaatattgatttcgcgcacagcacgtgcgccgcttgagcgcttagattttcgctgaggaccaaataggctgaaggatgaagtgatggtgggttaagcgagtcgtatgctcattcttcctttatatgtatttatatatatacatatatctatacattccagcatatatcggtctttgtgaatgtgcgcctttgcctgtttgtgtggcgctttggcacacgtccttgtgccagtttccaagttgcctgctgcctttttcgctgatgtctggctttttggctgccttggaaattgaaagtctttccctttacttcagctgaaaacatttaacgtaatgccaggacacgtgctccggccatcaattgagcttctgttaccatttatttacccaactgtttgctcctatgtgttaagtgctaattgggttcttgtattttatcaccctgcccgcacagtatgttcctaaatgagcacatgtactactcgtctgttagctgattaatttttaaaattacttgatggctaatgccactaattatttcaaagtgtattctactgcttaagtgctggctaagctacaaaaaaaaaaaatatataaaacaaaagaatagaatggaaaaatcgcacaggctatgttcatgggatccttccaactttggagtggctaattaaagttttaagtttttgcccggcacattcaaggcggaggatctaattttttggcagcaacggtaccagatgcttggccactcaagtataaaagtttttcaatttattttaggtaaacatatttcgcaaggatctggctaattaggttttttgtaaaaataggtgcttgcaagaattttaagtccgcttaaaaggagtttttttttttaaagccaaagtgctgagaaatgtaatatataaattattcatagtcggtattaatcaacatattcttttttaacataattaatagtaagcttgctaaaatgttctttaacagtcatatgcagaaattgtgtaaattaatggacaatccgacatttagcataaatgtaccgataaacacatcaacgcccagataacaattttgagtatcattaagggcgaacacaaactcctttagggctagacgatatccctgggaaactgccagacgccaacacaaatagacataaatttaaatggctaagggcctcggcatgcaatctgccatgcccacaataccgcatcccttcgcgccgcatttccattcccccttccccttttaatcccttccctccccatcgaccatggaaggaccagtctgtcacaacaaatgtttgccaggagtagcacgaaatgcagggcaactgcaatattgcaagctgcagctgctggttgcaaccaccaactgtgactgtcctttggtggttatgctgctgctgcgatgccacataatcaggacaagtatcctgggtgtgcgacattctgccaggatgccgcctgtgcattataattattattttccatgcaattccatgcactggaacaaagaaaatgcttctagtttaaataaaatggttatatatttcagaagcatttatcctggattttattcatcggtattttaatatatattttcgtccttattttcttttattttgccttaatagtcacgcgagcatttggataaatcgtaaagtaatgcattttgtgcataataatgcataataatttaaattagctataataatcataattttatttgcacatttattgctttaaatggtacatcactttaactgcagttagttgcatttattcctcttgctttatgtttattcagaaaatagctctttaatcttgagaaaatctataactaaaaatgagtacatttctctgtctgcaacgggagttacctttgtggaagctcctcagtcggctttattcatctggcctggcctcaatgtgcaggtgacattactacgaaaaaagaatgaggcagcagcagcagcagcaaacttagccttgagcaaaagttgagctttaggccccgtgatgatttatgcacgtgtttagtgtgaaaaatgcacattaaatgcatgcttggtagcgaaagtgttgccaagagaatccctttgcacactactgtgcccatttgtgaaagtggaggcaggacttgtggtcgggctgtggcacaggaagtgaaagtgtgtgtgtggtggggttgactcttggttccatattggggtcactggtcattatcaagatggagctaaagaaatgccgtaaactggagctgtgacgcgtccaagtcccttggttccagctcgagctccattcgccgtcttggctcatttgatatgcagggcagataaaggccaacgcgcattcagccctcacagctcctctgtttgctctgaagaagaggaagaacgggccaacaatgaggcgatagtttaatggcagagcaaactgttgagcaagcacatcttccttggcaagccatcaaccgtggggagttccttgagtagcaaatcgctaatattacataataaaactgatttacctaggacttgaagaattcgtcgattcattcctttcaggctgttgatatcagagctaagggaatttactgcaatacctcctttttgaatactacagattttttctaacacaactgattattgggaagtattactgagggcgcttaaaattgagtttgcaaaatttcaaaaaacgttacaggttaataacgccaagaatggtatatgttgaaaattgagaatttgcactgataagcttacgctttcatccccaaattgactttcttggctccttgaaagatttttatttcccactcgctttttaactttctttggagctttcaggacttcctcccgccgaatgaagtatttgaatggaggcgcaataattcttttttccgctgccggcattatcctttcacacatttcacgcccaaaactcgctgggaatgaccacgcccatagtctgacgaacagcctttcaatttcagccgtacactttagcattgcatacctttgaacgctgcgccaggttctcctgcaattgtttgcactttgcaacccaaccgactcctgcggcagcccgcctgcaatttacgcgtccctgtttgcgccttttgttaaaaagaagcaacgaacaaatgaaaaggtgaaggaaaattgaaaatgaaaagaaattgcttcaaaactcacctttgtggccagcgccacctttttgagctttagatttgcactttttccctctcggaatcatgtatgcacatatattactgttttggcgttggccctaaaacaaattgcatagacatttgttatttcggctaaagcggctttcagcttgttctattggtatttattttctttggccctatacgtgcatattaacatatgtacctatctttgcttatatactatgtacttttcttctagcaaattcgtacatttgcgaaaaatatattgtatataaaagaaatggcaaaaggaaattgcatttttataaccttacttacgtttcctttcgaatttcttaaatcccctttatacctgttgtttatttattaccttttttctcttcgactgactgagtttgtgtcctgtatgtgtgactttgctcgcttttttgtttttgtctcttgaatcttcgttggtcttctactttttgtcctttttattttgggaagttggtagttaaacttgcttttaacgatctaacagccccatgtggcccaagtgcgaaggtgtgtgttcgctgggtaaggtaaaatttataatgtgaattctggtatttaaagacaaattttatggctttttagttgacagtcgagagccgggagcataattcaggttcccacagaagtaggcaatgatatttttatggcgcttgatggctttccctcaggttagggtgttctcttctcctacatcaccatttttaaaatgttcttcatcttatacaaataatacaaaagcacttagctaattaaacatatttttttatttttttcaggtaatttggttttcttttaatggtgtccttactggttacacaaaactttaaaggtataaatataaataatttaaaaagaaatgattggcaatcaatggaaagtatgtgcaaaacatatatcgcaatgttatatattcacttttctaactaatcagaattagttctagcaaaaaacgaattttccttaactacgagattgtttaaagtggtggtttgctgtacaagtttgtttggctcaagttgagaaaaagtaaataagccaaactgtcatggctggttgaccgatgaccaaaagccatttatttggaagacatcttaatcgagctggatacgacgaaatgctgggatattcggtccaaggagcggtggaaatcgctatctgtcatgtgttgcatgtacatcaaaccggaaattatttattaattgctcacactaccgcaaaagaatcgaaatctgcgcacaattaaatcgatataatgagtggcacagcaaacatcatggccggctgaccaagcacacaaaatatttcatgcgttgtcgaacaaaatgaatgcataaataattgatttaattttcgtgttgactacaaatgaagcgcttaaacgaatggataaaagggtgtggaatgcggttcattggccagaacgaaagcatggccctgcgaatttcatattattaacgcgcaacaaacatataaatgcattctaaaacctaaagtggatgcagtgtaaataataaaccatttgatgtccattgaaaaatttcgaacactgataacagcgtggttcactcaaacacattatttaaatgcattttccaaatgtgtttgtaaatatagatgaacctatttctttttgcatataacttcttaaatgattaaaatggaattatatttctttttgtgtaatttaatttggaaaataaactaaaatgaaagttaattctacagggaaacagcataccttttatttttggataattgttcaactattgtgtggtttttgcaactacggaaatatttgctgtaatgtaaatataaattatgttttttttttttgcttgtctttatttcactcttgtcattcatttgaaactgacaaattcatggttttaccataatcacggcttcagttatgtcctcgctttagattatattcaagcgttgatagaagtataaaaaaccaaacctagatcaagatcaactcctttttaagccccataaaattaaaagaccacaatatggaagtccataaactaaaagtccatgtttaataaaaaaaaaaaaaccatttatgttcaggcggcatccttcttcttgtttgaattggtgccatcattgaagggttgcacatcgccggacgcccaaatacaatacacaatcgccgtgacgacaagaacgccaaatgcgacccagaagactaatctccactccaagagggtggcattcggtgtcattacaccaactaagtatggtgataccacgcccgtaatcgcaccaatgccattggtaatggccatcagagttccagcataattcggactcatgtccaatggcgtgagcttcatgccagcatagtaggtgcccatcagacccatggtaattgtgaatagagcaacgaccatgcctcgattgcatccagcataggatgcagctaccatgaagacagccggtccaaaggcggccactcctgtcattattttgcgcgtgtttgtggtgctcatgcagttgcgtttgatcatttgatcggccacacagccgctgagcagcgacatgatccacatggtaacgtagggcagtgaggagtagagaccattcgacttaatcgaaaaccgcagcacatccgacatatactttggcaggtaggagaccataatatagaaaccccaatcgtgtccgatttgagcactgatcaatgcccacatgggtatgcttgttaatatggcaaaaaatggtgtcttcggcttgttcttatccggcggcggtacctcctgtgccaagaacgcacgttcctctggcttgatatatggatgagtgaatggactgctaaagcacactagcgtgaaaacgacaaaccagacaagggcgatgatcgcaaaaacatagaatacccatggccagtccatggagctgagtacatagccagaaataatgttaccagcaatactacccatctgaccaccgccgagtacaagggctcccagcattcctcgctcgtttgccggtacccagctggctagcaaaacgctgagtgcggggaaagtggttccttcaccgagtcccataagtacgcggaggacaattaatgcatcggcaccgccataaacaatgcagacgggtgtcagcaatgtaaaaatagccgtaaaaaagattccaagactcagtgtccactttccgccaaatttgtcagccagaattccaccaggcaaatgagttacaatatagccaatgtagaaagaggccaggattagaccctgtttctcctgcgaccaatcatagtcgcctccctcgaaagtgctcgagggatcagactggtcatccggttcacatatcgcttcggtgtggaaaatagtataattcctcttcaccaccagcactgtgatggcctgggatagacatatccgcatggtgtatgcattaaagatggcaaagaatcccatgatggccagaatccagcgttggggtaatacaaagaattttgagagctttatgccccattctggttgctcttttgcatccgccatataaatgcgtctgttttgttataactactaaaatttacgcacgaaatagaattatttgacttgcatgaaatttggatttacaaaaaaaaaactaattttttcacagtatttcacatttatcaaaaactcaaaaaaactaaaattttttgtacatttttgtaatgtatgtggttagaccgtaaaacctgtattgactattttcactgatcactgagggaaaaatcaaatgctacgctgatgtctggctaatgtgatgtctgaatatatgtttttagaaatatttaaaaatcatattgtttacagaagtttttccatatattttcgcacctctaagcactgggtccagtacatcaaccatatgttgtgcgtagaaagtgtgtggcctccatataacccacttcctgtttctttgcaccatctgtgggtttttttttcttgtgtgttacccgactacttggccaggccacacagagcagtcccaagatgtccctaacaattacatttccctcacaatttatgtatgttttgcaaccttttcagtttcttttgcttcgtcctcgtcgtcgtcgtcgtcatctattgttttgaatgcgagtgagtcagtcacatgtgtgcatgtgacgatggttgggaaggacgggagtttgctgggttttgacaaccgcaggcgcaggtctttgcggtggcctaaccgaagaagggcttccattttcatcatcataaagtctgttgaaaggaaatcgatatgggcaacttaatcatgaaatgaagtcgccgtcaagttgtctttcattttcaattccgttctcagaacctcgtacgccacaccccgcccaccaacttttggcccgcccaagtgctttgtgtttacctatagagtgcgaagggccaaaaacttttccctaggtttagttcagttcagtacggatcgtcgtggttcattttgcctcgcttcggttcggtttggtatggtatggtttggtttggtttcggttttgccttgactggaattgttttgtttgtttgttttcatgtctaagttagcttacttttgtgaaaaagtttcttctactatccgctgtggcgcttatgctttcaatcacccacggttctgccccctgttgcaagcattttttgttcatttccgtttcgacttccgttgttgctttgtcaggttttatccattctagtccagaaatgcaggtcaggctgctggttctcagtgcattgtggtattatattaatttttcattcttaccttcgttttggggtcaaacgtcgttcagtgcccttttagtaaccagtaataattggcagtcttttcggtaagggaacaaggaactgtgttgctttaaattgtcaaataatattgatggtattagtttaaggagatattttcaaaaatattattccaattaaataaaaaagatattgtatgatatatgataatttcaaaagacttacttaatatttgcatttgaataattggccagattcattgcgaaattctgttgatttacccaacaatctactttgaaaaatcaaagtcagtacagatttttttttttccacttaatcctaaaaataagaaattaaaatgggattgttaagttaaaatgtcaataggatcggtggcgttgtcaatcctgaattttatactacataacgccaatggtacagtgacccactttaagcgggtaagctctaacgaaaaaggagaaaattcctcaattattccgagcgtgttttgcctccctgaaggccccaacccaaccatctcagcccactgaatggccagtaactgacgttgagcaaggtccgcgataaaaaaatgcatgacagcaaaggtccatggcagaagaaatattttatgaggtagcatacatttttcatgttatttaaagttcattattaaatgcgtcagtcacaagaaatgtttaaaattatggaagtaaaacagagatgaaaatgtttctttatttgccgcctagaaaatgagatgttatttattctcaaattttctaacataaatatgttatagaagaaaataatttttaagtcgttttattaatttacatattaatttgttactatccgaacttaaaaccaaactcaagtacagtttattttcgcagctctagctgtggattttaatcaactttaagggaatttgtgtattaatatcccacagaaaatgcagtcaactttgttgaaattatatatgtatgtttttttttttttttttttttttttgtgggtagccttttatttattatttaaaatctgtcctagtggacaataattaaattttttggagggaaacattaacttaaggggagtacatcgagtgtacttgggtaggggttaagtatgattaagtatgttgagtaaggtcaagcgggtgcgttctctgcaggcgtcttagggattggctgtggtctaaaaggttgacggccaggtggttgtgggggttctccagtctgctagcatatctcacgctgtgtctgtagatttcgtcgtctacccatggaatcccgagctcctcgtggatggcggaattttcgtggtagggatgggcgttggagactattctcaaacatctgttttgaaatcgctggatcttccttctatgggatgggcaagcagggccccacagctgaattccgtacgtccagattggcttgagaatagtcttgtagacgagaatctttagtttctcacgcagcttggactttttaccgatgagccagtggagttgctttaggcgtatgttggcctggatacgcttactgttgatgtgggggccccaagtcagccttctgtctagggtcagccttaaatatttgggggtgctggaggtagggattgtgtcgccatcgagtgagaccggggggcattctcctctgcgcagagagaaggtggtgtgggaggatttatcagcgttgatcatgatgttccagcgtttcagccatggatccagtgcatccagttgcctctggatgatggctgatgctaattgagggtttgttgcggtggcaaggaacgccgtgtcatctgcataggtggctgctgtgaggtaacgggagggtatgatagggaggtctgctgtaaacagggtgtagaggatgggaccaaggacgctgccttgaggtactctggctcgtataggccttgtcgtgcttgttgaggaaccgcatcgcacttggaactctcttccttcagtatacgatttcagtagggcatagtgggaactgggaaggtgggacttgagtttgtagaggagtccaggatgccacactctgtcgaacgcctgcttgacatccaggaatacggcagaacagtatcgtttgttctcaaatgcatctcaaaatcgagatggggaccaaaaaaatggcaaaaagttattattttttattttgttttcataccattttcgctgctgggtgaatgtttccttgtgcaagtttgctattttgctcccaagctcgctaacattttaacaaccagcatattttaccagttcaatcgctggttcctctcgtccttggcctgcggaaattcttcacttttgtgattgaaaggcattttggttggcttagttttgggtagttggcatggctgcgaggcttgtaatgcattgcgtatgctcctcaagaattccgttgcatgtcacattgttgcccgatatgcttgcaacatagttgagcaaagctttttgttccttttcactcgcctgataagtatggcaacgtgcaactattaaatagtttcccagctgccactttcaagtttttggcccatgacccattcttgagaaacttcttgtgccacttggatggcaacttaggggtagaacaatttttgactaaagcgtaaatcgaagtcgattatttgctgtaattttatgttgttgggcaacatgctattgtcaaaactatgcatgaaatgacgaagtcatttcagcactgacatatgtaactccttgaagcaaccaaggaagtatattcatgtatccctaatttgtttgcagaaaatacaggcgagttgtttcagatatcattgcatatataggagcaacgtttacctactagtttggaaattcaacaagctctcggaatattatccaatcatctctgagcatttatgtagttggaccgaaaatggtttcatagtaaattggttcaattgcttaattataatttactaacacaatgaaatacatcggttgcacttccccatctgtccgacatctaatcatttctctggtcaggaattttactgaaatcaccgaacatccataattattttcatatttgagtttgtttgcctacttctcaagagatttggttgcactcaatggatttagttggtagaacaagtggttaccgtgattgtgtgttttcctattgcggtttcgaagctcattaaaattctggtttatgatttaacggagtatttgtacttacagccagttcaaagagctctttggctttcaacggctggttagctgcctatttgtaatcgataaataacttatcaatttaaaatttattttccttacgcttccatttctttcattgcctgcccatttatagcccaatcgataatttaattaagcgaactacaaaaatgctacagatgcgacagtattttccggaaaatgtgaactggtgaatcaattaacgaacaagggctttcaggtgtggtgggtgtattcccggtggtatcctagcggcattcagtggcttcccagtggtcatattcgctgaagtccggtaggaccttttattcggagcttcgtccatccaaattactgacacatcagttggtattgtctttcgcctttgtctacggaaatagcgcagcggcaaaatcaaactaatcagttgaatgattggcgtcgacagccgatgaacaatggccacgtccgacatcctctcgatgtcctgcgaatgaatgttgtcgctccattcaggaaacttttccgatactttttccctttttttttttgtgcatataacgagattttccattctctgccatccacgtcgtatgaatattgttcgatcgagggcatgccatagctcaaattactttacagcttgcttcatttagtttataacgcaaaaggttcttttttccgcttctccttgccacttccactggcagtttttaatgtgccttaatttgaacctgcctggacattaattatatagctatctcggccagctttggcctccttcggccaaagtggattagctttgtgctgttagtggcggcggagtgctacttcaagttaatttgttatgcaaaaattaccccagtgctttggcctattaatgccggcatttgtggctacacttttcagagggagaatcgtcttgagtgaatgcgggtcaagatttcagattatggtcccgtttagttcctgtttatatatacttaccttattttgaaagcatacaatgttggcatatacatatgtgttatttgttaagtgccatcgcattgtgcattattaggtgttttgcgcaacgccataatctacttttcttagacgttattatttttcatactttcatacgtgctaagttacgcagtgcttagcttactggaaaaatcttcctttccggtccaatttccatctcttttcacttacctaatgagaagctttcagggctaaagaggggcacaaaaaaaaactctttgaaagactagcaaaccggagcatccacaactcagttgctgtaaccgcagctaaaacacaaaacccatacacagacacacacttgggtgctaatgccattttgacgttgccttcggtttttacgcgcccttgttttcgaacgcccaaatgtagactacactttagttgtttcaccgcagaacagggcacgcccataatccataagttaagctcaatggtttgtttgtgtgtttgccagtgaatgtgtgtgtgtgtgtgtgtggcggtcgccgtctgtcggttggccatatctccgccccctttgcggtttggttcgggccaaaacatatacaaaatccctcccaccaaaaacaaaaattgccaacaaacccaaacctccaggataacaactaaagggtcaaagttactttaaacgttgccaccaacagcagctaacgaagcggcttaaaaggcctcgtctggcaaaaaaaaatatgcacaacaaaaaaaaaaaggagaacgaatgtgtggggcgtgtgctttgttagcaatttatgattatttttactcgctttcttctttcttcttttggccgctatctactgacccgcatttttggtcgcacggccaaaattaaatgtttgcaagggtcagttcaaatattttcatcactcgaggaattctggtgtataacaatgatgattatgtgctaattcaatggccatcagccatcacaagtatgcctttaagcactgaaaaatagccatgataaaagacttttggttgtcttagccttttttgggagagaactccttcgtttaatagaattcgactggagtaaatgacatttaaaacaaacaatttaaacaataaaccatattgttatttatagcattcgaaatttaatgcaaatgacagagaattagcaatgacttcagcagttgatgacaaatagttttgttattgaaaaccaaaagagacgatcaggaaaaaatacattaaatattcattacggacacgcgtgtgtgtgcctggcactattctgcattttcccgctggctagttgacaaaatcaaattaaatgtccaaattgctggcaacaaggatatcgcattgaatgcaactgacttgtggaaatcccttactcatatcttctgttgatatcgcaaatccaaaactcgcatggtaattggaattctagtaaacatttacatccttgcaagttgttctggctcatgtcttgccgtaatttacacattttattcatccttgctatttatttctatttgttttgagataaactgtaataaattcaattcaaaatttaggacaatgtcgtctgcctgtcttccttgtacttctctgttgctatgaaacataggtatgtgcaattgatattagaattgacccctgaaagataagacatagtttctcagttatgcattaaatgaaataattcgctttaataattttaaaacctttttgaagttgacatgctgacatatttgtcctttggcgaataccatacatatttttgtgcaatctctatctgttccagtccgtacgactggctgcttttcagcggagctttccggagatagaagtattttttatacgcatacatattttaaaaatctcggtcaataagcattcggcattgtcagcatttcttagcatatctgcgatctggcccattgtatgcaaagggacaacaaagtcaacaggactcgcacaagtcatcgtcgttgtttaaaaaaaaaaagttgaagagtatgtgggtacagaaatgtcaaacgcactcaagactattaagcacatataatataaagtttgaaacactcttttaacttcataaatttgcatgaattaaacagaattaaatgtccaaattcgaaagtattaacatcggattttcggcttaagagtgacttacgcaaatagtcaattaaagaacttttagaatataaaataagcaactattgttgaagtatgtgaaaattattattaaagggacatttccgaagtgcagttaaaacgttgtaatgggtgtaacatattgttttgacccagttcagaagctcagaaagtcgtgacccatcgcacacttccgaaattcgttgttcatttgatggatttttgttgctggtatttttttttttttttttttgaaagttgactggctttggtttttaagtttgcacacaaagttggcctgtgtattgggtagcaagtgaaattacttgaaatgcattacatggaaaactttttcacccctcctgttgttcttcttactgccgatttggctgtagcctttaaggcgcttttcctacgacttggccaactaatggccctctctgttgtcctggtcggccttagttggctgccaagttattgcctacattcccgtcgccccagcccgagttgagacccactcggttcagtcttggggattattggccagtttatgcaactgctgcctccattggaacggactgacagctcggcttggggcgctatctatcgatatgcatgcccatggccccaactatcctgtggtcaaatttgtcttgagactgcggaccaagttttacatgcccttcgaatttaatatggtaattattttattttttttccccaaccagggtggggtcaaatgcggtttgcattcgatcgattttagcaaaatgtataattggctgatattatataagaaaaatcatgtactattaagttatgtgtttctaataaagctagctacttcacataacatctaatatagcagttttcttccatttagtttctttcaaactcattgaatgggttacaacgtgtgctttagatattcggttagatgtagatgtattctaatatgcctaattgtccttggcatttgtttttatacaaaggataagagtacaggtggatgtgagtgtgcgtaggtagaaagccttgcctatgtaattgctgttattacaggtgtttgcttgtttgtagttgcaggcatggcatgttgctgcagtttgttgccttcaagctaaagacttaaggcgctttacttggccaacacagtactgcctgcatttactctattgccaaatattttatatcctaatcggagagacaagaaatactcagctactttaaaatttaaagctaaatccgtttttttttggcaataaagtagtaaacagttgaccaactacaggagttcagctaaaatcatgttattcccaggaccgtattatgcacgtttcacgtcattaaccacttttttttgttagacaagttccaacttctttaaagtttctacattagaatttttttcgctgcaattttctaacctaatgggatgcacgtcatggccttagctgacatttctgttcgttgcaaaaccacaagaaaaatctccaaagaaagttttcctgcaacttgggtgttttggagaggggaccgcagctatgtcggccttggtgctttgcaacaagaaaataaagcacaaaagccgcacgaaaggttgtcaaataaaatcctgcgaaagtgcaataaatcacgtagcactgaaatcattttatcagcgcaaagcccttcaaaaagtaagacgaatatatatatacacatatattcatttattagagtgaaaacaaaagacaaccttgccataatccacgctgtataaggtttgtctatttaaactgagttaaagggatgaatttcttagttttcgttttaagaaatagtctttaatggaatcttttgtaaagtgcttttaaaatcgtgattcttgctaataagtttgtcatcgttcgtaaattcttattttcccagtcttggcaaatgtttatttttcatttgtattaaacttcgggctatttaattttaaattgatgctgttcccgccaatgatagcattcaccgcatcaaaaatgtaaaatattggcagaataaatacaaaaaaaaaaaaaaaaaacaattacaaatacatttgattacattttgattcaaataagtgagtgaaacttaaagcattgatatttattgcctttgagtgtagataaataaacacagaattacttaaacatatgtgtttatgtgagttcttttttccatggaaattatattactcatcattgagcagataaaagatttaactttgccgatttccgcttgtccaatgacctcaacatcatttatcaatataggaaaatcccaaacacaggctaatttcattgtggcagtcttttccaacattattctccaatttcgcccacacaatataagccttcttaagcctatcaatcaaaaactagcagattaagccaaaaacgctgaccgaatcctcaggatatttaactcgagaaccattgaagtggttttttcttttgctggttggctggctgtttggttggtaaccacaatgccaccaaattgaatcatcattttccaccgcatcgccgagttgtgtgggttgagcagtttaaaaatgaataacttcgagtgggattggctgagatttctctgctgggtttttagcccgaactactgtcatcgtgttttcgcagtcatctctttgcagtctcttatctccatctccagtggagcgcattaaaggctcgtttgtcctggccatggtgacatggatggatcgatggggacaagggagaatttgggttaatggaatataagtgagacaaacgaaaaacgcttttcccactcgccttttcgtcaatgcgatttaagttgctggcttcaactgcaaccagtttttccgtaatatcgctatatttcgattggcttttagtggcaaacttgccaaatgtatctgagaaaatcaaagccgctagtcgagaaaaagacaaaaaaaaaaaaaaaaaaaacattgaaaagaaaagttattttctttctcgtttcatggcttggaaaagttgggcacagccagtccgccagtcgtgtttgttgtttacttcatgtttgtgctggccttttctttggtcaagcacatttggccatattcaattttccgcaaaccccaccccctcgcccataaaagcgaatagcgaaagtagtttccagcgggtttttcttcttcctcgattgttttctttttgttgtatttctatttatttgtgccagttgtgcagcagctgagaagagaagctcagctgaggggatcgatgggaaataaaaagagcttggccggaaaaaccggaaagcaacaggcaaaatgtaagtcaaggtgtcactgcttggaatgaattcaaaactcgacattgatgtcaagttaatgaaataaagtattaaatctaaatcataggtttgcattattaagtgatttataagtgaatgtaaatcatacataactttcactaatgaatggcgaatgtttagtgcattttcgtgaccattaaaatctcactttctgtaatttcgcggaatctattgatgccacctttcgcttattttttcaagcaattcttttcccctcgggattttagctttgtttaatcagttgctgagagggttttccgcattgttgaaccacagggaacgatgctgggtaaacctttgtaccgttttgtgggtcaactagtaaaatgacccctttggccaagggctcccttacattttcccgccactgctgctgcaggttgttcccttttattctgcttcttgattcatcatgacgttagcacaaaaaggagcgaaaaaaaaaaatcgttgtttaatgtttgcttgaacattcagtttaattacccagcactcagctcccctgcccctataatactcgcttttagatcctttggcatttatttcgtgatgaggattttttcctgatactttctggtttgctgtaatttttccgacagtcgttttgaagttgaacccgcatcctgccggctcgtttttatgtttcttttaagcatacgttcttttttttttttgttggccaaattttaattaatttaatgcctaatatagttggaccaaactaacgttactccattccttttattcaactatggtaatttattcaaaatgaattaagaaatagccaatgcttggagctatgcatttttgaattaacaaattgagtgcatttaatttgtcgcccctttgtaaagttttcaaaaaagtatgtaactattttttgaaacatagaacgtataatttatgatatcgtaacaaaacattctgcttttttgtgaccacagccatagccaaccaagagctgcacactctagttggcaacacactccattaggtaagcaggcggctttgatggcctgggctcttagccctaactggcagacgaaaattctctgttaagtaatgcagttatgcgtgcaactgtgtgcgttgtaagtgcattaaaaacgttgtggaagcttcaactggcctggccaggaggaaaaggacgcatggcgacgccttgcatgccatttccctgtcgtccttgcttgcctttccatttttccagtccatctgccaaaataaatatgtttgcggcagtcgtagagcaatctagcaacgcccacacacaagtgccacttgccatcagttaggcagttggctgtggcatgtgctgaaacgacttttagtcatcggaggggcaactgcaatagtaaatgcattacggaaaactgcagcagaaccataccaaactccataccatccctcattgcataaatgcaatcaaatgttaaaagtattaagtgaaggtagtgttcgggcgctgacaaggaaatgaaagtaatcaaaggactttcaggccagtcctggctgctcctgagatggacataaacacatcgaaaagtagggtgtggactggtctggtctggtgtggtgttgtgtttcaatttccggttttcaatttaatttcaattgcggttatcaaattgtttctcggttttcgttcagcaatcgattttcaagatttaacaagcaaaggattttcatgtagtttttatttttggtaaatatcttttatttaaccaatactgaagtcaaattgcatttgctttgattccataaaagcctattgggatatgctattattaaaaaagctcagaatctatattaatatttacttatttctcctttttttttacaggtcatgaacgacttaacgaatacatatcccactatgaaacactcaactatgatcacgagcacatccgagctagtcacaatagagcgcgacgatcagtgaccaaagatcaatatgtacatttaaagtttgcatcacatggaagagacttccatcttagattaaaacgtgatttaaatacatttagcaataagttagacgtgagtatggctatacaaatcatctggaacgtaagttctaatgtatgtattgtatgttgtatttgcagttttatgatagcaaaggtcccattgatgtctccacggatcatatctatgagggcgaagtgataggggatcgtaatagttatgtatttggttccatacacaatggggtattcgagggtaaaattataacggaacgtgatgcctattatgttgaacatgccaaacattattttcccacaaatcgcacggcgacaacaacaccaccatcgacttcaacgacatcctcagcaacaacagccacaaaaagcacacaaccaacacggcctttggccaaaagcaacaccagtactactgccgttaatagtaagacagaaaactttataaagaaaattgctgaatccacaacgacgagccagcagcttccagagtataccgaatcgtcgtcgtcgtcgacaacaacattcccacccacaacagagtatttcgaggacgaaaaggagcgtaatgccgaggacgaacttgattttcactccattatctacaaggagtcacatgtcgaggacgcctacgaaaatgtgcgcgaaggtaagtcgaaataagttgcttttcccacttttcaaaagtaagttgcctgccgatgcagaaatgaaaaatacccccagcacattgttaaatgtgatttatttagccggcgagcatctcgccgaaaagttcctgactttattttgcactcattcatggttgcttttcaacgttttgaggatgaggacacaagtcagccttgaaattgtttgataacatttcgtttctgttttgacacctgagttatgacatgtcgcgagtggctgctaatcatttcgcttgtgctcatctcttcagttggctgtcagtttgtcaagccacacaatacaatgctgttaaaaactgtcttgggttcgcaagttgtagagcttaacaacttgtttatccgaacagggggaaatctgtctgtagagcttagctaatgtcacggtacgagcttcgataatgtaatttcaaaaaaccttgttcttgatgtccttgtccttttattatttatcgcattatacgcagaattaaaggatatactatattatttgaaagaacctatagcgaatatatgtatgtatttggttgaatgtccgtctgtacgtctgtccgtccgtagactagataagttagaagttcgtaaaaaacttatgacgaagcaccgctcatgtgcaacttcaatattaagagatactttgaagagtaacgggtatctgttagtcgtgtaactcgactacagcgttctctcatgttttttgaatcaaaacaaggataaactttaaagttttctttttaattttaaattttttgatacctagcatattaaaagaagtcaagtttgccagttctaattgaaaggcaaagtttcgcaaatttttggaacaatgtttttcctgcccaattagaatatgtcgactgaaatggaaacgaaatctaagtatatagatagagtttttcgccgccaatggcgatggaaactttgatccgtcagctgtgccgacaaagaagcgacagaaaaactttcataccgttgaaagcgacaaaacgggcaacgtgcagcaacgtttttcatggtttatgcaaaaaggcgaaacccagcgacttcattttaaaagcaagccacgcatgaagcgccgtataaagcgaagaaaataagaaggaatattctcctctagccggttcaatggtcaattttttatgctactcgtcggcaacaatggtgcaagcaaagaaggtgtgcctgcccccagaatcgcacacacacactcgaacactcgaacgtactcgtatattacatattgctgcaacaatgacactgacaatgaaaagttgcaactgcgaaactgaaaaaaagcggatgcatcgccgttgttattgtgcaggcagcaccaccaactatgacgacatcaggttccagaccagcggttacttcacatacatgcatacatacactgaacggaaatgttttctttttgcagttttcattaaaaatgcaaatatatttcagtagttatgtttgtgggatttttaaagtgaatattcaccattattagcaagcaaataattgtttttaatagtattaaaagatcaaatatttatatagttttcaaaacgaaatatttcgttttcgtgtataaagttgataaagggttgcatataaatcgatttattttctgaaagtgcaagcaaaaatgttcccataaccatggatataacaaaaggcgtctgccacgcccttgtaaagttgtagcaacaatagaagaagaggaatctaatgcatagctaaacaagtgaaatgggagcaatggtgggtattttggttgagttccagagagcagctttgttggccaacttttttttatatcttctttttttttttgacaatctacaagccattgttggtgcttgcaaaaattgtatgcaatttgacatacccagaaaaacacacacgtgcatggggaatcaacaacaacacttgacaaaactattgtcatgggtgcatttagccaagtagcaagtttatatagatacatatgcgttttgggtgtgcggtgtaatcagtttaatgagctcacacaccagccacgcccacctgtcagcttatttagtgctatttagtttgattgtgactgttgcacattttgattgatgtaaagttcaaatttcgaataaaacaacaaaattgacatttcattttattaacttggatagcattgcaaggcaattaatcggtttgcatttgaaattgaatgtttttcgcataattacgataattaaaagtgtctcaatcaatttaaaattcgtttcgattgcttctaaccacggccatgtaaataatatatataatttcctatttcaaagatcactttatttagtcattattttgcagccacttaactacgtacatatctcaaacgtttgaatgactcaggtacctattactacttctaaatggcacaattaagtgctcaaagttgccatgacaagcgtggaaagtaaagcagcggtgtcaaaggtttttttttttcacataactgccattggtcacttagtcgcggggagcataacataaactttaatttgtgaaaagtgcaaaatgttcgcctttgccactcgccactcgccgttcgcttacacattttctatttatgagtttttgctgccccccagttcatagttacccgcatttttcgcctggttttccccttaagttttcccaccccagcttgtccaactttattagccccgatagtggggagaggcaagtgtgtcgcgaggtgtttatgcttctgaagttatcaggagtttcttaacccactggcaacaccattttagcagcatattaacttttgtagtggaaatgagcagtcgccggcggaccctagattacattgttggtgtgtacacactcattcatccattttaagggggtggcggcgacaaggggtgcgttaagtgcgtgttaaaaccgaccaagcggcgcacgcacattgcttatccgccccctacgcggcaccccgatctctgccccttcctctccccccccctccttgcaggagattttcccaaccaacccatttatggcccctagctggcacactgtctcgctgctccactcccgccaacttgcaggcagccaagtaacgaagcgtgagcccggcgaccccagaagcagccaaggggttaacatacgccgcaacacaagtactcaattacactgacagaaattaatcagcttcagatttgttactcaaatcttacttgaaactcagtaagttgagaacactgggttgatatcttaaatttaatttccgtttgaaagaagaaagaaatttaaaattttaatatccctggtatgaagataaaaacttctgtgactgaaacttaaaaattgtccctaatatgcattctaaggacagagaataagtaatcttacaaggaaataaatctggtttatctaaaacttcaattaatcttcaattttctttcagtgcatccaagtgcaatgtgttcttgaatactgccttagctgctgttgcctggaaatcacaatttatacacaatgttgtaatataatttttgcacagcaaaacagaaagcagctcgagtggcacattgtttgctggcgtcactgttgctccttatatagtactcctcgacaggatctccctcacatcctgcaaacccctctttccatttcatggcactaccccaccccctcccccacccagttttccggttatccttcgggctctcgagtgcattgaccatggctgtgggaactttatgtgcagtcgctgcaactgccataaatgcaatgcggctcacatttatttacgactatttgattgcacttgctataacactatgcaaatttatagaaaaatgcctctatcgcacaacagctgccccgcactcgactcactccttcgttttggccaggatgcccattaacttttgctgaactgcgaacttattggcgcataaatgtcattgacacgcagatgttttcaactcgatccatttcatattgtttaaaactgggctttggcacaaaaaaaaaattagcagtaattgcggctgttgaaactttaaataaatcggaatttttaactacatagcttagcgcttaatgagctgctgttgttcttttatttctttgataaatgagcaaccattacagaatctgaaagttggaaggcaaaaagttctattcattagttttgctttcattcttgtgccgttctaagggcgaacaacttatccttttaaattttgaagatatttcgtgcaacaaaattccaacgaaaactggctgagtaattgaatacaattttatacagtgctgtgctggatcgtgttgctatgaatatgtatcagtcaacgatgcatgaaataagcagccaaaaatacataaatacaggatttacgccgcgtttcgataacgatgatgccgcgggggcaatgttgacgttggcataacatacaataatttccggtatttgatagcagcggcaacgaaagccaatggaaggaggcgctttgcacagcagcatggagtggagtttgcaattgtaaacaaacaaatttcatgctacgttgcacaagcaacttcacccgcctccctaccggccttgccacatagttcttgtgataagggagcaatggataacattcaccaaaaaaaaaaaaaaaagaactgtgtccaaattgacatgcgacagtcatagccggaagttctattttcctcaatttttcgttttttgtgtagttcttttgatactcttggagtgtggggtattttggggtgtttgtatattcacttagtatattatattatattatattatattatattatatatgatattatgttatttatacatttaactattacttaaaccctggactcggttgcacataaatacagggtatcttatggtctcataacacaactagtctagactctagcgctttctacgtcgttcttattttttttttaacaaatcggattggagtcagactgcagcacagaaggcaaccgacggccatgttaattggcaacgctgccggctgaagtggccatgaaaggggcagatggatattgaaatcaaatgcgtttgagcacaatggcctcgccctgtgattgcgattgtgcgccagtggtcacagtcagagcggtggatctgctccagcggagtgggtggatgaccccttccaatctgctgcccgcccggctgcggttggatgaatccattttgcatgcgtggcgacatgtgtcaacttctattaagttaccgttggtcattcaactcgcggtcaccgacaaagtcgcccgcaatttttcagtctctgcggtcagcagttgtttgttagaacgggtgttgctgcagcacaatgttcacagactgtcttttattttgtagttgctttatcaagttggagatatttagtgctctgactcattcttatttcatataaatacagggtgtttactgcaatttactttaattaatcatatgaattaaaacccaagtaccttacattttcaaacagtattgtaactatgccgcataaacccaattatgtaacatgccaccataccatctagtatgtagtgattgctaaatattttattactgctagtactgtgtggtagggggtttagaattttccaatgaagaagccgtcctggagttcatttccctcatgccaaattccgattaacaagccacttccctcctttctacaacataagatccgcttataatttaaccataataatgctgcccctactcctcaattggcaatggaatgtgcaacgaacatttccaatcaaatacgatttcgagcatgcaaatcaactagccagcaatcgcagtcggtttcctgtctattacactgaaagggcggcaactgaactggacgagctaattacaaagcagctcaccagaaatgggtcatctgcatcgttagttgctgctgaatctcaattcaaatctgaccgcataattacaatgcgaaagtcaacaaaaatcaagtgcacacagatacagatacaaacgcagatacggatacagattcagacacacacaaattgcaattagaagtgacaaattacgaaaggcaacaagagccgaatgtaaaaactgtcagataaacattcatatgttttatttttcaactgtacagaatgcatattaaattttaattattttcatacttcagagtcgttatgtatgagtgctcacattttgtttaatgctttgtttttttttttttagctgacatgagaaaaatttgtactctgcaaacttttgtacttctatcttttatgttttttgtcagttgtctgaaaattgttgtttgccaaccgcacaacaattgcatttgatagaggagcgggcacaccccgctccccgcatcgctggtatggaaattgcggttaattgaattcactgaactgggttcacagtcagctgctactgccgttgaccgctggcccatgtgcgtggcacattgttcccccaccacctcctcaactcacagtccaccacccaccatatcgccatatgtgaaaattaattgaagttgtgcagttttatggggtttcgcagagctgaccaacgcagaatggcggcggacaacaaccggcgacaacgacaactaccaaaaatctcgcatgactaactttttatgccccacctcataccgccggcaaaaaataatgtttggtgggggtgggtcttttactttttataagcacgccgaaccgtttttatgagcaccacaccaccaccacctctgaaatgacaatgtccagtgtacacagtgtttattatttttacgctttacttttaattgacatttgtcccagcataatgaatcgctgatatgcaacatggcaacttttcatatttcatgtttggtcaaactcatgcctcgtgtttttgtccttaaacacggacggagttttgtattttgtattgtcagtcagaatcaagtgaagctgagctcttgcaaattatatttaagactttttggtttatttttaaaaaccttaaacttgtttaattacccaaatgtatttggctaagctctattaaactaatctttgttgcaaagccctctttaatatcacacttagtatgcattccatgctgctatgttcagttccgtgctgctgccctcgactcatcaggatgactaccctccaccactccggatttatccataatgtcgcttctatggatgccctctgccctcttttagcatccgagtcgtcagtctgactcattctcctcgcgatggcttcttgtgatacacttcgtttggtttagttgctcgtaccccttttgtttgatgttatgcacagttgttgttcgtgttgctgttgctgctcagtctatgtggcgtgaaaatttaaattagattttaaaatttaataaatgttttgggcaaatgaaaaggtgccataaacaacgcacgtcacaacacctttatacccaccacctaagagagctcaccttcagttttccgccggattgctgcgagtgcagttcagatcagagagcgtgaaaacatttcgcaacatttaagtcgcttttaatggcttttttgtctagctggtggtactgggtacctacctgtaccatcatcatcatcatcgccatcattctattggcagacaaacacacctgatgaaagttcccagccatgacattgtgtgttgctctgtcacttcaacgtggtgttggggtggatcgcttttatttttcagcagctattttcggtatggggttgcaactagattgcacatttgtgttgcatgccactttgattgctttgccgaaacgcaacatgtctgcgaattgcgttcttattgccgatatatcacaatgaagcaatctgtcatcataatcgtccgatatggaaggggaatgatgctgaatagcatcttgctcttcatctaatgtggtcatcaaaaacgctgacattttggcatatagtgcatgttatactatatagtacaatacatgttatactatacgatagtactctgttttcacatttctagtgattaaataaataaatggatgaataaatgtttattttagctattcatagcactttagattagactgcaaatattttgcataaaatatagttggatagaaaatagtttgatagcgcttaaaccaagactcagccgcatttattttcgcattgtgcagtcatattcaatgggagacagcaacagacagaacgaaaaaataaataaatataaattgacggaaattagatttatgaccatcataatttctatgccaggcttagtgggcatatcaatttaatctagaaataaaaaataaacaaaggatttttggcaaatatattaaaatttggttcttgaatacaaatatgtaggggttgctgaaactaactaacttaagcagcaactgtataaattgggtgatcttgtacatattttgtatccaaagaatcttaagcagtctgtcaaaacttagaacccttttaagtgcatttaatttaataaatgtcctatataccctgtatattcagcgctcaataaatgcgaagtaccaatagcaaaaccgcatcatacgaacatatcaggacgaaatgaaacggtgcaacgattttattgacgcgacagaatgggataatcgggagtggatgcggaggtggaggagatgtgcatgttgaacaattcaatttaccacaaactcgttattttggggaatccggctcgggtcccccgaaatgatccccttaacccgtaaccccatagccccatagctccatccctgttcgtatccacatcgctagcacctggaccgcggacagcgctcaaaccaataattgtagccgacaggtgtggacccggagtacggagtactggagagctggatggctggctggctgtctgggtggttgggtgcaaaatgtatttaaaatctgttggcgtcatcaacgaaatggggacattttctggtttttcggggtagatggccagcactctacgaatctggcaaatatttatgcaaatgtttggctgcagtactgttgccactcttatccaaactgttcaggtgacagcagcacaacggggatgcgttggagtcgagcagtccgcaggcaaaatgggttcaaggttttgggtgtgagacgttcgtgattctgtccgagaaatattaaattaatcgttgcggttgacgttgcacaagatgccattcctgccgaaaggattctactttaaaatatcgtagattctctttaaacaactttattctgattgcagaaatattccagcaaatcaatctagaataagttttcagatttatggtagcaaaaaaggttaaacagaaagattaagtttctaataagcaaaaaaagtatagttttatgcagtaaacctcttaaacccttaaaccttgcataaataaatatttgattttatatttctaataaattacgtgtaaaatgcgtatgtaaacacaagctgggtaaacacaatggtccgaaaaatgccacccgaaacttttacaatcaagagttaagcagaagtttataatatcgtgcggctacatggcgtatgcgtaatgtgtccaaatggggtttaccaagcattacatgactccagaaagtgggcaagcatgtggaattaggataaatatatataagtaccaacatgcgagtatgtgcaacatgacaagcatcagctagaggaagaatctagttgctttgcccaatgtcttggagcattattcgtgtggaatctgtagaggactgcctgcagttgatgtccttgcaacagctgcagaaccagacgaaatttaaacaattttaaaattcacacacacacacacgcacatggtgtttaccaaggacattgctctctgcccaacttcaaaatatgcataaatcttgtgctgaaaatttatatttacatgttgctcgtgctatttaacaacatttggtcatcacaaccaggccgggccaggcacattatagggcttcctcttcctctgcattcctctgcacttcagttgctgcggcttcctccgaaagttttgcgttttaacactttgcaactgtccactgcgttttggttggatgttgccggagtttcggctacagcttgctacaagttgtttgttttattacaagtgccaaataatttaactgctaaattattaaatttccctgtgaatggtcgcccgtctgagttggtgtgttcatgtgggggaatttgtgtatatttatgcatatgtgcatatatatatatatttgtaagttggctgctctcgttcgttgtgctcgtaaatttattggtgaccaagcgccttgggagcccagtgtcagttcaatgggccatttggggaatctgtttgttggtacagacatctataaatacgcacatgtttgtgtttaattaaaatggacattaggttgttgggagagtgtcctactcatatgtaaaaatacatcatttgatttggcgagggctaaggcaaatactgtatagagtaccccatggtgtgattgccttcaataggctctaattaacaagtttctcatatgcagactccaacttgtcgtatatctgaaactcaaggagcgcggcaaggacatcgttggaaacctcaacccttggataaaacggggcagtcattgaagggaaatccggacattgaacacttcatttagcaagtttaaattgaagtgaaaattgcggttggtcgggacaccaacactgctagcaaacttcgaaaaaagtttaatgtttataggaataaaactttcttgtaatagggcgattttttttgtgaggcaccaaatttggtatataaatgtgcaattttgttaatgtaagctttataatatccgaataagacgttgtttttcccagtgtaaaagtaccaacctgtaacgacaaaagcaacatcaaccatcgattatggtaggcaacctctcaaaccagacttttagccaggatagaaaggaaagctgaaatagacggggtttgttagtcgcccgctggctgtcatgcggtcttttttaagtgctttacggtttattttcgggacattttcgggagaattttcgtacggtgtcagccacttgataatgacgatgacaacgactacgacattggtaactgtgttgtcataggcgactgtaactgctgccaaacacacaaacgtggcctcttatgtcctgtggctcctcgagtgttccaattgaatttgaaacaagtttcgaattgttcgcattggcctaagaggtccctattgctgttgactttgtgtaatactgatcagaaatcgatggtattagtgttgtccacgtattatattctgcctaaatgctgaaacctcggtagtaaggccagaaataagacatattctgcccaaaatatataaataaatagtttaatcctgcctgtctagcatttattttatgcagcaacatgagccctcatgaactcaacacctcacacaaagttagcaacatgacaaagagcataatgcacttctcaacagtggattatacttggggggaacctatagactataaccactgccataaaccacttttatcatggccctgcacaaagattctcactcctcaaatcgaccgttcgccacccgcccaacaattctggccatccttatttcgactggccgacttacttggccgaatctctctccctccccccttttggccaaatgggccaggaaattcctttctgcttatctgtcgtctcgctctggcaaaaggcaatgccaaaatttcaacccaaccgggcaagtaaatatttccagttttcggccacaaatgcaattgggcttgatgatatttgttgcttccgttttggtttgctgttgaggaaatgaagctagtgcagttgttttctgtagtacactgttgttttaaattggtaaaggtatttatctatatcacaaatacgttagatgatattaatccatattggccaagaacaacagtcgttttgccttgttttaagctgactacttttgaggtgtttttatatttgctgtttatgatttcttatactttatttaagagtattattttcttctagaaattgctatttcttacggtttacaacgttactttcagctgacttagcccaacactctattttgtcaatcactatcacttaggccataagttccatgtgtcgtaaccagttttctgcggccctctttagccacctgtccctacattgatataaatgtatacaagtgtgtgtgtgtgtgggtgcgtgggctgtcaaacatgtacaaccgaataaggttctccatttattttatggccaagctgcatgcaatgaaaattcccaacaatttggtaagcccaccaccattacaccaccattccattccgcagacctctcgtccatatggtgttggccacattcttcggattgggtggttcaatatacccacatttgtgcattctcggatgtcttatcagtgccagccttaggcacagggctccgaacatagtttagtttaaaattccggggcgtattcctcgtccaccatgagaaattctgtgtgcctgtgtaccaggtcctgcgttcaatgtcaggcggctgtcctggtcccagtggtagttggtgctttgtgtgacaagtcgacatatttctcttggtttttggaccgggcttgttgatattgcactttgccttgcatgcaaaatgctgcctacaaggagttgaagcagctgcacaccaaaggagcaggtcaaaagccaaacagttgcactgccgaatgaacttttctaattccatgagccatgagccagcagagaaagcaggaggagagccactaacctacccccacctgcaggactattcacaggaccaatcaggctgggatcctgtggctcgtttccatttgcctggcaggggaaattatttcgtcgttaattagtgcctgatagagacgagcccatacatttggcttatttctagaccatttagagccaggcatcagtgctctgtcgtttcggaaactttttctttttcatttgccccaaagtcataccaggaaccgccgtcaccatcgccatcaccatcaccagcatcatcgccttcatcatcggcttcatcctcctcatcatcatcatagtagtcgatgtccttgtcatcgaccgcctttagtttgcacttgaccacaaattgctcggctaccgtttgcttttgccttctaactaagcttttgtcgttcgacttcaacgtccattcgcacagatacaaattttgtttatcttttgctggcacttgagttaagtcgagctgagtgcaaagttacggatgattggaagtggagatgcggatgtggatgcgaaaacgaattcgagaatacgaattcgaatggcaagttgagttctgacagctacgacaattaggcttctatccttctgccttcgagtcctttgtaatttgtaagtcctgcattgaataactcaatttgagttgattgtgacatgttttccggctcgcaatgcaagtgaatacgaaattatttgattatgattgaatttcgtagttttaattaaataaattggggcaaatcatcgtttacatgcaattcaatgttaataataccgaaacgtagcaactttctaacctaattgaaaaccatcttttcatattaagcgcacataatatatttatgcatttctaccacaaatctattgccattcaaagtcgcatttactccaagtcacccagcatatgtagatcaatgtatttaatattaatgtgttcttgtatgactaagactagatgaagaaaaactacggaaatgagaatcgcattcgaggatggatgggtcagagggtgtaattcattcaaaagaaggccaaaaggccgggccagaaaaactaatttgtatgcggaaggcagcgggtgtcgccaaacggacggactttcgttctgttggacgttttgttttgctttttgccatgaacgcggccaaaatgcgtaatcttttttctggcccaacatggctttggttttcctgagtgtggctttatgcgaaagtgccaaagcgcaggtgacgacgatgacggcgacactttttgctagaaaagtgtgacaacaacggaaggctgtcgccacggccaaaagacattagttatccatatgggcgggtggatggtaggtcatggatggatatgggccccctaagacctatttagagtccttgggcgttgaaaagcgttaagatgccaatgtataccaatggaatgcaaactaaacaaagtgggaacacaggaatatcatgtttcagggattcaggaaaatatactcttaattaattcgaatttgtaaattgaataaaagaatttgatcaagtaatatgtaagcaataaaccaatttaaatgtatggaaatctgaaaatgcctaataatttaatgaggaactccatccttcattgttcatagcaatcatcgccgaacaattgcgcaaattaaaacatttttaattaaggcaaacataaaaagcgtaacaattgtcgggcaaacaaattaagtctaagctggcgagcaaaactcgctgacgatgctcatgagaacgcatgtggggaggcggagggcgcagaggggctggataaacaaaagaagaaatgattaaataaataaacagcagcaggaacggtaacaacgtggtaatcaaatcatttacaaaataaaagcaaattagggaaaattgcatgaattgtgctcccgacatttacacatctgcacatctacacatcagaagcagagagcagggaacatttttgcgatgatttccacttgttagtgggaaaagcagggccagcagcaaactcgcatatgccacgcccatgtaatgcacgcccacgacttgggccacagcatttattgcgcccagatgtatgctatattatatttgtgcgtttccgtagtaatcgcgcggattttagatttttcgtcagggtctcgtttgaatgacaaaattctaagaaagccatttgctttttattattgttattatattttccttaaaaaataaaattattttcgcttcaataagctgaataaaataaatatgtcattaaaatctcaaatattgtattatatttcgtttaaaactacatagatttattgacgctgcttttatttgtggcacagctgcacatttaatgccacattcccatttatatactttctgcccttcgagagtatcgaacgtcttggttgcaactgtgtgagtttgtgaacttctttttttttttttgcctcgaatatttggtgttgcttattcagttatgttgaattttttgattttcgctttgcctgctccttattttgcttttaaagcgtccaaattgtgtaaagcgtctgttatggcctttttggggtgctgattcagtttttggggcattcttggggggtgggatgctctgaatgctctttgtgtgtgccactgtgtgtatgtgtgtgtatttatggggtctttcgccctcaatttcatttgcaattgaatttgggattatttttcatttttgcttgcgcatctcacacacacacacagacacacacactggcgcagtaagcaaaggccacaagtggcttgaatgggtccatggtcgtaattgggagccgaaagtgggtggtagtgggtggtggttgggcggtgttagtggcatgaagaagtaaatggggaagttggaggcaaaagcccagctacaaaagccgcttgcatgtctgaacgtcgtttgtctccgactccagctgaatttttcctgcttctggtcttcttaccacatacccagtaatttaaccaattttgggtaatgtgcatatgggtttttaataaacataaatacaatagttatacatttgttattagccattgaaagtgtagagatacaaagtttaatagtagactaaatggtggtggaatgaaatacttccaaacatcaataccacttcctatttacagggtatgctgtagttttgcaacttaactctcaatcctggctacatttttttttgtgtgtaaggctgccaggacgacaaaaaacccaagcttgcctgagaccgactaaaggcaacggaagttgtaaaattcataagttgagcgggcgagcgggtggcttttgttcaattggcgcaacaaggaaaaggcacaaaaagcaaaataaaatgtgaacaaataaaacgaaaatgctgcgacaaaaaaaaaaacacgaaaaacatcgaagtaacagtggaaaatcttgtacaagtgcaaacgtcgatctgaactgcagtaaaaagatgacacaaaagtgcactttaatctctgtgcagaaatctctacgaggcgttgggcgatgcgatgcagtcaaagccaaagcgaaatatgattgaagtgttctcgcgggggggatggggggtgttggatggcggtgtgggggctaaaaggatgtgcaggatgctggaggctgtgcaaggaatgtgcgacagcaaatgaaggcagtgtcgagtgcactcagaaatacaataaatgcagctctctattttatttcaaaaaattatctcttatttcattttctccttttgcgctcgacacttttaaataagaagaatgcgaaaaatgagtcttgatataattcttttatgaagacaagtctcttctgtcaaaacgaatttccaattgaaatgccacaagcaaatcaataaatttcttaaaaatataaaactattataaattagttaaattccaagaaataattgagaaaatgtgggggctaaaaggatgtgcaggatgctggaggctgtgcaaggaatgtgcgacagcaaatgaaggcagtgtcgagtgcactcagaaatacaataaatgcagctctctattttatttcaaaaaattatcttttatttcattttctccttttgcgctcgacccttttaaataagaagaatgcgaaaaaggagtctcttgatataattcttttatgaagacaagtctcttctgtcaaaacgaatttccaattgaaatgccacaagcaaatcaataaatttcttaaaaatataaaactattataaattagttaaattccaagaaatccaagaatacttatttatatactaattgagaaaatggctaattaacgcgattaaaaatgggttataaatacctgttaagatggctttaccttgtattaaatttataattttttttgttattttctcatacataataatcattcaagcagacagcgacattctttagcaaatcctgctgattgctaatcccatcctcgttgactttctctgtctgtaggaaaaggagttaccgtggaacccagaagcatgtggcacgaaccaggatggggatagggatgggaaaaaagcggactttgagtggcacagagaaattggaaaaatgaaatgtgctggagacgcgcgctctattacgatggcgatggcgactcaacagctgttgattgaaatgggggaaaaaagtgggttggtaggagttggcttagtgggaggaaggggtcaaaggcggaatggcggcgacctagctagcgtggcataaaaaccaaaaatcagacaacatcttggggtttagctaggcaaaatcagatataccgattgaatgcagccagagcctccttgaaaactcataagagcggcagcaacaataaaaagctcgacctgaaagtgcggggaaaagcgaaaaggaaattcaagcagaaggcgatgcagcaaaatgaaataaaaacaggtcattggagtaagaagcggcatgcaacaaaataaaacattgctcatgccacacacacacacatatacatatatatatataggtttgtatatagtatgcagcatgtagaaggcagcgcactcgaggggctgcctttgatatgcaaattgcatgccactgtggattttccggcgccttcctgaaggagcacggggcatttacggaagctgtgcctgctgcggctttgctggtttctcgagggcttacgtatttagtggctccctcctatgtctatggccacggctttgcccgaagaaacattccacctgcatcccgctgcactggcgaaaatatatgaaattagaacaatatattagatattaatatgctatggagtcatcaaaatcactttacgattattcaaacataccattttttgattatatatgtacagacatattatattatgccaatttgctagtgtaaatgattggaaagaaatcaactaggaatcagaatcttgtctttattaaatgtttacttatggcattcagtcaatgtttgaaaccgtttgagagaagtggtcctacttccgtttccgtttttggtgcactttcgattagttaaggcacttcaatttcaaactatacatatttttgcagtgtactgatttcggcgctggtcgcgtgcttggccacgttgccattctgcactgaagtacgacaacgccgccaaaatgcttgtaataaagacaaacagtttggcaatggccaagtaaaaagcgagcgggaagaaaacgaagaggaataaacaaatgcataatggtaatggtaaacagtagcaacccagaaaacttcatgccgcccccgctcgcttgacacaatggcatcaggcaaataaaaatttatggcgcctctgaaagctgcaactgcaacgtcgtttccactgggatgcaaactggatggctcagcgaactggacagcggtccttgttgtgctgccaggatgccaagaaaagagcgccggcaactaggggaacctgcaccctgttgccctgttgttatgcctttcgagtcgtggccgaaagggtcctccaaggatgctcgtggaatgcagagagcatttttgagaagcagccaggcgttggcataaatgatgtttaatgaaaagtgcagagcgtcggcgatgttgctacagttgaattctttgccgaaaagcgttaaaagcaatgtacttgcagctcattaattttcattaaattgtaaatatacataggtaattttaaacgaaaagccctaggtaatttcatttaaaaaacgaaaacaggctcttaaatttccaatacaactaattaaagtttacaaaagctctttcggtagcattaaacttcaattataaaaatcaaagtaaataaaatgcactcgacttgttaattgaatcgatttccccaggctatatgcacaaaaggaattacatttctgatggaattccatatgacatttaattttattcatttagcttaacttacaattcgtttcactgtcccagatatttgggccagttgtcgtaactcagaagattattctggaaatgaatgtaaatggctgagaccataaaactcgtgcagcttttaaaaatgtgcaccactctgtggtacagtactttattcccttttccgccctgttgcatcacattccccctgcgctcttcgtttttttttcagtttatttaatgctgacaatcgcgatgagggggaaaaacgccaacgaatcgcgtgcaaaacgcgtcctcgcattgtggataaaaggcagcggcagaccgcgtttctctgactgcgcttaaacaataaaacaataaattttcattaccggctagcggctattaacagtttccgctggccaagacaatgctccgccaggagctcctggcaaagctgtaaatataattgttgatatacttttaaagtgcaccgggcgccaaaaaagaaaaatgcaaacaaaaaaattctagtagaatgccccacctttgaatcaccacagcgatttcagtttgtttgttttttactttttactacaacttttacgtaaacatttcactttggcatttgcattaacattttgttattttttttttacgaatatcgcttctgtgtggggctgcttttaattacatttttgtggctttcacttggtaggtcataaataattttacccattgaatttggtagcatagggatgccccaaaatgccgagctgcatcagcaaattaacattcctcattccgactttaatttcttttatttcggttgtgtccattctggcgaacttacttccctcattcattctacgcctttgttcctctttgcaggtcacgtggccggctgtggcatcacggatgaggtctctcagtggatggagaacatacaaaattcagccgtcgaagagttgccggagcccatgtcaaaggactatcaaaagctccaccggaagcagctgcacaaaaagtccgccccacagcaacaacagcagccccatccgccgaagaagtacatcagcggggatgaggacttcaagtatccccaccagaagtacacgaaggaagctaacttcgccgagggtgcattctacgatccatcgaccggacgtcgcctgggctcatccgccaacgtggccgactggcatcagctcgtccacgagcgcgtccgccgcgccaccgacaatggtgctggggataggggctcatccggtggatctggacgcggtcgcgaggacaacaagaatacctgctcgctctacattcaaacggatccattgatatggcgccacatacgcgaaggcattgctgacgtgagtacttgtgcataatctatagtgcatgattgttgtggatatttcttataagcttgaagggaatcgttttgaagctgcttttagagctcacatcttaaggttcaatttttattcttatattttttgtatttacttttagtattttccaatgattaatcaaaagtatacaaaaatactttgaattttccaacttgccagactttagtatatagtagaaaatgaagacgtgttgttgtgacagtctaggggcacgaaagccaaattaataaaaaaaaaaactgaaacaaaaaagcatgaaaaaatcatcaatttcgcaatttttacgagccagcagacttctcatgaaagtcaagtgcacataaaacaagagaggttcaaagtttctggaatgggaatatcaggggccacgtagttgttaagcatttttgatattacattccattttcaaagaaatgtataaacaaaaaattgtctggtgccctacaccattatttgtgggctccgttgttcgttcattcgtgttaattcatagaatacatgtctgtgagaacggggatattggataatcaatacatgtacctcacgaattttactacaaaatgaaaatatttgttttacagatttttggttttttgctcaattaaatgaaatttaactgcaaaattttagaattcgtttaacatgtaaactaatctatattaaatctctaaacatgtattccaactttattagcatttttcggtaaaacagcatatcataactttaagaaaacattggtgcaatcgtgaatttgtttacttaccacttattcagcggaatttcacgctccataaactgcaggaatccttttgtcgcattccgcggagttgcctactttttggggcatctgcagagcgattggggcttagcaatcatccaatcagctgacctccttcagcgcgtacagcgtatgcaatcaaccgttatggcccgcaacggtgctccaccacccacctatcgcctccaccacccgctccaagtcacacccaccgctccccgcatttggagccattctctcgccgcacttttatgtttacgttcattttttcgcattgttcgcgtacaatgatgatgtcgacgtcaacatcctcgtcaacggagtgccagccctatttccgtttccgctcacgcccacgtccttgcctccacctccttctccttctctttgtcttcgctcttacctctgcccctctttttctactccacgtgtgtttatttgcaatgagttttgcataattcgcgcatttgtttcgctcactcttccttcgcttccctatgtattatatatcccgatttttgtcgcgctttgttttcaaatccttgcacgggcatcataaatttgccaagcagctaactatgaatacgtttggcactagaaaaaactattaatatagaatatttacaccttattctaaactaagccatttgcatattaaactatagttttctacaaaatgtagatatttttatttgcaagggtatatgaacatcggtttaaaaaaaattcgcattttccattttccattcgcttttgcctttgtctcttgcgccccgcggcattttgatttttgagccaaaatcggtggagagctgttgcaggatccggatgttttggggagtgcgcataaaaccttataaacttcagctgaaatattcgacgggcttagctgaatttgcatttttatacaaatatatttgcgcagcgttgcttgttgggtggtagagtgtgggaataggcatggattggattggatgagcgccggatgaaagggccgtttgaagaggtcctttttgtttgtctggcgtggtgggggctcactacgcactcgtttacacggatgtcagccgcatttctgcgccatctccatcgcattgcggctgtgggactaccgctccacgacccaaaataagtcaagtgataccacattaattaaatcggtctacctgttcggttaacaaacaatcccttttcaaactgacagtattataaaagcatatcgaattatttataaagaaattagcaatgattttaagatttggttaacccaccattttgaaatttacactttaggctgattttaacaattatatcttttgactagtaaacttgtaaattggcgttaatttttgtcaacaccatttgacgtgctctcctttttgtttgcagcacgatcgtggacgcaagtacgaggtggatgagaaaacgcgcgaggaaatcacatcgttgattgcacatcacgtgacggccgttaattacatttaccgcaacacaaagttcgacggacgcaccgagcatcgcaacatacgctttgaggtgagtacacaaacgcccacccacacacacacgcacgcacgcacacacacacagcgggaattccgcggacaaacaatgatgatgcgataaggacaaagcggcaggacccgcctcacaggatcccctgaccacatgcggcccttggtagctggttaaaccatgcgtagacaggaatttagtggagcgtatattaaagcaccatatgggctccccagattatggttcctgtgtcgcccgcgactaattgattgtgttaattataaagcgtatcaataaattgtgggtcaatttgtcgcattcgtgaaatttttcaattgtagaactgcatcaaaactttatattcatgtgtatatgtcccctgtcccccaaagtatcaataaattgtgtgtaaatgcaaagggttttagctcaattagtgtaaatattgtttcaaaaacgaacttttgcgactctaaaaatctatccatttcattcccaggtgcaacgcattaagatcgatgacgattcggcctgtcgcaattcctacaatggtccacacaatgccttttgcaatgaacacatggatgtctcgaactttttgaatctgcattccctagaagatcactcggacttttgtttggcttacgtgttcacctacaggttggtcattggcttaggcagaattttcggatttattttataatctgcatcttctacagagatttcactggcggcactttgggtctggcctgggtggccagtgcgtcgggagcctctggtggaatttgcgagaagtacaagacgtacacggaaacggtgggtggacagtaccagagcaccaagcgatcactcaacacgggcatcatcacctttgtcaactacaacagccgggtgccgccgaaagtgtcgcagcttacgttggcacacgagattggccacaactttggatcacctgtaagtcttttaactcttgtgttgcccacagttggtatatctctttaactttaatatactccatccacagcacgattacccgcaggaatgtcgtcctggtggcctaaatggcaattacattatgttcgccagtgccacctccggtgataggccaaataactccaagttctcgccctgctccattcggaacatctccaatgtccttgacgtgctggtgggcaacacgaagcgcgactgcttcaaggcctcggaaggtgccttctgcggcaacaagatcgtggagtctggcgaggaatgcgactgtggcttcaacgaggaggagtgcaaggacaagtgctgctacccgcgtctgatcagcgagtacgaccagtcgctgaactccagtgccaagggatgcacgcgccgcgccaagacccagtgctcaccatcgcagggtccgtgctgtctgtccaactcctgcacctttgtgccgacgagctaccaccagaagtgcaaggaggagacggagtgcagctggtcgagcacatgcaacggaaccacggccgagtgtccggagccacgtcatcgcgatgacaagaccatgtgcaacaatggaacagcgctatgcatccgcggtgaatgtagtggatcgccatgtttgctctggaatatgacaaagtgcttccttacctcgaccacactgccgcacgtgagcaagcgcaagttgtgcgacttggcctgccaggatggcaatgacacctccacctgccgcagcaccagcgagtttgccgataaatataatattcaaaagggtggtattagtctgcagcccggttcgccatgcgataatttccagggctactgcgatgtgttccttaagtgtcgagccgtggatgccgatggtccgcttcttcggctgaagaatttgttgctcaaccggaagaccctgcaaacggtggccgagtggatcgtcgacaattggtacctagtggttctgatgggagtggcctttattgtggtcatgggttcgttcatcaaatgttgtgccgtgcacacgcccagttccaatccgaagaagcgacgagctcgtcgaatcagcgaaactctaagagcacccatgaacacgttgcgtagaatggtaaggtttctcagtgcgtttccttaaaagcaaactaaattgtattacatttgcacagcaacgtcatcccaatcagcgaggagcaggtcctcgaagcatcccaccgccggcgcatgaggcgcagcattattcacgcggcggagatggtcgcggcggcggcggtggaggcggaggtcgccacggtggctctaggtcacaccatcaacagcatccgcacgattgggatcgtcatcagggtggccactcaatcgtcccattgcccaccggcggcagccattcaagtcgcaactcggcggcgaatcaagcgagaagaagcgatggacgaggtccacgatccaccagcagtgggcggccgcaggctatagccagcggaagcggtgccgcgagcggagcagcgcgatctcatggcgggtacggagccgaacaggcgataccgggttccattggtggtggtgtccaggcggccattagcagcggcggtgtggtggctcgggcccagctgccgctgccattgccgccgccaaatggacagcagcaaatgcaacagcaacaacaactgcaactacagcaaccggcaatttcgccgcagcagcagccgcagcaagcgttctacacgccgaaaggtgtgtgtcccatttccctgcaagtagaaagatagagtgagccctgagttggtagttttgccccagccatgctcctccattttctcacccctaccccccctgtttttctttccacaaacttaatttgtcgtttttcttttcgtttgcgaaacgctacaaaaaaaattcagaactaccaccacgcaataagtcccgatcatcacgtaccaacaacacctccaacaccacaaccaccaccaactcatccacagcggcagccggcagtgggtcggtctcgggaccgggctcgggggcgggcagtagtagtaagagcaagagcggtaaaagtgccaaagccaaagactcaaagtcgcaaaaatcgcagcaggccaacaacagtcgcagcagcagcaaggaaaagggcgtcaagccagtgcgccgaaatatcgtttattaggagcggaaccatcacattgccatacacaacactgaacgaaatatagccccgaacccaaaatatcaaatgcaaccacatatagaatcgcccgctgctagtcatcgaactacatgtatgagttgttgcttcccatccaccgacaaacacaaacagaaaagaaattataatgatatttcatttaatcgatgcaattggtatgacatttgtgattttcccccccggtttgttatgtttgctcctccattggtttgagatccaattttatttgttggtcgtattttgtccttctcctcctggaatgagtcccaaattctccccatatattgtagtaactccttttttggttaaagtttttgtattgttgttgttatcttttgcatgtgcatttacgttgtttatttaacacttaacttttttaactcaaatgtgatgattttaaaatcactgaaaaagcattttatactcatctgcgttgtcaaaataaaatcataagaatctttgatttcaatctataacttttatgccagtataaaatgctttttaataaaattttttactaactgcactaaccaagtatgtgaatatacattttagaaataaccaattgtctttaatgcctattttgctgccttttctaggcgtcgcgccgcctccgctacaagtaagctttagtcggccgacatcgttgcacgagcaacagcagcagcaacatcatctgcagcagcagcagcagcatcagcagcaactggagccgcagcagcagcacgcctatgccgatgcttatgcggccttgggacggggccagtatgagtccaccacgcgggcgcccaacaacagcaaggtttgacagccaaaagtagcaatggagcgccacaaaaggccaaaggctaagcgactcaagcagcagaaggagccgcatacacagcaaacaacaacacagcaacaaaagcaaaaacaacataaatcaaatgaactcaaattaaatgtaaatgtaatttttatgctaattatttttatttaaacagtgtttgtatgccacaagggaaaacagccagcaacaaaaagaaaaatacaaaaataacacaaaaaaggagaaaaatttcgtaatacagaaaaagctgaaagtgaatgatatttttgattaactaaattaaaatgaaaatacgaatgcaaattatgaataataaaagtaattaaaaacgacaacatgcataatacatataaagttgcaagttgcatatatatacatttgtatgtatatatttattatggatacacaattattaaatagcagcagccacaacaaacaagtaatatacatgaagaaaaactaaggtttaattgtatgagaaagcattctatatgtcggtgagatttctaagcgctaggccgaaatacaaaattaattacacacttgaataacaaaatgtgttttgtacaaaaaaaatgaaataaacaaaaacagtgcgaattaattaagcgtcattataaaaaaaagaacggaaacaacaaagcatttaaattgtatttatctgtaccgaaggctaaacgtttatttaaagccgtcaaaattgcatttgtaaactagcaaaacaaaaaaaaaacgatgaaaaccaaaaagtatgaaatccataattattaaataaagaagcgagacttaaacaaaaacggtggaaacaatccaaacttattcatttgttgctgaacgcatttttctgtatgactttcgaacgtggctttgattgttttccgtatacattttccttgtgcagaaaaagcaaacgaagtaactaatttttatatttcatgtatttttactatcttaggtacaattttctattgtcaatttttattagtattaggtttaaagctttatgttttagcaatctggtagcaaaactgccaatgatgattatgtttaatgttatctatcatatacgtgtatatctgccaacatataaatctatttttatgtaagtatcttaaagtgcatagatcatgcatatatgatactatcgagtgcttgtaatttgctttgttgtagtctcataggttactagtttatgttttttgtttttgtctgtgtttcgtatttgcatgctcaagaactaatcgtgcaactactcacggagtcccgactgatgtactactccaagaaaagacatttatagcttgaaagctatatgatattatttttgaaacccttgtcttcgtttccattcgcacatccaacttgtatatcgtgacgcatagctatggaattatctcaattcgaatttacaagacgtttccgtgctatcattttggagaaatttactgaataaatgaatttacatttttgtttgtttttctgccagacttttcgtaaaagaacatctttaactcttgtaaataaactctataaaaaatatataaatataaatactaaaatatactttaaggaataaattaaatttgaattgcagatacagtgaaggcgaaatacgtttacaaaataattaaataacataaattgataaaaaaaaaatgtattcaattcaaattgacaagtgaaaaaatgcaaagaaacgaaacaaactcaaagcgaacaaagcagaactatgc

SEQ ID NO: 15845 - DNA, 5468 bp, DROSOPHILA
cgagttggacgcgtaactctttgtaacggatctcggaacgccgtgggagtcggaaaatcgctggacgcgtgttcgtgcgtttgcatgtgtgcgtgcgttcgtgtgtgtgtgtgtgctaatgtgcgagcggaaataaacaatccagtgaataaacacacaaaatcaatcaaaaaagaagatttttcttttttattttcgcttttaatttattaacgagaaaatattggaataaaacaaaaataaaaatataagaaaagtgtacgtgacaagagctcgaaaagaagttgcaacaaatagcaaaaataattcgtgcgtgcgaaaaagtgctgcgaagttttatggcccatgcaaaaagtgctaaatttgtaaatggcatggaaagtgcaaagctctgattaaaaaacccgcgaagattggagtgcgaggtgccgcccaataacgcaaccaactactgccacaaggaaattattaagaccaatcaacgaccttcgcggaaataaaaaaaataaaaaataaaacaaaagcaagcagaaatttggtgctagttctgtttagtcgacagccatccacgttggatccccatcgcaaataatgtcatcaaaatgtgctttcaacattgtattcgtatcgatcattttcatcatcatcgtaaatggttacgcaaaagatatttctggagttaaaagaggtcatgaacgacttaacgaatacatatcccactatgaaacactcaactatgatcacgagcacatccgagctagtcacaatagagcgcgacgatcagtgaccaaagatcaatatgtacatttaaagtttgcatcacatggaagagacttccatcttagattaaaacgtgatttaaatacatttagcaataagttagacttttatgatagcaaaggtcccattgatgtctccacggatcatatctatgagggcgaagtgataggggatcgtaatagttatgtatttggttccatacacaatggggtattcgagggtaaaattataacggaacgtgatgcctattatgttgaacatgccaaacattattttcccacaaatcgcacggcgacaacaacaccaccatcgacttcaacgacatcctcagcaacaacagccacaaaaagcacacaaccaacacggcctttggccaaaagcaacaccagtactactgccgttaatagtaagacagaaaactttataaagaaaattgctgaatccacaacgacgagccagcagcttccagagtataccgaatcgtcgtcgtcgtcgacaacaacattcccacccacaacagagtatttcgaggacgaaaaggagcgtaatgccgaggacgaacttgattttcactccattatctacaaggagtcacatgtcgaggacgcctacgaaaatgtgcgcgaaggtcacgtggccggctgtggcatcacggatgaggtctctcagtggatggagaacatacaaaattcagccgtcgaagagttgccggagcccatgtcaaaggactatcaaaagctccaccggaagcagctgcacaaaaagtccgccccacagcaacaacagcagccccatccgccgaagaagtacatcagcggggatgaggacttcaagtatccccaccagaagtacacgaaggaagctaacttcgccgagggtgcattctacgatccatcgaccggacgtcgcctgggctcatccgccaacgtggccgactggcatcagctcgtccacgagcgcgtccgccgcgccaccgacaatggtgctggggataggggctcatccggtggatctggacgcggtcgcgaggacaacaagaatacctgctcgctctacattcaaacggatccattgatatggcgccacatacgcgaaggcattgctgaccacgatcgtggacgcaagtacgaggtggatgagaaaacgcgcgaggaaatcacatcgttgattgcacatcacgtgacggccgttaattacatttaccgcaacacaaagttcgacggacgcaccgagcatcgcaacatacgctttgaggtgcaacgcattaagatcgatgacgattcggcctgtcgcaattcctacaatggtccacacaatgccttttgcaatgaacacatggatgtctcgaactttttgaatctgcattccctagaagatcactcggacttttgtttggcttacgtgttcacctacagagatttcactggcggcactttgggtctggcctgggtggccagtgcgtcgggagcctctggtggaatttgcgagaagtacaagacgtacacggaaacggtgggtggacagtaccagagcaccaagcgatcactcaacacgggcatcatcacctttgtcaactacaacagccgggtgccgccgaaagtgtcgcagcttacgttggcacacgagattggccacaactttggatcacctcacgattacccgcaggaatgtcgtcctggtggcctaaatggcaattacattatgttcgccagtgccacctccggtgataggccaaataactccaagttctcgccctgctccattcggaacatctccaatgtccttgacgtgctggtgggcaacacgaagcgcgactgcttcaaggcctcggaaggtgccttctgcggcaacaagatcgtggagtctggcgaggaatgcgactgtggcttcaacgaggaggagtgcaaggacaagtgctgctacccgcgtctgatcagcgagtacgaccagtcgctgaactccagtgccaagggatgcacgcgccgcgccaagacccagtgctcaccatcgcagggtccgtgctgtctgtccaactcctgcacctttgtgccgacgagctaccaccagaagtgcaaggaggagacggagtgcagctggtcgagcacatgcaacggaaccacggccgagtgtccggagccacgtcatcgcgatgacaagaccatgtgcaacaatggaacagcgctatgcatccgcggtgaatgtagtggatcgccatgtttgctctggaatatgacaaagtgcttccttacctcgaccacactgccgcacgtgagcaagcgcaagttgtgcgacttggcctgccaggatggcaatgacacctccacctgccgcagcaccagcgagtttgccgataaatataatattcaaaagggtggtattagtctgcagcccggttcgccatgcgataatttccagggctactgcgatgtgttccttaagtgtcgagccgtggatgccgatggtccgcttcttcggctgaagaatttgttgctcaaccggaagaccctgcaaacggtggccgagtggatcgtcgacaattggtacctagtggttctgatgggagtggcctttattgtggtcatgggttcgttcatcaaatgttgtgccgtgcacacgcccagttccaatccgaagaagcgacgagctcgtcgaatcagcgaaactctaagagcacccatgaacacgttgcgtagaatgcaacgtcatcccaatcagcgaggagcaggtcctcgaagcatcccaccgccggcgcatgaggcgcagcattattcacgcggcggagatggtcgcggcggcggcggtggaggcggaggtcgccacggtggctctaggtcacaccatcaacagcatccgcacgattgggatcgtcatcagggtggccactcaatcgtcccattgcccaccggcggcagccattcaagtcgcaactcggcggcgaatcaagcgagaagaagcgatggacgaggtccacgatccaccagcagtgggcggccgcaggctatagccagcggaagcggtgccgcgagcggagcagcgcgatctcatggcgggtacggagccgaacaggcgataccgggttccattggtggtggtgtccaggcggccattagcagcggcggtgtggtggctcgggcccagctgccgctgccattgccgccgccaaatggacagcagcaaatgcaacagcaacaacaactgcaactacagcaaccggcaatttcgccgcagcagcagccgcagcaagcgttctacacgccgaaagaactaccaccacgcaataagtcccgatcatcacgtaccaacaacacctccaacaccacaaccaccaccaactcatccacagcggcagccggcagtgggtcggtctcgggaccgggctcgggggcgggcagtagtagtaagagcaagagcggtaaaagtgccaaagccaaagactcaaagtcgcaaaaatcgcagcaggccaacaacagtcgcagcagcagcaaggaaaagggcgtcaagccagtgcgccgaaatatcgtttattaggagcggaaccatcacattgccatacacaacactgaacgaaatatagccccgaacccaaaatatcaaatgcaaccacatatagaatcgcccgctgctagtcatcgaactacatgtatgagttgttgcttcccatccaccgacaaacacaaacagaaaagaaattataatgatatttcatttaatcgatgcaattggcgtcgcgccgcctccgctacaagtaagctttagtcggccgacatcgttgcacgagcaacagcagcagcaacatcatctgcagcagcagcagcagcatcagcagcaactggagccgcagcagcagcacgcctatgccgatgcttatgcggccttgggacggggccagtatgagtccaccacgcgggcgcccaacaacagcaaggtttgacagccaaaagtagcaatggagcgccacaaaaggccaaaggctaagcgactcaagcagcagaaggagccgcatacacagcaaacaacaacacagcaacaaaagcaaaaacaacataaatcaaatgaactcaaattaaatgtaaatgtaatttttatgctaattatttttatttaaacagtgtttgtatgccacaagggaaaacagccagcaacaaaaagaaaaatacaaaaataacacaaaaaaggagaaaaatttcgtaatacagaaaaagctgaaagtgaatgatatttttgattaactaaattaaaatgaaaatacgaatgcaaattatgaataataaaagtaattaaaaacgacaacatgcataatacatataaagttgcaagttgcatatatatacatttgtatgtatatatttattatggatacacaattattaaatagcagcagccacaacaaacaagtaatatacatgaagaaaaactaaggtttaattgtatgagaaagcattctatatgtcggtgagatttctaagcgctaggccgaaatacaaaattaattacacacttgaataacaaaatgtgttttgtacaaaaaaaatgaaataaacaaaaacagtgcgaattaattaagcgtcattataaaaaaaagaacggaaacaacaaagcatttaaattgtatttatctgtaccgaaggctaaacgtttatttaaagccgtcaaaattgcatttgtaaactagcaaaacaaaaaaaaaa

SEQ ID NO: 15846 - protein, 1238 aa, DROSOPHILA
MSSKCAFNIVFVSIIFIIIVNGYAKDISGVKRGHERLNEYISHYETLNYDHEHIRASHNRARRSVTKDQYVHLKFASHGRDFHLRLKRDLNTFSNKLDFYDSKGPIDVSTDHIYEGEVIGDRNSYVFGSIHNGVFEGKIITERDAYYVEHAKHYFPTNRTATTTPPSTSTTSSATTATKSTQPTRPLAKSNTSTTAVNSKTENFIKKIAESTTTSQQLPEYTESSSSSTTTFPPTTEYFEDEKERNAEDELDFHSIIYKESHVEDAYENVREGHVAGCGITDEVSQWMENIQNSAVEELPEPMSKDYQKLHRKQLHKKSAPQQQQQPHPPKKYISGDEDFKYPHQKYTKEANFAEGAFYDPSTGRRLGSSANVADWHQLVHERVRRATDNGAGDRGSSGGSGRGREDNKNTCSLYIQTDPLIWRHIREGIADHDRGRKYEVDEKTREEITSLIAHHVTAVNYIYRNTKFDGRTEHRNIRFEVQRIKIDDDSACRNSYNGPHNAFCNEHMDVSNFLNLHSLEDHSDFCLAYVFTYRDFTGGTLGLAWVASASGASGGICEKYKTYTETVGGQYQSTKRSLNTGIITFVNYNSRVPPKVSQLTLAHEIGHNFGSPHDYPQECRPGGLNGNYIMFASATSGDRPNNSKFSPCSIRNISNVLDVLVGNTKRDCFKASEGAFCGNKIVESGEECDCGFNEEECKDKCCYPRLISEYDQSLNSSAKGCTRRAKTQCSPSQGPCCLSNSCTFVPTSYHQKCKEETECSWSSTCNGTTAECPEPRHRDDKTMCNNGTALCIRGECSGSPCLLWNMTKCFLTSTTLPHVSKRKLCDLACQDGNDTSTCRSTSEFADKYNIQKGGISLQPGSPCDNFQGYCDVFLKCRAVDADGPLLRLKNLLLNRKTLQTVAEWIVDNWYLVVLMGVAFIVVMGSFIKCCAVHTPSSNPKKRRARRISETLRAPMNTLRRMQRHPNQRGAGPRSIPPPAHEAQHYSRGGDGRGGGGGGGGRHGGSRSHHQQHPHDWDRHQGGHSIVPLPTGGSHSSRNSAANQARRSDGRGPRSTSSGRPQAIASGSGAASGAARSHGGYGAEQAIPGSIGGGVQAAISSGGVVARAQLPLPLPPPNGQQQMQQQQQLQLQQPAISPQQQPQQAFYTPKELPPRNKSRSSRTNNTSNTTTTTNSSTAAAGSGSVSGPGSGAGSSSKSKSGKSAKAKDSKSQKSQQANNSRSSSKEKGVKPVRRNIVY

SEQ ID NO: 15847 - DNA, 5262 bp, DROSOPHILA
aacaacaagtgctacacgagcaaccccaacaacaacaacaacaacaacaataacggcggcagcaacagtggcaacaacaacagcagcccgagtgtaaacaacttcaattgtgatagtgtcgccggtaatggacgttacctgcacggcggacaccagcatccgcatccgcaccaggcgggatttgcagcggttgccgccgccgtcggagcagctccctccgccctgcagagcctgcagcagctccaccagcaacaccacgctcagcagcaggccaccctgagctttcagcgggaaaaactcaagtcgggtaagcaggtgtttcagtcgatgaataacccatgatttgatcataagtgggtattaagtaaacatagtgtgtgcacatctaatacctccatttgatcatcattttgtgattcggcagattctcacaagaagagcgcactgaagaacaagcgcgtccggacaatcttcacgccggagcagttggagtgcctggaggcggagttcgagcgccagcagtacatggtcggcccggagcggctctacttggcacacaccctaaagttaacggaggctcaggtgaaggtgtggttccagaataggcggatcaagtggcgcaagcaccacttggaactgacacaacaacggctggcattgataaggcaaactcaactgccaggtacatcgttattgggcaatcaagtatccgtgtcggccaatgcggcccattctgtgtccacggaacgcacaaacggatgcagtgcagcctcgcccagcctgcaggaggaggacaacgaggatagcaagcactcgctgtcgctttcgggcgcattaccgccgttgagtcgagcgcagtccgagtcggatttgtccatctgtaacgattccctggacggcgacagcctcatggacggcagcgaggaggcctaaaaaccacgccagtgcaaagcaagtttcctgtaaatatagtcaaataaatatgtacaatatcggttttctatacttctgcttgtctttaattgttgatgattagctgcaagttgattgttacaatcaatcaatgcaaactatattatattgtataagcattgcagtatatccattacatacgagtactgaaaaagcttatttaaaaacagaataatacagacatttacactcaattcgcactttataccttgatcagttatcacattggagtatttcacttattgctgagcagccgccctggcgagccgatcgtggcaggataggtgcacgatgtgcccatttggatagcgcacgaaggcggactgggtttgaaaacgcttcttgcactcggaacacacactagactcgtttaactcgaagctaatgtttcgctgctcctccaaggcattctccaggcgcgtggactctgcctccaggaagccgcacatcatctgcatctcgtgcttgtcggccatcattttacgtatagatttctccaagtatttctccagctggggcatgggcatgtcatcgggaaggtgctgcaaaatccaaaatggttgagaaatatttctaataagtcatgcattcaatgcattcttcacctcgaagatctcgaatggatcgattctggtggcgtgggtgttaagtatttccagggccacctctcgattcacttgcgagaaatccggatgcaagggcacaccatcatagagcggttgagttggtggtattaatatgcacttaatgagcgtgtgaaatatgtgcttgtcctctttgtaatgggcttccgcataggccgttgccttggccacatctccgagaacatgaatatagatggacaggacgttgtcgtgctttttgagcctgcccaggattagggcacgctcctccaagagtatattggttggaaattcctctaggaggcgatccggcgaatagtcgttggactcctccaacatcttgtagagcttggctcgcatcggaatgagttcgggaacttcctctctagaaaacaggtgagtataagcattttgatccagtacaatgacagactctcaccctttttcctgctgagcaagaagccgttgcaccttttcgcgatactgcttgaggagcacattgtggagcagggtgttgccgtccttccattcagtgattacgtgctccaaatagggaatgacaagtgctttgtgcttgctaataaaaaaatcaagaactttggcgcgcggcagggattccacttcaataagttcgtcggtgaaaatggttaggccttcctcgggattatcgtttaagacccagtcagcgaactcaaagatcagcggcagatgatcaccacccagctcctgaagatagcgtatggtacgcttgcgaccctgcagcacagatccttcgatgctcgcctgctctcgaagcagtttaagggcctccttgtgcttgcccttcatctggtagaggatgataagttcagagatcttgttgtgcttcttcaacgtcttttccgactcctctaagtggcactggtttaggcgtagcagtggtgccaccagagagtcgtttgtctgcaggtaacacttcagcaacgttgtatcgatgatctccagcagggactttgaactacttttagtgtcgcgcagcttgaccacctcccgctgtcgggcccatgccagatactcgatcagtgccaagtaggcgttctccaggtcgctatcctcaagcgccggagtactggacgtaggcacggtgacatcttcggtgccgggctttggttctggcaccaagtttgggaacagtcttatcacatcgtagggatctatagccgccttttcaaactccttcatggccgccgagaactccttattggtaaacagctctttcgcatagagcatgtgtatctggcgaatggtttgggctcggtccgcggcaggttcatcggagatttgctgaacataaagtttgttgtagtcgtcgtattttgatttcgtttatcggactcaccgtcagctcaatagccagttggaatttcttttgctgtagcaactgctgacgctggatagggatttccaccattcgaatgcaccaaagctcggaggtggcggcggcaaagatggttcccttgtcggcgtgaaccaggaatttcgtcttctgtagctcgggaatggtctggaccagggtgtccttgcccactaggctgcgcacctcgatggcgttgttgacacgacccacagcgaatggctcatcccagactgtaatgaagataatgtgatttagaaattggcttgaagtgaatagtgagtatcgtacccagatctaaaagcggacttgaccagagcagaggagttagggaactattgctgtccatggcagctggccggacatctgttgagttattgattccatccgattctttgtactgactcggatctactacgacgaggtagctgtccttagagatgcccaacatgttgttccggataaggcaaatgcagggatctctgctgatactagaggaggtaaggaagaggttgtgcttctttggtgcttttcctgatatctagaattggatatgcagacctttaaaatacgaagtaaatcgactttaaagcatttctcacatcgtaaacaacatattcgtctttgaagcccacgcagacagcatggcccacccagcacagtgtcctgggcacatcgctgagctcgatgatcaattccagggaattaagcttgtcctccttccaaaagaagaacacaagacgccgccggatagcgcagcacacccgtatgacggtggccacacgtccggttgtggacttcggcgtgtccacgtccatggtgaacagggtgcatcccttcgtgtcgggcgcactgtgcatgaaagcgaagttgctctcaatccgccgaatgtcgcacacctgcacctgtaagtcggtgagtacgaagagcaggttctccgaggcaatcacttccatttgggtgatcggtttccggctgaagttcttgttgaacatccgcatgtccacgcccgtctcctcgtccacagagtacatgatcagctgtccgctgcgggtgcccaagatgacatggttgcctgaaaaaatgcgtccggtgagtaatagctgtgcaccgaaaattccactcaccatatgccgcaattgactctatctgcacgccctgtttcaggatcgagtgaacactgtaggcctggtgcatcttggccaagtggaaaaacttcggtctcctccgcctcaatttattttcgtaaaaaagcttataaacaaaccagatgggagtaccactaatgatagctgatgatgatagatatcgatagctttagcggtggtaaatcgatttcttcctcttatggtgatagcgaaataacttaaatatacaaagtagaaaataaaatttgtacatgttataatttaagattcaatcgctaatgactaaaaagttgagtgaaattttaaattacgatactttaaacgaatgctgccagactctgcattgctgtcgatagcaccagttcgatatactggttccccgcgaaaccgtccacctctagtccttttcactttagcgaggcgaaattgtcacatttacatttgacaaaattgtaagttttgaaacaactctgtcgctttatttcgggttgaatgttttcattgcattactacccacccagtgaagtcgttgagtaacagttttaccccgttcccgctccagggtcgccaacaagcccgcagacagcaacaacatcgaaagtagctgcacagcaacaacagcaaacagccaaaatgcccaagaataaaggaaaaggaggcaagaatcgtcgtcgtggtaagaacgagaacgagttcgagaagcgtgagctgatcttcaaggaggaccaacaggagtacgcgcaggtgaccaagatgctgggcaacggtcgtctggaggcaatgtgctttgatggcgtcaaacgcctgtgtcacattcgggggaaacttcgcaagaaggtgagtgctgctctgactacgctctttgtttcgcctgtgctctcttcgcttgcgttgagtgggtgcccctctctaaggtggctctcttaagccattttggcattgattgccagcgaatgctacgtatttacgttattgtttttgttgaaatgcaggcagtttttgtgattttgggggattttgcattaccctgctaactttcgacctttctatacctaattttcaactctctttttctgcaattctcttttactggtccattattgagtgggtgtcatcgtccttgtgc

SEQ ID NO: 15848 - DNA, 2919 bp, DROSOPHILA
ccatctggtttgtttataagcttttttacgaaaataaattgaggcggaggagaccgaagtttttccacttggccaagatgcaccaggcctacagtgttcactcgatcctgaaacagggcgtgcagatagagtcaattgcggcatatggcaaccatgtcatcttgggcacccgcagcggacagctgatcatgtactctgtggacgaggagacgggcgtggacatgcggatgttcaacaagaacttcagccggaaaccgatcacccaaatggaagtgattgcctcggagaacctgctcttcgtactcaccgacttacaggtgcaggtgtgcgacattcggcggattgagagcaacttcgctttcatgcacagtgcgcccgacacgaagggatgcaccctgttcaccatggacgtggacacgccgaagtccacaaccggacgtgtggccaccgtcatacgggtgtgctgcgctatccggcggcgtcttgtgttcttcttttggaaggaggacaagcttaattccctggaattgatcatcgagctcagcgatgtgcccaggacactgtgctgggtgggccatgctgtctgcgtgggcttcaaagacgaatatgttgtttacgatatatcaggaaaagcaccaaagaagcacaacctcttccttacctcctctagtatcagcagagatccctgcatttgccttatccggaacaacatgttgggcatctctaaggacagctacctcgtcgtagtagatccgagtcagtacaaagaatcggatggaatcaataactcaacagatgtccggccagctgccatggacagcaatagttccctaactcctctgctctggtcaagtccgcttttagatctggtctgggatgagccattcgctgtgggtcgtgtcaacaacgccatcgaggtgcgcagcctagtgggcaaggacaccctggtccagaccattcccgagctacagaagacgaaattcctggttcacgccgacaagggaaccatctttgccgccgccacctccgagctttggtgcattcgaatggtggaaatccctatccagcgtcagcagttgctacagcaaaagaaattccaactggctattgagctgacgcaaatctccgatgaacctgccgcggaccgagcccaaaccattcgccagatacacatgctctatgcgaaagagctgtttaccaataaggagttctcggcggccatgaaggagtttgaaaaggcggctatagatccctacgatgtgataagactgttcccaaacttggtgccagaaccaaagcccggcaccgaagatgtcaccgtgcctacgtccagtactccggcgcttgaggatagcgacctggagaacgcctacttggcactgatcgagtatctggcatgggcccgacagcgggaggtggtcaagctgcgcgacactaaaagtagttcaaagtccctgctggagatcatcgatacaacgttgctgaagtgttacctgcagacaaacgactctctggtggcaccactgctacgcctaaaccagtgccacttagaggagtcggaaaagacgttgaagaagcacaacaagatctctgaacttatcatcctctaccagatgaagggcaagcacaaggaggcccttaaactgcttcgagagcaggcgagcatcgaaggatctgtgctgcagggtcgcaagcgtaccatacgctatcttcaggagctgggtggtgatcatctgccgctgatctttgagttcgctgactgggtcttaaacgataatcccgaggaaggcctaaccattttcaccgacgaacttattgaagtggaatccctgccgcgcgccaaagttcttgatttttttattagcaagcacaaagcacttgtcattccctatttggagcacgtaatcactgaatggaaggacggcaacaccctgctccacaatgtgctcctcaagcagtatcgcgaaaaggtgcaacggcttcttgctcagcaggaaaaaggagaggaagttcccgaactcattccgatgcgagccaagctctacaagatgttggaggagtccaacgactattcgccggatcgcctcctagaggaatttccaaccaatatactcttggaggagcgtgccctaatcctgggcaggctcaaaaagcacgacaacgtcctgtccatctatattcatgttctcggagatgtggccaaggcaacggcctatgcggaagcccattacaaagaggacaagcacatatttcacacgctcattaagtgcatattaataccaccaactcaaccgctctatgatggtgtgcccttgcatccggatttctcgcaagtgaatcgagaggtggccctggaaatacttaacacccacgccaccagaatcgatccattcgagatcttcgagcaccttcccgatgacatgcccatgccccagctggagaaatacttggagaaatctatacgtaaaatgatggccgacaagcacgagatgcagatgatgtgcggcttcctggaggcagagtccacgcgcctggagaatgccttggaggagcagcgaaacattagcttcgagttaaacgagtctagtgtgtgttccgagtgcaagaagcgttttcaaacccagtccgccttcgtgcgctatccaaatgggcacatcgtgcacctatcctgccacgatcggctcgccagggcggctgctcagcaataagtgaaatactccaatgtgataactgatcaaggtataaagtgcgaattgagtgtaaatgtctgtattattctgtttttaaataagctttttcagtactcgtatgtaatggatatactgcaatgcttatacaatataatatagtttgcattgattgattgtaacaatcaacttgcagctaatcatcaacaattaaagacaagcagaagtatag

SEQ ID NO: 15849 - protein, 876 aa, DROSOPHILA
MHQAYSVHSILKQGVQIESIAAYGNHVILGTRSGQLIMYSVDEETGVDMRMFNKNFSRKPITQMEVIASENLLFVLTDLQVQVCDIRRIESNFAFMHSAPDTKGCTLFTMDVDTPKSTTGRVATVIRVCCAIRRRLVFFFWKEDKLNSLELIIELSDVPRTLCWVGHAVCVGFKDEYVVYDISGKAPKKHNLFLTSSSISRDPCICLIRNNMLGISKDSYLVVVDPSQYKESDGINNSTDVRPAAMDSNSSLTPLLWSSPLLDLVWDEPFAVGRVNNAIEVRSLVGKDTLVQTIPELQKTKFLVHADKGTIFAAATSELWCIRMVEIPIQRQQLLQQKKFQLAIELTQISDEPAADRAQTIRQIHMLYAKELFTNKEFSAAMKEFEKAAIDPYDVIRLFPNLVPEPKPGTEDVTVPTSSTPALEDSDLENAYLALIEYLAWARQREVVKLRDTKSSSKSLLEIIDTTLLKCYLQTNDSLVAPLLRLNQCHLEESEKTLKKHNKISELIILYQMKGKHKEALKLLREQASIEGSVLQGRKRTIRYLQELGGDHLPLIFEFADWVLNDNPEEGLTIFTDELIEVESLPRAKVLDFFISKHKALVIPYLEHVITEWKDGNTLLHNVLLKQYREKVQRLLAQQEKGEEVPELIPMRAKLYKMLEESNDYSPDRLLEEFPTNILLEERALILGRLKKHDNVLSIYIHVLGDVAKATAYAEAHYKEDKHIFHTLIKCILIPPTQPLYDGVPLHPDFSQVNREVALEILNTHATRIDPFEIFEHLPDDMPMPQLEKYLEKSIRKMMADKHEMQMMCGFLEAESTRLENALEEQRNISFELNESSVCSECKKRFQTQSAFVRYPNGHIVHLSCHDRLARAAAQQ

SEQ ID NO: 15850 - DNA, 5839 bp, DROSOPHILA
catgttgttggttcggtttgctcctggtcgccattttcctgcagccatccgcgagccaatactacggttatccctattacggcggcgctaatgcgggagcgggatcgggatacgggaacatatacggcagcggcatgtacggatacccctacagctacggcggatatccgtactactcgtatcccggctacaacccgtactcgatgtacggtggatacgggcagtacggatacccctatggaggatatccctacggcggcaatggcatgagtgagtttcccgactgatagcacctcggtgcctagcacacaagtaatctacaagtgttttggacctgtttcttcctctagacgtggcctacgccagcagcagtggaggattcgcaacagccagtgcgggtggaagcggatactacggctaggaagcgcgaaacctgatatagtttagtgataggtatacggttaagtcatcctaccccataagtgtgttagtgctaataaatatgatatttatgttctataagtcaagacttattcttatgacgtgtccaaaactagtgtacctggtaaaaaattgtacacctaactagtgccttcatgtataccaccataattttattagctcccggaactgatgtgataatttgtatgtcttttagcacatttgaccctatgtatgttccgccaagtttatgctgccatgactctttgtgggatcattagatccttttctcagcttttagctttgagtcaataactacgtacgcatatctggtcgttttaatagttataaaaaagccttgaggctgtgatcccatatataaccatataccgaaaaatattttttgcttcgtgataacaaatcgacaaagtttgatccatgtgcattcttggcgccttatcgatagctatggacagtgttgtaaggtgcacgatagtaaggggggcaaaattgtatcggtctgccgatagttcccggccgttagccaagtccaaattcgaccgaccgaccaatagtctcgcaaaacacaaaacaaaggcacaccacacttcgtgctctcgccgaattccgccgccgtcgcctgaaactcacacaaagtaagcccgaaatcagtggaaaagcgccgaatagtcgaattgcaggttcaaatgggatggacggcgacttaaaaggcggaggccaataggcggcataaaaacattgtattgcgtaattggggccaataagaaaagcaaaaaaacaaagccaaccgactgcattctattgcgcctgtgtgtgtgcttgtgtatctacagctgagcagtaaataaatttgttttacatttggcctccaaaggcaatttctcggtgttcccgctccctgcgtttccataaacttcctctcctttcgcattaatatcaatgtctttagttcatcgttacatattattaagcacttaacaagcagtgagtggaaagaggaagacaaatagccaaagtatgcttacgttaaaagagcttgttccacatattcgccacctttctcccgcactcttcctctcccactctatcagccatctctatccctctcacaggggctgctcacgcgcaccgtggggtgttttttcgattctctaccattttcgctgctattgcaccccttccccagcatttgtgccgcttaatttcataaatcaaggcagcgtcagttaaaaaacacaagaactacatacgtatgtacttctgcccacatccccttcagccaccttctcttcatctttctggtttcggcaatgggaaatttccgtagccaccgcacagtggaaagagacaacagcacgcaatttaaattacaagattgcaatctcgctttttgggcagttggttaaattttcatcgagacacaagctgagccaaataaacattcactttttaaacgaacagtgcacacgaattgggtagcaatgccttgttctaaacatagtgtaaaatgtttttaagataatttttattttttagtccagcgttcaaggcactcgacaaataaaacagcattcataaatttactaatttgcgattaactagattgtgccagctttgacacgctctcatcccactgtgcgcttcgtagacagaacagctgatgctcgtcaaattttagcttctgcttgtgcaaaaagcgctctgagtgcgcttgtgtgtgagtgcgtgtgtgagcatgggaaagggaacgtggttatcgataataaagtaaactgaaaataaatcagtcatccgctcggttgaccaactgcccaagttagtgcaccttctagaatttcttgcaagtgcacattcttttggttcgcagtgtttctgttttgcgccttatctggggggtgtgtcgtcgtcgggagcttcacgtttggctggttatcaaaatcacgcgacttgacgcggacccccagtgaattgccaaggttgctgataaatgaatactaatcaaacgtttgctcttttcgcgggcctatcgctcagatagcaaaattctaggtggtacgagccgacgacgacgaagaatctgagagaccgcttatataatccggcagcgaacgagacaggccccaaatcccgacaagatgttgcgaatgatgcgaagttcctcctccagatgctctagtcttcagcagagcttgttgaaaaggtatgcctgaggttatatccttatatttcataatttacaactgacacaatatgtataagtaaccatattatgcatacactagctagtagtttattagttttattacattgaacgcgcttcatttttatcagttcgacacgctgtctgggttccgttataccggaccttaaactgaaggacttcccgatcgccaatgagccaatcctgggatatctcaaggactctaaggagcgtaaggccctcgagcaggctctaaagggcacggcctcgagttgcgaagacatccccatcgtgatcggcggcaaggagtacaagacgccggaggttcgataccaggtcatgccccatgaccaccaacacaagctggccagcttctactacgccgacaagaagcttatcgagaaggccatcaaaacggcggtggaaacacagcccaagtgggaccgtgtgtcgattgcagaccgtctgaagatctgggagaaggcagcggacctaatggcaacgacgtaccgccaggatctcaacgccgccaccatgctgggtcagtcaaagacggcgattcaggcggaaatcgattcagcagcggagcttatcgactttatacggtgagtgtccccataatttattacaaggaacatgcagaaccagaacacaatctgttccaatcgattttttttaaaggattttcccaatggaagaagcaatcatttcctcattatgatattcaatataaatacaaattctatttcgcagaatgaatgcctattttctgaaggaggtcactaaataccagcccatcagcgagaacataaaggtcacgaagaactccttgcgctatcgtggcattgatggcttcatcgccgctgtcagcccctttaactttacggccatcggcggcaacttgtcctacacgccagctctgatggtaagactagccaatggctggaaataccaattaactaagcaaccgccttcgattttcgcagggaaacggcgtgctgtggaagccctcggacactgccatgctgtccaactggattattttcaagattatgcgcgaagcgggagtgcccgatggagtcgttaactttgtgcccgccgatgggcccgtgtttggagacacgattacggccagtccccacctggcaggcatcaatttcaccggctctgtgccgtaagtaattgtcggtctattgattttcccgttcaataccatttcctccgacgacagaacctttaaccgcctgtggaagcaggtgggcaacaacattgacaactacgtgaactttcctcgcttgactggtgagtgtggcggcaagaatttccactttatacatgcatcagccgacgttgagtcagtggtgacctccacgatacgctcagcatttgagtactgcggccagaagtgttccgcctgctcgcgaatgtatgtgccggaatccctttggccacaggtaagtttaaaaagcatcagattgcgatgttttcgcaacgctgacctgtttaacccctaacccgcagatcaaggagggcctggtatgcgaggcagcaaagctgaagatcggtgacgttcaagacttcagcagcttcacgtcggctgtgattgatgacaaagcatttaaacgcattacgggctacattgagcatgccaaaaaatccccgaacctcgagattctcgccggaggcacttactcagacagcaagggctacttcgttaatccgaccattgtactcagcaaggatcccaaggaccggatcatgaccgaagagattttcggtcccgtgctatctatttatgtgtacaaggagtcggacctccttgagaccatgaaactggtgcacacctctaccaagtttgctttaaccggagcagtattcgggcaggacgagtaagagacttctatacaaagggttatctttagttcataacgtatgcttccagggatttcgtcaagtgcgctctgcaggagtttaaaatggccgctggaaacttctacatcaacgacaagtccactggatccgtggtgggccagcagccattcggaggcggccggatgtccggcaccaatgacaaggccggaggaccacattatattctgcgctggacctctccgcagtccatcaaggagacctttgtgccgctgcgggacgtcaactatccatacatgtgcgagtaagctggccgacagaagatgcgcaaggggaatgggatgagcaaaagtagtgaaaaccagacaggaatctcatataactactaactatataaacatacttaaatgtattttgttgaaatacttttaaacatctccaacacccaaagacctgccccgtaaccctacatacctagttcagatagcttcgatttgtatacacacacactctaagaatctcaaaacaacccatgagaatgcctcgaaagtttgtaaattgatatgctgataccttcgaactacaaacacaccatgacatggatattttaaatgaatactatgtaatatcattattttacgatttaaacgcaatgtgattatttaattatatatgatttataattaaatggcccgccttatgttttattcgttatcgaaattgcttgaattggttgaaccgttttcaattataaaatacttaatgtacacacctatgtatgtgaaatcaaacgacaatacattctgaatactaaatgtgaaagatcatgaagagataaagtgaaacctagttacatgtaacgtaagcatcaaattcatattaataaatataacaaagaattaaaaagaattatttgggttccgttttcaacatttcgtttaacccaaaatgctatccgcatcgattggggcagttcctttacccgaaataagatgagttcttagagattagaaacccgtagaatttaaacttcaaaacttgatggtctgaagagaacatgcaaaggtttagtttcatttgattcaaatttgtaatcaaactacaaacaattctgttattaaaaaatacatgtatttctttccgtgttttcttagttcaattaaatacattgtccaatgtgacaaaacaaattaatcttttacatattgaagttgtcataagcattcataaaccggctatcaccacaagttagcggaaaattcaacccttcatttaacccaagcgtctgaaaaataccttggcttactc

SEQ ID NO: 15851 - DNA, 1923 bp, DROSOPHILA
accgaccgaccaatagtctcgcaaaacacaaaacaaaggcacaccacacttcgtgctctcgccgaattccgccgccgtcgcctgaaactcacacaaaatagcaaaattctaggtggtacgagccgacgacgacgaagaatctgagagaccgcttatataatccggcagcgaacgagacaggccccaaatcccgacaagatgttgcgaatgatgcgaagttcctcctccagatgctctagtcttcagcagagcttgttgaaaagttcgacacgctgtctgggttccgttataccggaccttaaactgaaggacttcccgatcgccaatgagccaatcctgggatatctcaaggactctaaggagcgtaaggccctcgagcaggctctaaagggcacggcctcgagttgcgaagacatccccatcgtgatcggcggcaaggagtacaagacgccggaggttcgataccaggtcatgccccatgaccaccaacacaagctggccagcttctactacgccgacaagaagcttatcgagaaggccatcaaaacggcggtggaaacacagcccaagtgggaccgtgtgtcgattgcagaccgtctgaagatctgggagaaggcagcggacctaatggcaacgacgtaccgccaggatctcaacgccgccaccatgctgggtcagtcaaagacggcgattcaggcggaaatcgattcagcagcggagcttatcgactttatacgaatgaatgcctattttctgaaggaggtcactaaataccagcccatcagcgagaacataaaggtcacgaagaactccttgcgctatcgtggcattgatggcttcatcgccgctgtcagcccctttaactttacggccatcggcggcaacttgtcctacacgccagctctgatgggaaacggcgtgctgtggaagccctcggacactgccatgctgtccaactggattattttcaagattatgcgcgaagcgggagtgcccgatggagtcgttaactttgtgcccgccgatgggcccgtgtttggagacacgattacggccagtccccacctggcaggcatcaatttcaccggctctgtgccaacctttaaccgcctgtggaagcaggtgggcaacaacattgacaactacgtgaactttcctcgcttgactggtgagtgtggcggcaagaatttccactttatacatgcatcagccgacgttgagtcagtggtgacctccacgatacgctcagcatttgagtactgcggccagaagtgttccgcctgctcgcgaatgtatgtgccggaatccctttggccacagatcaaggagggcctggtatgcgaggcagcaaagctgaagatcggtgacgttcaagacttcagcagcttcacgtcggctgtgattgatgacaaagcatttaaacgcattacgggctacattgagcatgccaaaaaatccccgaacctcgagattctcgccggaggcacttactcagacagcaagggctacttcgttaatccgaccattgtactcagcaaggatcccaaggaccggatcatgaccgaagagattttcggtcccgtgctatctatttatgtgtacaaggagtcggacctccttgagaccatgaaactggtgcacacctctaccaagtttgctttaaccggagcagtattcgggcaggacgaggatttcgtcaagtgcgctctgcaggagtttaaaatggccgctggaaacttctacatcaacgacaagtccactggatccgtggtgggccagcagccattcggaggcggccggatgtccggcaccaatgacaaggccggaggaccacattatattctgcgctggacctctccgcagtccatcaaggagacctttgtgccgctgcgggacgtcaactatccatacatgtgcgagtaa

SEQ ID NO: 15852 - protein, 574 aa, DROSOPHILA
MLRMMRSSSSRCSSLQQSLLKSSTRCLGSVIPDLKLKDFPIANEPILGYLKDSKERKALEQALKGTASSCEDIPIVIGGKEYKTPEVRYQVMPHDHQHKLASFYYADKKLIEKAIKTAVETQPKWDRVSIADRLKIWEKAADLMATTYRQDLNAATMLGQSKTAIQAEIDSAAELIDFIRMNAYFLKEVTKYQPISENIKVTKNSLRYRGIDGFIAAVSPFNFTAIGGNLSYTPALMGNGVLWKPSDTAMLSNWIIFKIMREAGVPDGVVNFVPADGPVFGDTITASPHLAGINFTGSVPTFNRLWKQVGNNIDNYVNFPRLTGECGGKNFHFIHASADVESVVTSTIRSAFEYCGQKCSACSRMYVPESLWPQIKEGLVCEAAKLKIGDVQDFSSFTSAVIDDKAFKRITGYIEHAKKSPNLEILAGGTYSDSKGYFVNPTIVLSKDPKDRIMTEEIFGPVLSIYVYKESDLLETMKLVHTSTKFALTGAVFGQDEDFVKCALQEFKMAAGNFYINDKSTGSVVGQQPFGGGRMSGTNDKAGGPHYILRWTSPQSIKETFVPLRDVNYPYMCE

SEQ ID NO: 15853 - DNA, 6204 bp, DROSOPHILA
ttggcatcgatgtgagcttcctagacggcatggaggctgaaatgaagagctacgagcttaatcggcgcatgcacgagcatcttagtcaaaacttgacgctaatcgagaagctgcgagtggcgcagcacgatcgtttgtcacagcctttgccgaatcacctgggtctggtgcagcccgccggtcaggaggagatccaaaccgcccagcaattgacgcagcagatcagcgatttggctaagaagttgccgccttccgccatcgccgatccctatgccttgcgaaaagctatgggcatgtcctatggtaagtccatatgcaaatatgattattttgctcatttattaataactttattgtgtttagctggcttgccgccacctcgacccgtctctccgcgcgtccagctgcctgagctgctccaacagccggtggccctgccacagttgcaacctgtggccatggagatcgacgagtctgatgaacagcatggcggtggagatctggagaacgaactgcgcgagttcctcgagagcggatctggcctccattctgccaatccggcggatgacaacagcattgttgctcagctgttgctgaactaggagatcgggaaatctccaagacgcgcgctatgtttataatgtaagataaagaaatttctctaaattattttcatatattcaatgcgttggcactctaaataaaaattaagctaatattaaagaatcacatgctttgctgtcttggaaaagttatatataaaaggaaaattatttgttattttcaaagttgttattttcaaagaaagattcaattgaaattacctagcaaatacgatctgagatcgatcaagtattaatttattgaactttctttttaacaattatattttcgtttcaatttcgagcttaagcctaaacacactttcaatttgtcttaactaaactaggtaacgatttaaagtttaaacacaacacaattgcaaaagaagcggccatagctagacttcttcgacgttttccgtaggtttggcgtcctcaacaacatcctgcagctcttcctcagcggcgacagtctgtttcgtgatctacagaaaattacaatacgatgggcggtacagtgaacatagcctttgcattatcataggttaacaacttcattcagtagctgtcttcaggcacataatacttatcggatcatgcagttagcagcgctgctatgtatatgtatatcaacatgctggttaaaaacgtatccgacgataattctttcatgcatttagcctaggtttatcgtactatataataagttcttagactatgattaggatttggataacataatatcttcgtatggactttaccacattagaaaccgcgtatggcgagtatcggtttagtgttttgatttgagtatggaccacttagaacctagacattaggcgagggctaaatgtttggaacccatttatatatatatgtatatatactatatatcacaagatggttgattttggttgtccccggtttttgatgtgatttttgttagtgagcgatttagtttcaatggcttttcaacggtttgattttgttattgttctgcagaagtggttgagttatatctgaacccgattggctgctagattttcttactttgaagcagcgaatgtgaaagtggtcgcacatctcagaaacctaaaagaaattaaaattttaaaatcccaaaatgtagaaatatttaatgataggatatcttaccacgccgtagccgtagtgccagtgagctaaagttgagaaaatggttagaccatagagtatccatcgttcggtgtccgatgtcagatctgagtcgaagacctgctggtagtagggaaaacagcagactcctactgtggcggccagtggccacatgagcacattgaaggcatcgcaacgcgtgtccgacatttgggccactatcagtcggcactacagatcgcaatttgaaagattcattacttttgaaacccattgcgataatcacttcagtacttactgcaatatttgaaaatatcgtgccatagagtatccataaaatgcgtggctccttgttaatcacatcgtttcgcgaaaaaaacgaccagactacagtgatcacaaaaagccaaacgaaggcgaaaaatggtcgcagcatttcccacatgggtcgcatttttccagtcttgtttttataggaactaaagccaaagcatagttaaatagacagcgcaaacttaaaggtaggtatataagctcacagatagatatttctagcaataatcggatgactgctgaccatgccggaaccaattagaacgaactcaaacatattcgccatggtgaaaccatatatgctaaagcgatacatctcaggaccaaagacggttgccacaaacagcatgccactaactccctgaaaacaaaatcaaaatattaaaatccgaaaaaaaggaatttaaagtataattgaattacatacccacatggtaaagtcgtaaccccagggcaagaacataacacccgtattgtacttttccacgtgcgttaaatagaagttgagaaatacgttccagatcacaaagaacatacgaatcggtggcaagtcgtgtgtgccgaataaggagaataggtaaatgggtatcagggcagctgaataggagtccaatccatgatcgaatagctctcccagaggtccactcgttccagttcttcgagcctgcttgccatccatgccatctgacaatgaaataacattgtagtatagctatagttgatatctctgctcacccaactcacccaagttgtagtaaatgagtatatttatggccgccactgtccaaacccaggcgggcaccgtatttcctgtctctgaattggctgcttcgaaaccccaatcatagtaagctatcaggataaagttgacgacagtcatgagaaagcccacgaaggtcaaaacgttgggcgccagccatttgggaacaaactagagaaccaaatgtgactttaaatatatacaaatattgttgaaagcttttatagaataccttcacacagtagttccaaaaagggtgcatcacatagacgctgaggaagctcgtgtctatactgctgtactacggaataaataataagatattgattaaaaacatttattcactcaaatgttccaaccatagacatctatccacaagttgaaagttaatctacaagttaaaactgagtgattagttttcaatttatattttgtcaagggaaaataaattactttgaacctgaccaaatttttcctatcacgctgggtacaactttatttaaggaagatttgataagatatcgatttataccgctgcgcactacatgttgttatagagtaaaagggtatgttgtatttcttaaatgtatgttacacccaaaaaaaatcttatgttcgttatgatcaggacctgaatatggacaaggattaccgaatggatccaccagtgttgataacaacgttgatatcgtagtaacttaagatttaaagagttttgaaaattaacatgcatgtccttttattttcaagttttgatagtattatttgatagtcgagacaattgagtgtagcatttacatactttccctttaattaagtcttttatggtctagatttgttttctattttaccgagaactctgagactattcttgagcgccctactttgccccgtttatgaagcttgttcatcttattgtctttgcatgttgtaatctttacaagtacaaattccactattgatagcaaccaactcatcctaccgaatccgcactatctatctacatatgtacatgtagaagtataaatatttccaaagctacagcacatggttccgtgacagttcaatgccttctttaaatgaacgtttgcgaaacatttgtttagtctggttatcatttaattgatgacctacactagtaaaactataaactataaaattttgatagtataaaatttcgacacatagtaaacggtttcagttggtcgggatcaaacgaaatgttgcctaatctgccaggcgaagcaaccggaactaggaaaaatcgtaatccgataatagaagcttgttacacgttgggaaaagattttcaagttgataagaataatattttaaaagtataatggaacctaaaaatgttgttgataataatgaacatgataactattgagtaacctacaaatttaattactaccaattagagtatttaagcataacttattttagtcatgtaacgaaagagatctttcgaagaaaaattcaaaattctaaagtggagccaaaacaaatatgccccgcaccttacagatttcagtaaatcgttaaaaagtaaaaatggaacatttaaccacctaagcctgagcataagtttttcaaaaccgataaccgattgaggatcagttaagaattgaggacagtagacttgattcgaatgccactaaagttttctgtggtaaaatcaaacgtcgcgaggaaactgggttaaatcgataatgtagttgattccattttcgtgtgatttgtttagaacttaataacaattgaccgaactgtggatgggggtttcccgattggtacattgattttcaccacccactggggtgggtgccgtgctccccttttcaaaagaactcaccttgtaacgctcgaagcccctcaaatgagcctccgacaagtagcgcatgcaacccattttgtaatttcaatttttcaactattctaatatgtttttgctgtaccaccaagtgggtggcggcggcaagtgataacagcgggagcggcaaagcggcgactgggggagtttgcacttggatcggaagtgtgattagcgcgtatcggcttgacctttgctacgggtcagttggctagttcggcatattgtataacatctgcggatctacacagatatgtaggcgatttacggattcgttcacacgcgggaggctcgcgagaagcggaatgcggttggctaaattaaataatcggtttgtccgccgctctccagaacacgcaacacgcaaacaacagttactcctactgcactcgtacaactggcgaagaagaagaaccggacgaagagacgagcacgcagacgtatatacgaccgccccaaaagatgaagagaacacacacgtactttattccggacggaccggcgtctgaatgggaactgcggacgcggacttatcaggcccgatggcccagcgcttaattcgcgacgtcgaccgcgacttgggttccacaacaacgaatcccagtgcgcaccgcacaccagtcatgctcatttggcggttttttggaattgatccgggtttccccagtcccctccgccggatgttctcttcacgaactatgaattttccatgtttccgttattgcgtttatagcacttagaaagttttagaaaaaaacgttttttaaaagtaaaaattttcgtgtattattaaagtggaatctagcaaatttcatgcagagaacaatttcccaatcctcaaatcagaccccagataagaaacatctttaaaagaaaaccttttacttaccgcagaagtaaatgtacattacttgtttaactacgtgtaattggcatcactagcccgcacaatcttatctgcaaaaaagattgtgtgtgtgctttgcattgaatgaatgtgaattaaaatttgtaaaacgcgagattgcgcgctcccactccatgggcaactaaattgctgcccggcagagaggttatcagtctcgggctccacattttccacagtaattccagggagatgtgtggcctgtttgttgtttattacaattataaacgttaatgaccgcctcgcaaacggatccaatcggatcaccaaagatgttttatgccgcactaaatatagattgaaatcgggtttcttcatttaaaattagttcaagttcggatgataacccttcgcagatcgggttgccaggcgctacagggacaatcgaacggaaatcgaatcttaaagattaaatcgcacggaaaattggaatacacgtttatgatcataatcaatgttgtatattccaggccttctatatctttaaatacaatccacttatacagtattattattttccataaatatttaatcacttacaatcaggctcgtagtgaattcacgttaaggaaacatg

SEQ ID NO: 15854 - DNA, 1456 bp, DROSOPHILA
ccggtccgtccggaataaagtacgtgtgtgttctcttcatcttttggggcggtcgtatatacgtctgcgtgctcgtctcttcgtccggttcttcttcttcgccagttgtacgagtgcagtaggagtaactgttgtttgcgtgttgcgtgttctggagagcggcggacaaaccgattatttaatttagccaaccgcattccgcttctcgcgagcctcccgcgtgtgaacgaatccgtaaatcgcctacatatctgtgtagatccgcagatgttatacaatatgccgaactagccaactgacccgtagcaaaggtcaagccgatacgcgctaatcacacttccgatccaagtgcaaactcccccagtcgccgctttgccgctcccgctgttatcacttgccgccgccacccacttggtggtacagcaaaaacatattagaatagttgaaaaattgaaattacaaaatgggttgcatgcgctacttgtcggaggctcatttgaggggcttcgagcgttacaagtacagcagtatagacacgagcttcctcagcgtctatgtgatgcaccctttttggaactactgtgtgaagtttgttcccaaatggctggcgcccaacgttttgaccttcgtgggctttctcatgactgtcgtcaactttatcctgatagcttactatgattggggtttcgaagcagccaattcagagacaggaaatacggtgcccgcctgggtttggacagtggcggccataaatatactcatttactacaacttgggtgagttggatggcatggatggcaagcaggctcgaagaactggaacgagtggacctctgggagagctattcgatcatggattggactcctattcagctgccctgatacccatttacctattctccttattcggcacacacgacttgccaccgattcgtatgttctttgtgatctggaacgtatttctcaacttctatttaacgcacgtggaaaagtacaatacgggtgttatgttcttgccctggggttacgactttaccatgtggggagttagtggcatgctgtttgtggcaaccgtctttggtcctgagatgtatcgctttagcatatatggtttcaccatggcgaatatgtttgagttcgttctaattggttccggcatgtgccgactgatagtggcccaaatgtcggacacgcgttgcgatgccttcaatgtgctcatgtggccactggccgccacagtaggagtctgctgttttccctactaccagcaggtcttcgactcagatctgacatcggacaccgaacgatggatactctatggtctaaccattttctcaactttagctcactggcactacggctacggcgtgatcacgaaacagactgtcgccgctgaggaagagctgcaggatgttgttgaggacgccaaacctacggaaaacgtcgaagaagtctag

SEQ ID NO: 15855 - protein, 327 aa, DROSOPHILA
MRYLSEAHLRGFERYKYSSIDTSFLSVYVMHPFWNYCVKFVPKWLAPNVLTFVGFLMTVVNFILIAYYDWGFEAANSETGNTVPAWVWTVAAINILIYYNLGELDGMDGKQARRTGTSGPLGELFDHGLDSYSAALIPIYLFSLFGTHDLPPIRMFFVIWNVFLNFYLTHVEKYNTGVMFLPWGYDFTMWGVSGMLFVATVFGPEMYRFSIYGFTMANMFEFVLIGSGMCRLIVAQMSDTRCDAFNVLMWPLAATVGVCCFPYYQQVFDSDLTSDTERWILYGLTIFSTLAHWHYGYGVITKQTVAAEEELQDVVEDAKPTENVEEV

SEQ ID NO: 15856 - DNA, 3873 bp, DROSOPHILA
tcgaacttaacaaaaaacgcaaaggaaacacttacatataattatatcttacctctagggctgaaaggttgtattccttcttggagctgagcagagcatcaccgctttcattgaacagcttggcaagatcttgtagcagataaataatgtcgtacttgttaaagtccagaaactcggccagagctcgcggcagttctgtacggaagtagatgagaagctcctgaagataaatttccaactgttcacgacgttgctccaaaaaggagggctgcttgtttccaactagctgaaaataggaaattattcataacttacatacgtatgtgtaataaatgtttgggggcgtaccttcttcggcggcagcaacttcttactgatggagatctcgccaaccagcttctcgtgaagatttgcaaagtcccgataacggcgctccaccagccattccaccttgcccactcgcaccttgatatcgtagtaggtcactccgccgctggaactctcgttgctaaactttggaaccgtcaccgtggtgtccgcatgctggcggtaatagcaagccatcgcagtcctttccgcttccctgagatttggtcgaacatctggatccgcatccagcaagtaatcatttaataaacatagtccaatcagccagtattgccagcagtgctgtcagaggtcgatggacatttggccattaagccaataaatggctatagccaagaggtgatttaatgggcaaagcgttataataataaaataaaaaataaaatttaattcttaatttcaaaaagtaaactatctacctaattgtggcaattttctttaatgtttcaatcgctattattattgtgcattacctaaacaaagctaaatttagaaacaagaatattaaagtgacaccactgcaatcgcattaattaaataccaaacggtatattttgtcagtatgaaaacatcccttcctgacgtgctatcgaattatcgattgcttgtctttcggcttttttgtttatatttgcttgttggcattttcagttcccagaacaattctttttaaagttaattagcttaactaagcaatgccagtaacaagacaatctggaaagtaattgacatatccgatctgaaggcagacaaggcattaaaatggccttcctgggcgactgtgttattgtgttcgtgtcgcaggcaagtggaagtctcaatttggacatgttaagtagaataactttattgaaatatatttcagatgatattcttcgccggcggctggctgtttttcaacaaagaactcttcaagcactatgagatacgacatatatccgttcagttgattttttcatccacatttgccttatccataaccatgttcgagttgatcatattcgaaatcatcgatgttctggagtccagttcaaggtacttccattggcgactgggtctcacgttactactctttatgacgacggctgtgatacccatttacatttgctactccgtgatacacagcatttctttctgtaagtccatctcagtgcatcctaaattttaccgcaaataactttttattttcttttcagtttccgataaatgggtccgaattctgaccacattctgttggttcatctttatatatgggctttggcggattggtgacccctttcctttgctgagcgcttcccacggaatctttacgatcgaacagggcgtttcccggattagtgtgattggggtcactgtaatggccatactttctggctttggtgccgtcaattatccgtacaccagtatgtcctatttcatcaagtaatgcgttgccttaaattccatcttatctctgtttaacttttcttttttttctattgtttggcaggccagtgtctcggaatgatatcatctgttttgaaaggcgtttggctttgacagtagaaatgctgtcggccaaaaagcggaagattgccatggccatctataatcacaacaaactgaatccttccaaacccagaatttgggatatgcttgcttctgcggtccagcgcaacacgaacagtggcgaaggttgttatagatgatattctgtgatctatatgcctaattttttcccttaatttcttcagacatcaatcaattaaaacaggaagtgtatggcttggaggagctattacgctctgttttcttagaacttagttcattgaaaaacatggaagaacgccaaagatggtctcaaacattgaagggaaagtacttcaatgtactaggacatttttttagtgtttattgtgtttataagatatttatggtaggtctataattaaacaactttatagtttcgattaaaaatacgtttatttaacagtgttgcatcaacattatcttcgatagagtcggtcgcaaggatccagtcacacgaggccttgaaattgccatacactggtgcggctttaacattgactttgcgttctggaatcagcatatatcatttctgctcgtcggctgcattgtgatcacctcgattagaggtttgttgctaacgctgacaaaagtaagtgccacaatttcttatgtttaacttatgctataatatatttttgtagttcttttatcgcatttcatcgagcaagtcgagcaacatcatagtacttattttgggccagatcatgggcatgtacttctgttcctcagtattgctgatgcgcatgaacatgccagccgagtatcgtgtgatcatcaccgaggttctaggaaatctgcacttcaacttctaccatcgttggtttgacgtaatattcctggtcagcgcattgaccaccatcattgttctatatctgtcacgcaagccagttcgcgtggacgattccgatctgaactgatttaaacttgagcgcttctgagagccattagcctctcattttaggataacccgaaacgatttagaatcagttagcctaattattgcaagctttaagttatatatatccgtgtatataccagtgtgtatgtatatatttaatgcacattaagctaacttactgtataacgatgcacaaaaatcaaagtaacatttgtttgattaagtgaaataaaacaacaaactgtttgtctctgaaaagggatatttattcgaagcttaaatatccctgccttaagctttaaaaaagctttccaatgcttaatataggtctttgggttacttttaccagttgcctgttggtgtaaggttggctcaattttgagtgagttgcgctttaacatttgagcagttacaatttttacagtatttcataaccaacgttccattgtcttagaacattactcagtagttcctcgaggaatgaaaactgaaggaaaactcagggacaacttgatgggtgggaggctaggctaaagaagtgcaaatgggcaggactaggttcaatagaatggtgtaccataaacaaaaagtatttttattttaatatcaacctttcagttcaacgtgtagtacatattatgtatcgtttaaacacctgaggcaaattgagaaggtctcttagacaaaacgtaaaaaaaagggcaacataaaattgcaattacaattaaagatgggcaactttttatatgtcccggaaaacgcgacgttacagcacggaaaaataaaaataaaaattggcaactgttccgggtcccaagacggcagataaggatataaccatttgcgcactttggtggctaaaaatgccattaaaatgttgcggctgccgcagatccaactgagcgaaaagcatttcgagagtctagatgaataaatcatgaaataaaaatgattgaggggcaccaacccagagggaaaaaagaaggggttcgggttgcggatccaaaactgcagtcaaa

SEQ ID NO: 15857 - DNA, 1521 bp, DROSOPHILA
cggcttttttgtttatatttgcttgttggcattttcagttcccagaacaattctttttaaagttaattagcttaactaagcaatgccagtaacaagacaatctggaaagtaattgacatatccgatctgaaggcagacaaggcattaaaatggccttcctgggcgactgtgttattgtgttcgtgtcgcaggcaaatgatattcttcgccggcggctggctgtttttcaacaaagaactcttcaagcactatgagatacgacatatatccgttcagttgattttttcatccacatttgccttatccataaccatgttcgagttgatcatattcgaaatcatcgatgttctggagtccagttcaaggtacttccattggcgactgggtctcacgttactactctttatgacgacggctgtgatacccatttacatttgctactccgtgatacacagcatttctttcttttccgataaatgggtccgaattctgaccacattctgttggttcatctttatatatgggctttggcggattggtgacccctttcctttgctgagcgcttcccacggaatctttacgatcgaacagggcgtttcccggattagtgtgattggggtcactgtaatggccatactttctggctttggtgccgtcaattatccgtacaccagtatgtcctatttcatcaagccagtgtctcggaatgatatcatctgttttgaaaggcgtttggctttgacagtagaaatgctgtcggccaaaaagcggaagattgccatggccatctataatcacaacaaactgaatccttccaaacccagaatttgggatatgcttgcttctgcggtccagcgcaacacgaacagtggcgaagacatcaatcaattaaaacaggaagtgtatggcttggaggagctattacgctctgttttcttagaacttagttcattgaaaaacatggaagaacgccaaagatggtctcaaacattgaagggaaagtacttcaatgtactaggacatttttttagtgtttattgtgtttataagatatttatgtgttgcatcaacattatcttcgatagagtcggtcgcaaggatccagtcacacgaggccttgaaattgccatacactggtgcggctttaacattgactttgcgttctggaatcagcatatatcatttctgctcgtcggctgcattgtgatcacctcgattagaggtttgttgctaacgctgacaaaattcttttatcgcatttcatcgagcaagtcgagcaacatcatagtacttattttgggccagatcatgggcatgtacttctgttcctcagtattgctgatgcgcatgaacatgccagccgagtatcgtgtgatcatcaccgaggttctaggaaatctgcacttcaacttctaccatcgttggtttgacgtaatattcctggtcagcgcattgaccaccatcattgttctatatctgtcacgcaagccagttcgcgtggacgattccgatctgaactga

SEQ ID NO: 15858 - protein, 441 aa, DROSOPHILA
MIFFAGGWLFFNKELFKHYEIRHISVQLIFSSTFALSITMFELIIFEIIDVLESSSRYFHWRLGLTLLLFMTTAVIPIYICYSVIHSISFFSDKWVRILTTFCWFIFIYGLWRIGDPFPLLSASHGIFTIEQGVSRISVIGVTVMAILSGFGAVNYPYTSMSYFIKPVSRNDIICFERRLALTVEMLSAKKRKIAMAIYNHNKLNPSKPRIWDMLASAVQRNTNSGEDINQLKQEVYGLEELLRSVFLELSSLKNMEERQRWSQTLKGKYFNVLGHFFSVYCVYKIFMCCINIIFDRVGRKDPVTRGLEIAIHWCGFNIDFAFWNQHISFLLVGCIVITSIRGLLLTLTKFFYRISSSKSSNIIVLILGQIMGMYFCSSVLLMRMNMPAEYRVIITEVLGNLHFNFYHRWFDVIFLVSALTTIIVLYLSRKPVRVDDSDLN

SEQ ID NO: 15859 - DNA, 1905 bp, DROSOPHILA
cgttgtggccttgacggcgggctttgccggttcttcctcggaactgctatcctcgctgctggactcaaccttcttcgcgggagccgccttggccggaggtgccttcactggagcagcttttttgggtgcttcttcctccgaggaactgtcctcgctggaggattttgccttcttgccgacagccttggccggcgtggcctttgctgctggcttcttctcctcctctgaatcgctgtcctcgctggttgaagaagctgcctttttgacagccttgccgtttgttagtgcaggagctgtcgctggcttcttaggcgccgcatcagactcagagtctgagtcgctgtcttcgctggagtctccggctgtcgccttgattgctgggatctttttggggcttttggtctggtagaactgaaggatttcactcaactttgggctgcttttggcgacactggcctgcaagttagaaaaaggcagaaattcttggttatctggacgaagcacgtggcacttgcagcaagtggcaggtggacagctcgatgagccatcggcggacagcaaggccctcggattctagatcaggaggacgcagataccacatgtttcgggtgcatccaaaccgcacatattgcacttgccgctctgcactgaaacttaccgccttcgtcttctgctggaaaaccttggctaggttcttgtccttggactgcaagtactccaggacgattgcatcggctatctttagcaggtctgtcatgattaattcaactattcgtcaatattttccgtccgcaaataattactagccgcttgtcccacaaaaaagaatgcgcactcacacgtgttttctacttatcagtggtatggcagcactacgcggctgccaacggtgtggccacccctgcaccccgtttctcaacactgtcaatgcagcgggtattcttcccaagaataactcgaaaatgccaatcaattgtaatcatttatttatgccacaccgacaaagatcttgaaattagaaataacgctaggctacgttagacaaaactaaaattacaaatttattggtatatatgtctatgtatatatatatatgtatatatatatatgtatatgtatatatgtagacatatataacaataaatttcggcacacctcgtccaggtacttctgctgcagctcaaacgccttgtgctggtcctcgtagaggtgcagctcctgcaggtgctggaagttggataggtaccgcccgtcgatgggtgtggtaaggcgcaactttttcaagcccggcagcaggcgggccagcttgcggatgcttcggttcgtgggatagcaatcgacgccgtctgggtcgtagtagaagctggtcaccatgggcagctctgcaatgtgcatttcgtccagatcttttagaatggagcacagacagctgctgccgcccatttctctgatgtacggacgcatttgggttaggaagtagaccaggtcttcatgattgggcaacagtacccgccacttctccagatccagttgctcgtaggcatggctggtgcgccacttgctcagacatatgtactgcactcgccggcaagtcctcgcgaaggacacttccgacggcaggtcctgcaagcgatcgaaaatctcggccagacagtcgtcgtccaattgcagaattagggatctcggctcggaagccatggcccgggatgcgatcctcgcgacacaatctaggtacagagtctgttaaaatagccggagcgagagatagtttctgtattctggatcgtttcaagcaggtcaactcaattgaataacaaacaaaaatacattttggtgctcccccaatgtgaccagtcgtggatggtctgaatacctcacgcaaaaaacgtaggttccttacattat

SEQ ID NO: 15860 - DNA, 1791 bp, DROSOPHILA
acaaagatcttgaaattagaaataacgctaggctacgttagacaaaactaaaattacaaatttattggtatatatgtctatgtatatatatatatgtatatatatatatgtatatgtatatatgtagacatatataacaataaatttataatgtaaggaacctacgttttttgcgtgaggtattcagaccatccacgactggtcacattgggggagcaccaaaatgtatttttgtttgttattcaattgagttgacctgcttgaaacgatccagaatacagaaactatctctcgctccggctattttaacagactctgtacctagattgtgtcgcgaggatcgcatcccgggccatggcttccgagccgagatccctaattctgcaattggacgacgactgtctggccgagattttcgatcgcttgcaggacctgccgtcggaagtgtccttcgcgaggacttgccggcgagtgcagtacatatgtctgagcaagtggcgcaccagccatgcctacgagcaactggatctggagaagtggcgggtactgttgcccaatcatgaagacctggtctacttcctaacccaaatgcgtccgtacatcagagaaatgggcggcagcagctgtctgtgctccattctaaaagatctggacgaaatgcacattgcagagctgcccatggtgaccagcttctactacgacccagacggcgtcgattgctatcccacgaaccgaagcatccgcaagctggcccgcctgctgccgggcttgaaaaagttgcgccttaccacacccatcgacgggcggtacctatccaacttccagcacctgcaggagctgcacctctacgaggaccagcacaaggcgtttgagctgcagcagaagtacctggacgaggtgtgccgcacgctgcacgatcttcgggtcctggacattaggacgtacgatatgatcagtaaacttcagctgggaaactgcctgcagagctttaagaacctcactgatcttaagctcaatctggccaccttgaaacccattctacccgccgttctggagctgccctccctcaggaaactggtggtgctgctggacaacgagtggcatatccccccgctggtcagtccggatagctatgaccacaagatccgcgaggtcagcgagttctacgagatcatggctttcaaggccaaggacatcgtcggctttgccgtggacgggtactatatgccccttgaaccgggctgggatgagaagctgcccatctggacgcatcgcaggctgaagcgcctggccatttgcagctggactcattcggcagactacctaaagcgctatacctgtatgacagagctgcagctgctctgcgtgcgcaactggaatgacctaagcgacgaaatcctcttagaattcgtggaactctgtccacgattggaacacctcgacgtgtcctactgccgaaatctgacgccaacatttttgccacgggccttgagtattcttaagcggcgggagccgttcaagcagaagacgggagttggacgttcgccacctctgaagctctactacgacctaagtggctttgaggactttgtggatagagcgaacctaaagagctctttggaatatagaggatatattgtcttcaccgccgactttccagtcgactcggaacgcggtctgagctttgtggaccgcggataccaatttgaatttcactgacctcaaaatatgtaaatatacaagcgtagattcatacaataatttattattaaaatttatgttgcacaaagt

SEQ ID NO: 15861 - protein, 454 aa, DROSOPHILA
MASEPRSLILQLDDDCLAEIFDRLQDLPSEVSFARTCRRVQYICLSKWRTSHAYEQLDLEKWRVLLPNHEDLVYFLTQMRPYIREMGGSSCLCSILKDLDEMHIAELPMVTSFYYDPDGVDCYPTNRSIRKLARLLPGLKKLRLTTPIDGRYLSNFQHLQELHLYEDQHKAFELQQKYLDEVCRTLHDLRVLDIRTYDMISKLQLGNCLQSFKNLTDLKLNLATLKPILPAVLELPSLRKLVVLLDNEWHIPPLVSPDSYDHKIREVSEFYEIMAFKAKDIVGFAVDGYYMPLEPGWDEKLPIWTHRRLKRLAICSWTHSADYLKRYTCMTELQLLCVRNWNDLSDEILLEFVELCPRLEHLDVSYCRNLTPTFLPRALSILKRREPFKQKTGVGRSPPLKLYYDLSGFEDFVDRANLKSSLEYRGYIVFTADFPVDSERGLSFVDRGYQFEFH

SEQ ID NO: 15862 - DNA, 4400 bp, DROSOPHILA
ggaacacgcaggggtacggtagtgaagcgcggagctgttccttccacgggcttaaggtccggtaggagttcgctctcatctaagagaatccgagctgcagcattccggcggcttatgctgacagtagcggctccacctcgcggccgatctgcgtccgggcaggattgcagttcgatgttcgtacggatggttccttctgtcggacggcagcgatccacgcaagactccgtcacgctgccggtgagttccttccactggaccacgtaacgatagtcgtacggcgccagcacgcgctccagttgggctaggtttttgcgtattcggtctcgctccacttccggttcggcaatcctccgcgggcgcaattcctccagttcgtggtcccactctcgtacgacaatctcattcggatggaagaagtgcacgaatccaacacgaggggctgcatcgccgtagggaccacgggaggagcaccatacgtagtggactccgggtggaatcatcttgacgcctcggaaatccggaccaatggtgtaggcacaaagatcaatgccgaattccgtgccctcgggtacaccggcgatgaccagcactccgccatcagccaggaggcgtagggctagctgcggatccattttcatgctggagttgtccttgttcattgtgaaatattgttcgcttgcaattattaggaaaaagaaaacaattgcaagtgcgggcctttcagcaagttgccagatgtgacggctatttcgataagttctttcatgtgagcagtctggcaacactagacaaacaattctttcaagcggcaaattcaatttatatatacttttttttaagtaaatcttttgtttgatataattacattgtatttagactttgttgatttttgttacagtgtatattctgcatttacttaaaattcttgctgttcttcactttattgtgtaagtggaccatgactttatatctaaactatatttatacgtagtagtaattagtattgtaagctgcgtttagtgccgatatcgtcgagtatttggcgcagctcctcatcctcgaagcgaccctctagtgaaggaatcagcgccttggcctcctcgggcgcctccggacacaaattacccagtgccgccagttcgaatttgtgcagctttttctgcatcagcaagctgaatttgaaataattgaatattactactcgtacgtgctttgttcggttttgctacattaccttcgcgcagacattatggtctccttgtttttgaactttcgaaaactatccgtgtaggcgtacgtcttcatgaagacctcggagaactcttgctcctcgtcggcggattcgttttgtcgctttcggtgatcgagaagcatgtgcacctccgatatcagcagcgtctcggcattttcgaactctgaaacaaagagaaacgaaagggtttttttttcttgaattagttacttgacgacattcaggaaatttacaagtgaaacattggagaaaaaattagccctagccataggacggtggtctgctgatatggccatgttccagcagaaaatcgtagatctgacgcgttttgttcacgtcaattttgatgagacgtcgcgcatcggccagtcgtagatatccgagctttgcttgctccgtaacgagttgattcttgtagtccaaatacgactgcggaaccagacgagccacactgcacaactttcgctcgccatcatccagtttggagtaaccaggcagatctgggatcaaagaaaaattatattcagttggtgtcaggcaatgagtaaagtgtttcccacctccaatctcaatgggactggcctttcgacgcgtgttcatcacatataactttgagttaatggccaggggaccaggatcaccgctcctgttgctctcgtaatgctgcaccaattgctgccagtcgaaagcatctgtttgcttcagcctgctgtaatctcgctgagcctgctgacgttctttgctcaagcgggcatataatttggctccggaaagagttcgaacgccgtgctcccgcagatcgtatagcttgtgcagctggctatgcagctcccgataataacgcagagactccaacagcatatcgaacttaatggggtcaggacagatctgcatgaagcccaagaaacgcatgcaactcgcatcgctgccaaaggcgtgcacgtacttggaaatccagctgacggtgcgattgggcattatgagaccgtgttgcctcattatcttgtaacgacgctggcgctctctgtgagtaaatatgcatattagattttttttagtagctttctgttataagatcatacctgaggcgattgttgtatgcccgaactagtccgagttgcaattcctctgtcacttcgcgctcaaactcactctcagacgcctcgttgtcgtcatccctgcccctatgatccaccataatagatagcagactctctgctgaggtgtcgtacggagtatcgaagtctcctcttgcacagcggtaacctgcgcttagtctgaactgcatggaggcgatgtcgtcatgacgtggtggatccaagctgcgcattttgaagacatacggcattcgctcgggcacatagctgtccctcgcatgcttcagattaaggagccgctcgaatatcccgccaaagtagcaatcgtggtagtgacgacgcacttctgcgggttcgtggcgctggtccagagcctgggagaccgcctcccagttgccatagccgtgggtgcgaagtgttttcagcagtatgcgctcgtcccgtgccgtccagtgtggctcatcggcgaaaacctgtatgttgtcgcggactatgatgtaagcgtggttattgcggtgagaaaaggcctcctttccacgtgagaaacattgcaggcagagcagggtgtcgaggcactcggagcacttaatgtacggctctgtgagactgcagcgacatgtggcacaccgattggcatcctttgtagccgatggaacactgctattctggtcccgcgtcttttcctccatctcctccaagtacctgtgcaacgtgtgcggattatacaaaaccatggagttcctggtgtgttcattctgatgtgcatggatgaaccgcttaacctgtggccccagtggctcaactgcaaagaggcaattcagtgtggtaaaaatgtggaggagtgccacttttggggcactcgaagccaaaggtttcagccagtttcacttgtaagttgcatttcggttggtgtagggcgttggttacctttgggaaactgcaggtcggcggcgtcctcatccaccatatccacggggttcataaaagacatagtgagctaagaactgctcagtttgttaaagtttatattaagaaattctaatttgcacaataaaatgtcgctgtttttagtgatgagaaaggcagggctataactggcgaagaagctatcgataggtgggtcgcatcgtgcgtagatacgttggtcacactagcaagcatgttgagtttatcattccgggtgttttgattttgttcggaattcttggtttttttccaagagagttatgtccctggtgccagaagcctctacctcgagagcgcccaagtactgctacttcttcaagaccctgctggtggaggaactggagctggaaacttcctaccacaacctgcactacggtcagtgcgcattaattggacgtctggcgttcaaggcgaatcagtaccgcctagaaaacgtgcgcgttaagtgtttgccaaagtaagtttttctatattacctatccatccggtccttaccaatgatgctgcatctttcaggaagtactccttgggcgagggcaccgtatccttgcttattcttggccttacccatgacaaagtcgtcgaaaatcgcgtgagtaccggccgctactgcattgtgcgtggtgaagtggtgctacataatgtgcagcatcccaaaggtgccaaactgaccgccggcggtgtctacgacaagatcaatagtctgtccaacgatccgttggcccaaaaacagtatctcagcgcgctacttgccacctacagaccggccatcgacttatggtacatccaggtcatcgacagagccgaggacttgctgactcgcaggctggagatgagaagtctgatcgagaaatgaacacacaccacctgaccacctcgcgaaccaatccgcagttctatatattcagtcagctctttggtaacgatttcgactggaataattgcaattgggggggcattcaaaacgttacctggaaagaattctggcagcgtgaggggcatgagctgctcgagcaaaagtggcacaagcggtttcccgaatacaaagatcttatcgaggtggtttcgtcggaggagcaagg

SEQ ID NO: 15863 - DNA, 1995 bp, DROSOPHILA
tgcaaattagaatttcttaatataaactttaacaaactgagcagttcttagctcactatgtcttttatgaaccccgtggatatggtggatgaggacgccgccgacctgcagtttcccaaagttgagccactggggccacaggttaagcggttcatccatgcacatcagaatgaacacaccaggaactccatggttttgtataatccgcacacgttgcacaggtacttggaggagatggaggaaaagacgcgggaccagaatagcagtgttccatcggctacaaaggatgccaatcggtgtgccacatgtcgctgcagtctcacagagccgtacattaagtgctccgagtgcctcgacaccctgctctgcctgcaatgtttctcacgtggaaaggaggccttttctcaccgcaataaccacgcttacatcatagtccgcgacaacatacaggttttcgccgatgagccacactggacggcacgggacgagcgcatactgctgaaaacacttcgcacccacggctatggcaactgggaggcggtctcccaggctctggaccagcgccacgaacccgcagaagtgcgtcgtcactaccacgattgctactttggcgggatattcgagcggctccttaatctgaagcatgcgagggacagctatgtgcccgagcgaatgccgtatgtcttcaaaatgcgcagcttggatccaccacgtcatgacgacatcgcctccatgcagttcagactaagcgcaggttaccgctgtgcaagaggagacttcgatactccgtacgacacctcagcagagagtctgctatctattatggtggatcataggggcagggatgacgacaacgaggcgtctgagagtgagtttgagcgcgaagtgacagaggaattgcaactcggactagttcgggcatacaacaatcgcctcagagagcgccagcgtcgttacaagataatgaggcaacacggtctcataatgcccaatcgcaccgtcagctggatttccaagtacgtgcacgcctttggcagcgatgcgagttgcatgcgtttcttgggcttcatgcagatctgtcctgaccccattaagttcgatatgctgttggagtctctgcgttattatcgggagctgcatagccagctgcacaagctatacgatctgcgggagcacggcgttcgaactctttccggagccaaattatatgcccgcttgagcaaagaacgtcagcaggctcagcgagattacagcaggctgaagcaaacagatgctttcgactggcagcaattggtgcagcattacgagagcaacaggagcggtgatcctggtcccctggccattaactcaaagttatatgtgatgaacacgcgtcgaaaggccagtcccattgagattggaggtgggaaacactttactcattgcctgacaccaactgaatataatttttctttgatcccagatctgcctggttactccaaactggatgatggcgagcgaaagttgtgcagtgtggctcgtctggttccgcagtcgtatttggactacaagaatcaactcgttacggagcaagcaaagctcggatatctacgactggccgatgcgcgacgtctcatcaaaattgacgtgaacaaaacgcagttcgaaaatgccgagacgctgctgatatcggaggtgcacatgcttctcgatcaccgaaagcgacaaaacgaatccgccgacgaggagcaagagttctccgaggtcttcatgaagacgtacgcctacacggatagttttcgaaagttcaaaaacaaggagaccataatgtctgcgcgaagcttgctgatgcagaaaaagctgcacaaattcgaactggcggcactgggtaatttgtgtccggaggcgcccgaggaggccaaggcgctgattccttcactagagggtcgcttcgaggatgaggagctgcgccaaatactcgacgatatcggcactaaacgcagcttacaatactaa

SEQ ID NO: 15864 - protein, 645 aa, DROSOPHILA
MSFMNPVDMVDEDAADLQFPKVEPLGPQVKRFIHAHQNEHTRNSMVLYNPHTLHRYLEEMEEKTRDQNSSVPSATKDANRCATCRCSLTEPYIKCSECLDTLLCLQCFSRGKEAFSHRNNHAYIIVRDNIQVFADEPHWTARDERILLKTLRTHGYGNWEAVSQALDQRHEPAEVRRHYHDCYFGGIFERLLNLKHARDSYVPERMPYVFKMRSLDPPRHDDIASMQFRLSAGYRCARGDFDTPYDTSAESLLSIMVDHRGRDDDNEASESEFEREVTEELQLGLVRAYNNRLRERQRRYKIMRQHGLIMPNRTVSWISKYVHAFGSDASCMRFLGFMQICPDPIKFDMLLESLRYYRELHSQLHKLYDLREHGVRTLSGAKLYARLSKERQQAQRDYSRLKQTDAFDWQQLVQHYESNRSGDPGPLAINSKLYVMNTRRKASPIEIGGGKHFTHCLTPTEYNFSLIPDLPGYSKLDDGERKLCSVARLVPQSYLDYKNQLVTEQAKLGYLRLADARRLIKIDVNKTQFENAETLLISEVHMLLDHRKRQNESADEEQEFSEVFMKTYAYTDSFRKFKNKETIMSARSLLMQKKLHKFELAALGNLCPEAPEEAKALIPSLEGRFEDEELRQILDDIGTKRSLQY

SEQ ID NO: 15865 - DNA, 5349 bp, DROSOPHILA
cgaatgatctaagactacttcctgtgactttctactcaacgtgtagcaccaattttgggatttctcgcagtgtacgacttaccactggtggttgacgcaaatgccgccaacgtgaacatggccaagagtgcgccaaacagctgtcgctggctcttggtgccgccaaagctgaggcccagactggggctgtggttatggctgcatctggcgatctggcttggagtctggccaagtccgtgggcctgtgtttgggtggcgtttggggcggggggctgcagatgcagatgcagatgctgtttgtggtgcattttcgctggctgtctgctgcacttttcctattagacgggggggaaaatcaagctgaccgcacagtggcagcgagctggaaagggttgggggtcaattgggggggttacatcgtttaaagttgacccgaagcgaaatgatttatttgacttgtaagcgcgatcgtttggctaattgataaccgcacttcatcggagattgatgggtgaaagatcaattagttttggatgctgtgatatatgctcgcatgcatatacacatatatatgtacatatgtacatatatgttttaatggccccaatcagtggcgccgtgattcattcatctatgggcttggtcatgtcgctgctcgccactgtgccacaccaaaccggagcaaaccgagtgcacatggtgtgctccatgtgcatatatagatatgtatgtacatatgtacatatatatatgtacatacccagtatatatcatgcaaaagtccctgcccagcagtgcagtgcgttggttgctggatttttccacttttgaaaattatacggtggctgcttttattatttctctcgccttttttttttgcaattgatggcatccgataggcaggagcctgccagcaattcgctggaggccaggaaaatgcacctgcactgggagaaatcagcagaacatatgaacaaaaggaaatcagtaaatcagaggtgtatttaaaatgcaaaatagtatggtgtatggtgttgtataagtttgtaccattagtttgcatgagtgatttgattctgagtttatcccaggactagtaccacacttttctgccagtgcaggattggtgagagtgggtggggcggttgaggtcgcattgctgcaatgctgaatgagattggctgtggtctcggcttttgcctctgaccattccagcggatcgtttacatgtgcattaattcctaacgccgcttaattttctccgcgcttaatggctcctctggatgccgatgcctccgattcagattcggactcgcatccagccagagaagcatccgagtccattaagctgagaatgcgtctgctcgactgactgactggctggctggctggatgttgaaatttccatctttatggccggcagcagcaaattggaataatgaacgtgggttcaattatcgcagccaaaccatcgtgtggcagcctcaaagagcgctaatagattttctactgctgttgggtatgtctatttacgttcgtatatctttaactaagttgagtgcttcctccggaggcggctctcacagctttctttgcaaacaaaaaaaaaaaaaaaaataagaaaaatggacaaatcaacccaaactaaaccagcagttccacatccgaccaaagacaacagaaatgttcggcgccggaggcaattagtgtggaaatttcacttgcagtttttagcacagattaagcttacgatttctggaggggattagcatgaacaattatagatggaggtcgctgatagtccgtatgaacgaagcgagtgtattagctgtgctcaaaccacagccaaaacataaatgccattgtgtcgttttacttggaatcgagatttgaagacgggtaacatttgccgttgccgttagtaaaaagggaaagaattattcaagttaatggctggttacttgagtcggtcatgcgatcactccagaatcagagactggtctcggatgcgggggagtgtcggcgggtggcggcatggacacagtgggtcacaactgcgcaaaatgccctatgatcgtgcggctaatctgacatttgtatgcccacagttgactcttccgcatgccaccgctaaagagctgtggaaaatgcgaagggaaagtttcatttggcggtctcgaaacagagttaccctgggaaaattcgatggacaaccggtcattacgtgcggggaagtagtaattattactaagctttgtttaataagttcatataacagaggaggaggaactactgtcttgctttaaatgtttagaattaagtttctagatagaaaccaattaaattctaaaatcatttccatccacaggcgctgtgacagactcacccatcaagattatccggctgccggcgcaggcgccagttatccgctatcgcagtgcagatgcggcgcccaactcattgctgatcaactatcgtcaggatgcgcgaccggagctgtcgtccacattgatgcaggcacccggagcggcggcagctgccttggagtcgctgctgcgcgaggagacggagcaacagcagctgtcacagatgggcagacggaatagggctagtaacaccggcaccggcaactgtcctcgatcctgtccaccgagcatcaccgtgggagctgagcccgtgtgcggcagcgatggtctgatctatgcgaatatctgcgagctgcgcaagaagacttgctcccgcagtggagtgtcgctgatcaaggacgtgcgggatggctgcgagaggtcgaagggttcggactgcaagcaccgctgcagcacggagaaggatccagtgtgtggtacagacggaaggacctatctgaatcgctgcatgctgagggtgcaatcgtgtcgcgtgggattggctgcagtgaagctatcgcatgtgggtccctgcagcaacacgagtgccgtgcgtgagtcctgtccggttgactgcaacagtgcgccgaaggatggaccagtttgctcatcggatggcaatgtatacaactccacgtgcgagatgaagctgaagacgtgtggacagggtgtggtgaaaaccagccggaagcactgtcagtccacacgaatgtgcagggaatcctgctggcgtgtggcgaggcccacttgcggatcagatggcagactgtatgccagtccgtgcaagatgcgctcttccaattgcggcaagcacgtctttgaggttcccttatcctactgcatgtcgcaggagaggcacggagcctccgatgcctgtcccacggagtgtcccaaatcggatacggattcctcgtcgcagtacgtgtgcggcagtgatggcaacatatactcttcgctgtgtgaactcaaaatgctcaattgcgggtgagtttggatgagataaaaatggaatataaccagactaaaattttatctttcagtccacagcgcaagtccattcaaaaagtgagcatggacaagtgcaagaatcgactgacccgctgcaaacagctgcctccttgcaaggacttcaatagcttgttcggttccatcttcagctcgaagcgaaatgacaagctctgcggcacggacgccaagacttataacaatgagtgcgaactggcccacgccacctgcctgtgagtatccatgataggatcatccataggacatggatctagctcttcaacttcttttcagacgcggcgtgaatctggcccacattggtccctgcacggatctcaattcgcccaccaaggattgcggggatgcctgtactcgggcggatctggaacagcagccagtgtgcggctcggatggcaacaccttcgcctccatgtgcgagttcaagcggcgcacttgcgatctgcgtgtggtgcccgtttcgctaaagaattgcgctttaaccgccgactgcgaatcggattgtgatgcccagccgccaagtttcgtctgcggatcggacaacaacttgtacaagtccgagtgccacatgcgcaaggagaattgtggcaagcatgttttcgtggtgccactgaagcgctgccttgccgcctttcagcttaaaggatgtgcccgcatctgtcccagggaattcgagcctgtttgcggcagcgacaataaaacgtatctgaacgactgcttcctggagatcgaaaactgcagggcgaaccagacggtgaacgtcaactactacggcgcctgtggccgccccgaagcaccatccactaacttcctttactaggacgtatgtatgcgtggcgtcttcatttcacttggcatttaatatttgtaggctatagtcttgtattgtactttttttaaaacgatatttattgagtttgaattaaagccccccaacgaacttacaaggaatgcacttaaagcctggcctgcatttaacatctaagccgaatcatcaaagagcttgctcagcatagcgttgatctcgtgctgtctgtacttgacgtatttgtcgggattcttactaaaatgcactccagagtaactaaaaatgatacaagatggttaggtataagctgataaaccctatatacgcttacatttcgtagaatctattgtagatgggcagtatgtgctccacattatcacgtttgatgccttctcgcaggatcacatcgggtatggagatgccccgctggattttgcatgcctcctcaaagtccttattgaagttctggaaattatagaggatgtttttttttaaatcaagaaagtttagcttattttaaaaataaaaacctacagaaaatctctctttgagcacactgcgatccttatccttgaccttgccggccactggtttgggcagttcatccaaggaatagatgccgaccagcatcttggaccaggtcttttgatagctagccttcagttcacgtatcatctccatgtagctatgttcgcactcaggctcagccaaggtgaccaaatcaataagattggagcgttgcagcgacttgaggatatagtgaatgttatttagtcggaagaggtgcttggtggcctggtcattgtactgctcgcacttgttcattatggaaagattcagttcggccaaagctttctctgcaaaatatagatagtggtttaaaaatgttcgcacaattgatcttgttgccactcacttatgtaaatcgccaagagcgccttattgcgttcctcgactggcagcgccttcttcatcaaaatggtgtccaattgcgtggagtacaggacatcctgtgccaaaatggaaccaataacatcgaaatgatcgtacaagtgctcaataaaccagatcgtattggaggtcagctcgtgcacggtggcatcctttggaaca

SEQ ID NO: 15866 - DNA, 2102 bp, DROSOPHILA
ccactggtggttgacgcaaatgccgccaacgtgaacatggccaagagtgcgccaaacagctgtcgctggctcttggtgccgccaaagctgaggcccagactggggctgtggttatggctgcatctggcgatctggcttggagtctggccaagtccgtgggcctgtgtttgggtggcgtttggggcggggggctgcagatgcagatgcagatgctgtttgtggtgcattttcgctggctgcgctgtgacagactcacccatcaagattatccggctgccggcgcaggcgccagttatccgctatcgcagtgcagatgcggcgcccaactcattgctgatcaactatcgtcaggatgcgcgaccggagctgtcgtccacattgatgcaggcacccggagcggcggcagctgccttggagtcgctgctgcgcgaggagacggagcaacagcagctgtcacagatgggcagacggaatagggctagtaacaccggcaccggcaactgtcctcgatcctgtccaccgagcatcaccgtgggagctgagcccgtgtgcggcagcgatggtctgatctatgcgaatatctgcgagctgcgcaagaagacttgctcccgcagtggagtgtcgctgatcaaggacgtgcgggatggctgcgagaggtcgaagggttcggactgcaagcaccgctgcagcacggagaaggatccagtgtgtggtacagacggaaggacctatctgaatcgctgcatgctgagggtgcaatcgtgtcgcgtgggattggctgcagtgaagctatcgcatgtgggtccctgcagcaacacgagtgccgtgcgtgagtcctgtccggttgactgcaacagtgcgccgaaggatggaccagtttgctcatcggatggcaatgtatacaactccacgtgcgagatgaagctgaagacgtgtggacagggtgtggtgaaaaccagccggaagcactgtcagtccacacgaatgtgcagggaatcctgctggcgtgtggcgaggcccacttgcggatcagatggcagactgtatgccagtccgtgcaagatgcgctcttccaattgcggcaagcacgtctttgaggttcccttatcctactgcatgtcgcaggagaggcacggagcctccgatgcctgtcccacggagtgtcccaaatcggatacggattcctcgtcgcagtacgtgtgcggcagtgatggcaacatatactcttcgctgtgtgaactcaaaatgctcaattgcggtccacagcgcaagtccattcaaaaagtgagcatggacaagtgcaagaatcgactgacccgctgcaaacagctgcctccttgcaaggacttcaatagcttgttcggttccatcttcagctcgaagcgaaatgacaagctctgcggcacggacgccaagacttataacaatgagtgcgaactggcccacgccacctgcctacgcggcgtgaatctggcccacattggtccctgcacggatctcaattcgcccaccaaggattgcggggatgcctgtactcgggcggatctggaacagcagccagtgtgcggctcggatggcaacaccttcgcctccatgtgcgagttcaagcggcgcacttgcgatctgcgtgtggtgcccgtttcgctaaagaattgcgctttaaccgccgactgcgaatcggattgtgatgcccagccgccaagtttcgtctgcggatcggacaacaacttgtacaagtccgagtgccacatgcgcaaggagaattgtggcaagcatgttttcgtggtgccactgaagcgctgccttgccgcctttcagcttaaaggatgtgcccgcatctgtcccagggaattcgagcctgtttgcggcagcgacaataaaacgtatctgaacgactgcttcctggagatcgaaaactgcagggcgaaccagacggtgaacgtcaactactacggcgcctgtggccgccccgaagcaccatccactaacttcctttactaggacgtatgtatgcgtggcgtcttcatttcacttggcatttaatatttgtaggctatagtcttgtattgtactttttttaaaacgatatttattgagtttga

SEQ ID NO: 15867 - protein, 654 aa, DROSOPHILA
MAKSAPNSCRWLLVPPKLRPRLGLWLWLHLAIWLGVWPSPWACVWVAFGAGGCRCRCRCCLWCIFAGCAVTDSPIKIIRLPAQAPVIRYRSADAAPNSLLINYRQDARPELSSTLMQAPGAAAAALESLLREETEQQQLSQMGRRNRASNTGTGNCPRSCPPSITVGAEPVCGSDGLIYANICELRKKTCSRSGVSLIKDVRDGCERSKGSDCKHRCSTEKDPVCGTDGRTYLNRCMLRVQSCRVGLAAVKLSHVGPCSNTSAVRESCPVDCNSAPKDGPVCSSDGNVYNSTCEMKLKTCGQGVVKTSRKHCQSTRMCRESCWRVARPTCGSDGRLYASPCKMRSSNCGKHVFEVPLSYCMSQERHGASDACPTECPKSDTDSSSQYVCGSDGNIYSSLCELKMLNCGPQRKSIQKVSMDKCKNRLTRCKQLPPCKDFNSLFGSIFSSKRNDKLCGTDAKTYNNECELAHATCLRGVNLAHIGPCTDLNSPTKDCGDACTRADLEQQPVCGSDGNTFASMCEFKRRTCDLRVVPVSLKNCALTADCESDCDAQPPSFVCGSDNNLYKSECHMRKENCGKHVFVVPLKRCLAAFQLKGCARICPREFEPVCGSDNKTYLNDCFLEIENCRANQTVNVNYYGACGRPEAPSTNFLY

SEQ ID NO: 15868 - DNA, 3875 bp, DROSOPHILA
gcaggtgagttcctcctggcttccagttctggcattattgggtgctggtcgtctctctggattcctggtattgccgcctaagggatttggtaagttcgagtcgaagaagggtggattgcacaggcaaaattgatactgcaactgttgctgatcctgctcaaaatagctcttaaagatgttcgtgttgtctggttgagcatagacttctataaggctttccatgtgatttctctttacattctccttggcgtattctatgttttgcggtttcgattccaaagccaacatgtgccaaccatttttcttggccccaaggagtgaataaatgcaggaggagccgcagcctgtgaggaattcacttagtaaatcgttgtgacatactaaccatagcttacctatatctataccacgtatgttctgcaaatttagaggttccattagatcctccaaccacaaaatgtaattcaaacgtagtgctaatgtgggcaccaaacttccgggtgcaaaatccacatctaaatcgtaatattccttcaacagcattttggtcaactcacgaagggtcttttcattgcgaaagttcacagaaaccttgccattgagctcctaaattaagcaatattttattaaaatcaatgtctaagcaaaacaaatagtttttacttaccaactggcactgctgccgaaaatctttgtattttatagccattttggtatagtcgggctgcgtgcgtaacacattacgtggatgcatgccgactatcttttggtttcccttagtttttaccatatttcgttttcaaaaaatcgcaattgttaatgaaataaaatgccgccgaaattcgaacagctgtttattgcagcagtccggcaactccagcgagcaagagatgacaccagctcctctaattggtagttttatttggcccttctgtgctatcagtgactggtcacacagccacttgttgattcaacttttgtaaacaaaaaagtaaacttaatgtcttggcctggcaaactgctagttacctacgaaaactttacaaccgatttgccagtccttagcattgacaagaagccatatggatgccctgcttcctgccactgcaagtgcaagtgctgtcgaggattcagggagaagtacgtggcattcaatggggaaggggagaccatatttggaacggatttctccagcgagttatgcgaagacgttcagaaaattatgcgtttccgaagctcggatatgctgctattactgcgcacagcacaattacgcgataatttctggaccaatgagtattttaaggctgatttacaggacgattttcgagcaatattcgatgccttcgaagagaagaaccgcaaagtacaattggaaaagttagctgccattctggatacagtgagcagcggctacagacgttcagttagccaactggcaggccaggaagcacatggagctctgcgtcccaaaattgcagctttattcctaccaggactgcgctgcgattgctacaaatgtgagaatctaccgtggaaaaagctgcaggacgtggaggatcatcaaaagacgcatcgctattcagacaactttcactgccagatatgctacaggcgattctatctgcagcactcgttaacctcacacataatcagaaaatccacaagctcgcgggaacttcacgaaaacaagagatataaacgactactggagaatcagaagtcacaagaggagaaggaactggagctatcacttaacaaggtagaggatatcttggtgccagttgccgaggacctgcaatcgtactttaaggatgaatcgaaacatccaattcaaaaacgaaagacttctagcctcagcaaatgtccaagttgcgctcagaactatggcttctcctttagccaccagctgcatatggttaagcatagacgggaaaggctatatacgaacttcccttttcactgttccttttgcaacaggtcgtttctcacccggaaattcctacgtaagcaccagcagagggttagaacattcagtactctgctatatcgcccctttaagtgtcctcactgcacatggagattccaactgaagtctgccctcgattcacatgtactgcgaatccatgaacgcagaaaaccctgcctaatatgcaaactaccaacctctcgtctatgctgctctgctcatacctctaaggaatgcaatagagccatgcaaaaatatcgggataaaatgcgtccgttgagagaacctccaaagggaggctgcaggaagcaacccactccagtctgcaaaatctgcaataggaagttcacgagaaaatttttccttgaggaacacatgaacaaagctcatttgaacaagaggaatttcacctgcgaaatctgcggagcgaatttctacagtcagggcaccatgcaaacccaccgaaaagcagtgcatcttttagttcacaccgttcagtgtgaagtttgcgatctgaccattaaatcgaagggaaattaccgcaggcactgcaaatctcaaagccataaggataaccttgtaaagttcgggaaaaataatgacaaaacaaaagatagcaatcgccgcaaaggggcaagaaccaccgatgaaaagcttgatattgaagcaagttcgtcaacaaacacatgtatgacatcagcaaataaaagtacacataactacaagaaaatgggcataaaaactaagcagacccacttgaaaacaccctgcaggtcgaaaaaacgtgtcaaaattaaaatctgtgaaacctgcggaaattcaattgtgggaagtatgcaaagacattacagatccatgaaacataaactgaacttgatggcacaagcaaaaatgttcaaaaaataatataattttcaatataaggtttaacttcataaaaataaaaaaaaaatatttttcttatattttttgggatgaataattagaacatcaaatcaagatcaaataatttattgtaagcactgatgttaatataaatatatatttattcctgactaggaataccagtttttagaagatgggctaatactcaattttgttgtaaattaattatgagtaatttataatttttgctaaacttacaaattacaacttttttgtttgtaagttcaaaagttttggcgtaatttaagttaccgaaatatactaagcccggaaaaaaggtattatttgagtacggttcattttatagtttaccccacaacggtcactctaaaacacttttcggcaaaacaaaacacatttttacagaaaacacgctataattcgaataatattgattagaaatgtcggaaactagctccaaggataatgtcaaaacggcaatgacctatatttgtggaggtaagttggccagagaatatacttcgatagaaaaacgattttttaattacgggcacatggctgccgaaattttttgaaatgcagttcaataataatttaaacattttgtagaatgccatcatgaaaacgaaatgcgccccagggatccgattcgttgtcgcgagtgtggatatcgtatcatgtacaaaaagcgcaccaagcgtcgtaagtaatccctcatatttacattattccccagaagtctccaacggctctcaaactgtactgatgaaatctttcgttttatttgcagttgttgtctttgatgcccgttaaaaccccctaaaaacctatagacaaccgtctaaacaatatatttaagcagttagattgtaaaaaataaagctcttgctttaataaatgtcataaccccaagaacaacagcgttttatcatttaatgtagtaaaggtacataaaaaagctatttgaatgaataacattatgtttattagaggattttaa

SEQ ID NO: 15869 - DNA, 1819 bp, DROSOPHILA
atgtcttggcctggcaaactgctagttacctacgaaaactttacaaccgatttgccagtccttagcattgacaagaagccatatggatgccctgcttcctgccactgcaagtgcaagtgctgtcgaggattcagggagaagtacgtggcattcaatggggaaggggagaccatatttggaacggatttctccagcgagttatgcgaagacgttcagaaaattatgcgtttccgaagctcggatatgctgctattactgcgcacagcacaattacgcgataatttctggaccaatgagtattttaaggctgatttacaggacgattttcgagcaatattcgatgccttcgaagagaagaaccgcaaagtacaattggaaaagttagctgccattctggatacagtgagcagcggctacagacgttcagttagccaactggcaggccaggaagcacatggagctctgcgtcccaaaattgcagctttattcctaccaggactgcgctgcgattgctacaaatgtgagaatctaccgtggaaaaagctgcaggacgtggaggatcatcaaaagacgcatcgctattcagacaactttcactgccagatatgctacaggcgattctatctgcagcactcgttaacctcacacataatcagaaaatccacaagctcgcgggaacttcacgaaaacaagagatataaacgactactggagaatcagaagtcacaagaggagaaggaactggagctatcacttaacaaggtagaggatatcttggtgccagttgccgaggacctgcaatcgtactttaaggatgaatcgaaacatccaattcaaaaacgaaagacttctagcctcagcaaatgtccaagttgcgctcagaactatggcttctcctttagccaccagctgcatatggttaagcatagacgggaaaggctatatacgaacttcccttttcactgttccttttgcaacaggtcgtttctcacccggaaattcctactgtcctcactgcacatggagattccaactgaagtctgccctcgattcacatgtactgcgaatccatgaacgcagaaaaccctgcctaatatgcaaactaccaacctctcgtctatgctgctctgctcatacctctaaggaatgcaatagagccatgcaaaaatatcgggataaaatgcgtccgttgagagaacctccaaagggaggctgcaggaagcaacccactccagtctgcaaaatctgcaataggaagttcacgagaaaatttttccttgaggaacacatgaacaaagctcatttgaacaagaggaatttcacctgcgaaatctgcggagcgaatttctacagtcagggcaccatgcaaacccaccgaaaagcagtgcatcttttagttcacaccgttcagtgtgaagtttgcgatctgaccattaaatcgaagggaaattaccgcaggcactgcaaatctcaaagccataaggataaccttgtaaagttcgggaaaaataatgacaaaacaaaagatagcaatcgccgcaaaggggcaagaaccaccgatgaaaagcttgatattgaagcaagttcgtcaacaaacacatgtatgacatcagcaaataaaagtacacataactacaagaaaatgggcataaaaactaagcagacccacttgaaaacaccctgcaggtcgaaaaaacgtgtcaaaattaaaatctgtgaaacctgcggaaattcaattgtgggaagtatgcaaagacattacagatccatgaaacataaactgaacttgatggcacaagcaaaaatgttcaaaaaataa

SEQ ID NO: 15870 - protein, 357 aa, DROSOPHILA
MSWPGKLLVTYENFTTDLPVLSIDKKPYGCPASCHCKCKCCRGFREKYVAFNGEGETIFGTDFSSELCEDVQKIMRFRSSDMLLLLRTAQLRDNFWTNEYFKADLQDDFRAIFDAFEEKNRKVQLEKLAAILDTVSSGYRRSVSQLAGQEAHGALRPKIAALFLPGLRCDCYKCENLPWKKLQDVEDHQKTHRYSDNFHCQICYRRFYLQHSLTSHIIRKSTSSRELHENKRYKRLLENQKSQEEKELELSLNKVEDILVPVAEDLQSYFKDESKHPIQKRKTSSLSKCPSCAQNYGFSFSHQLHMVKHRRERLYTNFPFHCSFCNRSFLTRKFLLSSLHMEIPTEVCPRFTCTANP

SEQ ID NO: 15871 - DNA, 3497 bp, DROSOPHILA
gatcaggcctgggactcgtgtatcgctttttagagtgtcaagtggatgtgttcttgcagttaacagggagaggagagccaattaccgactagtttgtaattcctattgaaacgttaatttttaattgtatctttgcatttaatcgttaaaaagggctttcaataaccacctaaaggattttgtaaattaaacgagcgtcaaagttggtttttcccataaacccttgctatatttatgtctgctagctcctgcgtgtcagctactgagacagttgagaatgtagtgcgtagcttgcaaggatcccaccatccctgcatcccatcatgccaaccttgctcaacgagaatcgttctcgctttttgccattcgacgccaatgggcgttggtgtaccgcccacaaggagcggctatgtatttttgggccatttgatcaaatggaaagaaaacttttctcattactcattgccaagccggggcaaacaaaccaggcaacgaaccaaccaaccagccatccagccagccaacaaaccagcgcaactagcggcagtcaacagctaacagtcaacaagagtggagtggtgggaaaatggggattcgtggcaaaagaggagctggatgctgggggatttacaacaggacccagctgcaacagtggcaatagcagtcgcagtggctacggcagtgactcgcatgttttgctgagtaatcccacgtatgtatttgcactaaaaccctctgttccgcctttccagctcggttcaccaccatgggacgggtgccacaacaacgggacaaaaaagaatccccactgtcggtcaattaatcacggttgaacaagtttgtaaaagattatctgtgctggtttgaaaatgggggagagaaaaattaaagacgtaatttatcacaaaaacaagcagcagacaaagcatacttcaaatttattgtcactgagggggatctgcattttgagttggatctagtccgtagttgggaatagcgattaagcctgtgctaaacaaggatttatatcaataacatggagtggaatggaataaaatccatggaatatttaacagttccatatgccataatttttcctagtaactataaagaaaagctctatgtgccaatctatcccactgtgcccaactgtttgcaatggcactcatagtttacttcttagtttgactcgcgttttttaagctttcccctttttcggcactccacctttcccattttccggattcgtgtgcgcgaaatgttttacgcaaataacaatttgacattttggtaggggagtaacaaatgtatcatcgttgtgtacccaccttccagatctaccactcgaccggaccgcttgagggccctcaccgcctcgtcgtgggtggcgtcacgtaactcctctccgttgacggtcaggatggcgtcgccgacgtagagtcccttggcctggtcggcggccatgccccggaagatcttcgagatgaggatgggcatgcggttctcccggccgcccttgatggagatacccaggccgttgttgtccgacttgatgatccgcacatgccgcttctggttggccacatggtcaggtacgtcgcacatatccattccgccaccgtcgccagcattgttgttgttgttcaggcaaggatcgcggtccccattgtcgttgctagcggagccgtctagctctgtatcctggatattcatgccctgcagcgacgcggaattgggcagggtgccgttctggccacctccacctgtgccaccaccgcctgcgccaccgcctcctccgccactgtgattgcttctgtgggaaaaaataataattgcatcttaggcttatcgcagattggtattgtatgtaatggttaataggcagtcaccaataactttgtcagtcttaaggatataattcattttgttgaatattattatattgacctacaatctactgcgtggccacaactattacaacatcttttataagaaacagaagtgctggcagctcaaacataaatattagaatgtttctaaagacgaaagcaggtactcgataatagtttcctaattgcatatctgcatttcctacgcactccttttggttaaatgacgggtagtcgaggaattttttaagttaaatgaaaaccttttgtcctgaaagcaatagcaataaccttaaaaacctaaaaaacatgtttttgaaataatcgtgctccatgattttttgatcctaatagaccgcaacttaccccaaggttccatttaaggtagtagactgtccatcgttcgatggctgcgccgcctcacaggactcgtccaggctgacggccaggaagtccgtttccagcgtgaccaggacgcggtaccaggcgccgcgaacacgcgtctccatgttgccgcatcgcagtcctgatggcgaaggggagtgctgctgcggaatgggctgctgggccgccggcggggtcctccccagactcgaggattccaccatgattcctttctgactttaaatgcactttgttgttatgtgattctacatggcagtcgccgaaaaggtctgaaaggataagaaaatattatgttcattgctaaaactttgcatgcgactttaaaatggataagtttattttttgtttgggaaaaatagttgataattttcatttgacccataataataaatccgcaatttctggcattccaattaattgcagacacaaatttaaaatgactcagcaataaaacgctttcttgctgcaaatgaaatttattaatttgcagtgtctgataaaatataggcttagcaaaatttattggtatttggccataattaacattgcgacagttgaacggatgctcagtcaaataacactaattgcgaagataagcgattcaatttttactgtggtcattaaacgtatgtaatggaaatagaccagttgaatttgtgtcattagagaaatacacattactgccgtcccagtcagtgatccactaagataaaatcaaaactccatgggatcttcagttagacatgcagatgacagaggctgaggggaatggcttgcgataagcggatatcaaattaaatgtccggcatgcggataacacacacggaggcagaaatgcgtagcggaagagaggacatttgtcattgttttgccagtccaggatttattgcattctccgacaagtgcagaagataggagtgttataggggtggaggtggcgaaacgagggcgggaatgcaaaaacccgtaccatttggggcacacatccttcgacattcggccacatcctttcacatctttggcggccgcagtgcaacagtttcccgctcggagttctgcaattacgcatcttgtcgccgccgcgggacttttttctatgattttctatttgacaagttgccagtctccgaggagcaggagtcctaccagagatgccatcgtgacacgcagggggattccccagtatgcagggagaggagtgcg

SEQ ID NO: 15872 - DNA, 738 bp, DROSOPHILA
atggtggaatcctcgagtctggggaggaccccgccggcggcccagcagcccattccgcagcagcactccccttcgccatcaggactgcgatgcggcaacatggagacgcgtgttcgcggcgcctggtaccgcgtcctggtcacgctggaaacggacttcctggccgtcagcctggacgagtcctgtgaggcggcgcagccatcgaacgatggacagtctactaccttaaatggaaccttgggaagcaatcacagtggcggaggaggcggtggcgcaggcggtggtggcacaggtggaggtggccagaacggcaccctgcccaattccgcgtcgctgcagggcatgaatatccaggatacagagctagacggctccgctagcaacgacaatggggaccgcgatccttgcctgaacaacaacaacaatgctggcgacggtggcggaatggatatgtgcgacgtacctgaccatgtggccaaccagaagcggcatgtgcggatcatcaagtcggacaacaacggcctgggtatctccatcaagggcggccgggagaaccgcatgcccatcctcatctcgaagatcttccggggcatggccgccgaccaggccaagggactctacgtcggcgacgccatcctgaccgtcaacggagaggagttacgtgacgccacccacgacgaggcggtgagggccctcaagcggtccggtcgagtggtagatctggaagcacaggcttaa

SEQ ID NO: 15873 - protein, 245 aa, DROSOPHILA
MVESSSLGRTPPAAQQPIPQQHSPSPSGLRCGNMETRVRGAWYRVLVTLETDFLAVSLDESCEAAQPSNDGQSTTLNGTLGSNHSGGGGGGAGGGGTGGGGQNGTLPNSASLQGMNIQDTELDGSASNDNGDRDPCLNNNNNAGDGGGMDMCDVPDHVANQKRHVRIIKSDNNGLGISIKGGRENRMPILISKIFRGMAADQAKGLYVGDAILTVNGEELRDATHDEAVRALKRSGRVVDLEAQA

SEQ ID NO: 15874 - DNA, 5069 bp, DROSOPHILA
actaaccagaaactttcaaaaccaatcaatcatttacttagcggtacgagcaccacgaagaccacggccaacggggccgctgcccacatctggaactccgaatccagtaccagtagttgcaccaccactgccatcgaaactggtgtccaagcaaccgcaacgcaagtcggcggggcgcatcaagggtggcggcaactcttcgaaggcggacagtggccatggcattgccatcaaatcattggcgaaggtcaaggcctgcatcaaccagaagcagaagagatcgcgtggctttgagcagcacaatcgcatccgtgaagtcatccaacagaagaaagtgctggagaccatgttgcagcagcacaagaagctgcaaagcgatcgacacaccatagcgatggatatccagcgaatgcgtgccgatctggacaggattcgcaacaagctggacacctcgctgcagagcctcaactcgacgcgcaccctattcagtgccgccaacaaggcgagtctcaggaagtcgaccgccctgcagaagccgacgcaaaacatggtgacctccaccaatcgccgctcgggtggcaaacgaaaggcccggaccgttgccattccgatgaaccggcaaagtgtgctgaccaacaaggcccctattctcaaacgaaaagttcggtgaaatgcaaagtaaaaaatgagaaaaaaaaatgatttaaacttcggcaaaaaaaaaattattttcaaaataaggcataaactacaataattgttcttttcagtaaagtattctttcactttacaagcataagtacatagaaaaatttactgataaaatctgttactgtttaaatctttgacattataaaataaatttaaattaacaaatttacaatttaattaacaattttttagtttaaattcaaagccgtaaaaatcgatatgttatcaattgcttttagtgttggaaagcaaatggctaatatcagcgagacgtcttacaattctctggacaaaaggaacggtcacactgctcatggcgtctgtttttcgccagcggatttttgtttttaattattttgcttaccattttcaccgatttgcctaattgttcgacaactgggagcctaagatgggctcctccaagaagcacaagaaaaacaagtcggagcgacgcgagaaatatgaaggtgagtgaaatgaaagtgctgtgtctacgtgagcccctgttgccataggccatctcgctcacacattttgccgcttgtttttgagcatgcctacacttagaaaaaaatgggtgtacattatttgtcacaattaatacaaaatgcatggttagaaataatctacgcgtctaaaggcagtaataatactattcagcacccattataatacctataccttatataacctggctttctcctatatatattatagaatacagtcagcaccaggacccggctcagctgcaacgaggtctaaagcttatccttaaggtgggctcgaatgccacgccggagtacagtgccaattcgccaatggtggacggaggaccgcccacagcagccgaggccatgatgtcgccagtccccgaggaacttcaagatcaccagggtcatcgcgagcgccacaaaaagtcaaagaaaaaaaagaagaagaaggatcgcgagaagaagcacaaacaccacaaggagaaacggcacaggagcagagatagacatcgggacgctggatcggacgaagatatgatggccggcgctgacgatgccgcttgcagtggattcgccccatcgtctgtcgctccaccggccgccgatcccgattccagccaagatggatttagctttatggacgatgatcaatcacaaccgctgccagagaatattttgttcttcgccggcatcaccacggataactcgccatcaaactgccccgtaacaaagccaatagctccacgcaagctggatgatattctgatgggctcttcgcccaactcgtcgtcgttgcaatcttcctccctgggtttaataggcagcagtcccaccaagccactgcccgacgtaagttacattaccatatggccaagttcattactacattcaatgcattttagcttttaataccttcaccgtcgacgccaggaggagccaactcccttaatgcccttacaccgaaggctctcgaggcgccaaagacgcccagtagttccagtgagtcgggtagagagccacggagctgtgtgctcaagctaaagcagcagaaatcgccgttaaacaaacttctggagcacctgttgcgcttcctggagaagcgggatccccatcagttcttcgcttggccggtgaccgatgacatggcgcccggttactcttcaataatcagcagacccatggacttctccactatgcgacagaaaattgatgatcacgagtataccgctttaaccgagttcactgatgactttaagctgatgtgcgaaaatgccatcaagtacaaccacgtggatacggtttataacaaggcagctaaacgtctactccaagttggaatgaaacatctgcaacctgagaacctcatgagaagcctgaaaccactatctggttatatgagggagcttacagccagagaacttggctttgagttaagttcgaacgatatgtcaagggaaaataacgattcggcggatgaaggagcttcaacgggagcggaagagccacgcactcccgctcagctggaggaggaggagcgtaagcgaacacttcgtttggagaatgcacccaaaacacatttcgagccttatgtagacgatttaacgggcgaagagatcctggcgcaagtgcaaaatgctgcgcaacaggccaaacaaagagtgaacgccaagaaaaatgcccacaagatgggtttcctgcgtcaaatgaaggatggcaccaccaccctgaatctggtgatcaaagaggaaaacgagggtcctgaaagggtagtaacaattggtgatctagttggcaaactgcaaaagggaagcgcacagctacagacgcgacaggttgacaaaaggaatgccgtgcggacagtgaaatccttaaactacggagcatttgccagctttgcgcccacctttgattcgcgcttttccacgctgagtgccgaagaaacgcaattggttttgcgtacgtatggagatgcctccagtgcggaatatgcggagagcatcttacaattcaccaaagactctaactacgggaccacaattgcaaatggtttgctggatattcttaccaacggagagcacagtaaatccctggatgaactatacaacatgcagcttcattcatacgagcagcgtgagattgaaaagtgttttgaacaggaggaggaaacttccagccagcaggaaaccaccgcccaaattgagcaagaatatgaaaaatacaaaaacacacatgtggacttcaagggattgcagtctcttggtgaacttggcatcgatgtgagcttcctagacggcatggaggctgaaatgaagagctacgagcttaatcggcgcatgcacgagcatcttagtcaaaacttgacgctaatcgagaagctgcgagtggcgcagcacgatcgtttgtcacagcctttgccgaatcacctgggtctggtgcagcccgccggtcaggaggagatccaaaccgcccagcaattgacgcagcagatcagcgatttggctaagaagttgccgccttccgccatcgccgatccctatgccttgcgaaaagctatgggcatgtcctatggtaagtccatatgcaaatatgattattttgctcatttattaataactttattgtgtttagctggcttgccgccacctcgacccgtctctccgcgcgtccagctgcctgagctgctccaacagccggtggccctgccacagttgcaacctgtggccatggagatcgacgagtctgatgaacagcatggcggtggagatctggagaacgaactgcgcgagttcctcgagagcggatctggcctccattctgccaatccggcggatgacaacagcattgttgctcagctgttgctgaactaggagatcgggaaatctccaagacgcgcgctatgtttataatgtaagataaagaaatttctctaaattattttcatatattcaatgcgttggcactctaaataaaaattaagctaatattaaagaatcacatgctttgctgtcttggaaaagttatatataaaaggaaaattatttgttattttcaaagttgttattttcaaagaaagattcaattgaaattacctagcaaatacgatctgagatcgatcaagtattaatttattgaactttctttttaacaattatattttcgtttcaatttcgagcttaagcctaaacacactttcaatttgtcttaactaaactaggtaacgatttaaagtttaaacacaacacaattgcaaaagaagcggccatagctagacttcttcgacgttttccgtaggtttggcgtcctcaacaacatcctgcagctcttcctcagcggcgacagtctgtttcgtgatctacagaaaattacaatacgatgggcggtacagtgaacatagcctttgcattatcataggttaacaacttcattcagtagctgtcttcaggcacataatacttatcggatcatgcagttagcagcgctgctatgtatatgtatatcaacatgctggttaaaaacgtatccgacgataattctttcatgcatttagcctaggtttatcgtactatataataagttcttagactatgattaggatttggataacataatatcttcgtatggactttaccacattagaaaccgcgtatggcgagtatcggtttagtgttttgatttgagtatggaccacttagaacctagacattaggcgagggctaaatgtttggaacccatttatatatatatgtatatatactatatatcacaagatggttgattttggttgtccccggtttttgatgtgatttttgttagtgagcgatttagtttcaatggcttttcaacggtttgattttgttattgttctgc

SEQ ID NO: 15875 - DNA, 2706 bp, DROSOPHILA
acaaaaggaacggtcacactgctcatggcgtctgtttttcgccagcggatttttgtttttaattattttgcttaccattttcaccgatttgcctaattgttcgacaactgggagcctaagatgggctcctccaagaagcacaagaaaaacaagtcggagcgacgcgagaaatatgaagaatacagtcagcaccaggacccggctcagctgcaacgaggtctaaagcttatccttaaggtgggctcgaatgccacgccggagtacagtgccaattcgccaatggtggacggaggaccgcccacagcagccgaggccatgatgtcgccagtccccgaggaacttcaagatcaccagggtcatcgcgagcgccacaaaaagtcaaagaaaaaaaagaagaagaaggatcgcgagaagaagcacaaacaccacaaggagaaacggcacaggagcagagatagacatcgggacgctggatcggacgaagatatgatggccggcgctgacgatgccgcttgcagtggattcgccccatcgtctgtcgctccaccggccgccgatcccgattccagccaagatggatttagctttatggacgatgatcaatcacaaccgctgccagagaatattttgttcttcgccggcatcaccacggataactcgccatcaaactgccccgtaacaaagccaatagctccacgcaagctggatgatattctgatgggctcttcgcccaactcgtcgtcgttgcaatcttcctccctgggtttaataggcagcagtcccaccaagccactgcccgaccttttaataccttcaccgtcgacgccaggaggagccaactcccttaatgcccttacaccgaaggctctcgaggcgccaaagacgcccagtagttccagtgagtcgggtagagagccacggagctgtgtgctcaagctaaagcagcagaaatcgccgttaaacaaacttctggagcacctgttgcgcttcctggagaagcgggatccccatcagttcttcgcttggccggtgaccgatgacatggcgcccggttactcttcaataatcagcagacccatggacttctccactatgcgacagaaaattgatgatcacgagtataccgctttaaccgagttcactgatgactttaagctgatgtgcgaaaatgccatcaagtacaaccacgtggatacggtttataacaaggcagctaaacgtctactccaagttggaatgaaacatctgcaacctgagaacctcatgagaagcctgaaaccactatctggttatatgagggagcttacagccagagaacttggctttgagttaagttcgaacgatatgtcaagggaaaataacgattcggcggatgaaggagcttcaacgggagcggaagagccacgcactcccgctcagctggaggaggaggagcgtaagcgaacacttcgtttggagaatgcacccaaaacacatttcgagccttatgtagacgatttaacgggcgaagagatcctggcgcaagtgcaaaatgctgcgcaacaggccaaacaaagagtgaacgccaagaaaaatgcccacaagatgggtttcctgcgtcaaatgaaggatggcaccaccaccctgaatctggtgatcaaagaggaaaacgagggtcctgaaagggtagtaacaattggtgatctagttggcaaactgcaaaagggaagcgcacagctacagacgcgacaggttgacaaaaggaatgccgtgcggacagtgaaatccttaaactacggagcatttgccagctttgcgcccacctttgattcgcgcttttccacgctgagtgccgaagaaacgcaattggttttgcgtacgtatggagatgcctccagtgcggaatatgcggagagcatcttacaattcaccaaagactctaactacgggaccacaattgcaaatggtttgctggatattcttaccaacggagagcacagtaaatccctggatgaactatacaacatgcagcttcattcatacgagcagcgtgagattgaaaagtgttttgaacaggaggaggaaacttccagccagcaggaaaccaccgcccaaattgagcaagaatatgaaaaatacaaaaacacacatgtggacttcaagggattgcagtctcttggtgaacttggcatcgatgtgagcttcctagacggcatggaggctgaaatgaagagctacgagcttaatcggcgcatgcacgagcatcttagtcaaaacttgacgctaatcgagaagctgcgagtggcgcagcacgatcgtttgtcacagcctttgccgaatcacctgggtctggtgcagcccgccggtcaggaggagatccaaaccgcccagcaattgacgcagcagatcagcgatttggctaagaagttgccgccttccgccatcgccgatccctatgccttgcgaaaagctatgggcatgtcctatgctggcttgccgccacctcgacccgtctctccgcgcgtccagctgcctgagctgctccaacagccggtggccctgccacagttgcaacctgtggccatggagatcgacgagtctgatgaacagcatggcggtggagatctggagaacgaactgcgcgagttcctcgagagcggatctggcctccattctgccaatccggcggatgacaacagcattgttgctcagctgttgctgaactag

SEQ ID NO: 15876 - protein, 861 aa, DROSOPHILA
MGSSKKHKKNKSERREKYEEYSQHQDPAQLQRGLKLILKVGSNATPEYSANSPMVDGGPPTAAEAMMSPVPEELQDHQGHRERHKKSKKKKKKKDREKKHKHHKEKRHRSRDRHRDAGSDEDMMAGADDAACSGFAPSSVAPPAADPDSSQDGFSFMDDDQSQPLPENILFFAGITTDNSPSNCPVTKPIAPRKLDDILMGSSPNSSSLQSSSLGLIGSSPTKPLPDLLIPSPSTPGGANSLNALTPKALEAPKTPSSSSESGREPRSCVLKLKQQKSPLNKLLEHLLRFLEKRDPHQFFAWPVTDDMAPGYSSIISRPMDFSTMRQKIDDHEYTALTEFTDDFKLMCENAIKYNHVDTVYNKAAKRLLQVGMKHLQPENLMRSLKPLSGYMRELTARELGFELSSNDMSRENNDSADEGASTGAEEPRTPAQLEEEERKRTLRLENAPKTHFEPYVDDLTGEEILAQVQNAAQQAKQRVNAKKNAHKMGFLRQMKDGTTTLNLVIKEENEGPERVVTIGDLVGKLQKGSAQLQTRQVDKRNAVRTVKSLNYGAFASFAPTFDSRFSTLSAEETQLVLRTYGDASSAEYAESILQFTKDSNYGTTIANGLLDILTNGEHSKSLDELYNMQLHSYEQREIEKCFEQEEETSSQQETTAQIEQEYEKYKNTHVDFKGLQSLGELGIDVSFLDGMEAEMKSYELNRRMHEHLSQNLTLIEKLRVAQHDRLSQPLPNHLGLVQPAGQEEIQTAQQLTQQISDLAKKLPPSAIADPYALRKAMGMSYAGLPPPRPVSPRVQLPELLQQPVALPQLQPVAMEIDESDEQHGGGDLENELREFLESGSGLHSANPADDNSIVAQLLLN

SEQ ID NO: 15877 - DNA, 3897 bp, DROSOPHILA
atatgtagatataaatgtataataattgcatatgatcgatggcttgtacatgaagagtggggaaaaattgcgaaatggcctggatatactcgcatcttttaggtaactatctgattttatatttagtttagtttagttgggagcctaatcaacgctcgatatcgacgccaatgacggggcctcgagatatgtgtacttcgtttagatacaagattcaagatacaattagttaagtacaattacgataattattgttcaacgtttatgcaaatgttgtggagttcgtagaattagatttcgtttttcgatttcactttagaaggtagcctgtgtaaatgacacacgtataaaatgagtttacgtctacttacaagttacataaagttgtttgttttgtcttacttgtctttactttcggtttttggatttaggtttgtgcttcgtgttttttattttccaaaaatctacttttctttttctgcattcgtcttccaactattcctatccaactaattcattccatttcccaacccaccaggaagcgcgaaaggctcactcatctaccactatctaatactttctttgctaagttaactaagtcgtaattttggtagggtttactattgtaaatgttaatattttaggcaaaacagaagcttcaatttgaacagaatcataatattttgcgatcgtcttttaggctgatctacaaatgaggtttgcaaaatgtatcgcctattgcaaaaatttggtttaattctggattaattgacaggtaacaattattgcgatttataaatgtctccagatatgttaattgtctaaaagaacaaactctgaaaccataaactaagtaataatactttttcgataaacaatctaataactaaatattgtgtttcaacaatatgcacagtagcgttgtacctagtgcaaattcacatccattacacccaaaacatcaacagttatcagactacctttccaattcaacctcgtcctaggcgatattgtgaactttggccgacaggcaattgtgcacgacgaagacaaccggcttgggacaacactccatgtccagttcctgcaattagatcacgattaactaaagtgtcccacttttcggacgcactcacaatctctccatcctcgccaaagtccagatacaacatcctggcgccgtcatcggcggaacccttcagcttgtcgaaggcgaactgccacaactgcgtcttggcggtggctaccgtcggagtggttggagcgaatccaccgcagtcgtacagaaagaagcctcggtttatgtgcacaaccaattgacactgccggccctggaacaggcagcggaaggagaactccctctggtagttgaccgcctggtgggagccctggacgagagacctggcccaggcggccatgtcccggtgcgtctctgagcgaagccaatagacgagcactccgcgggcggtgccgcatcgtacgcagaacactgtggtctgctggccctgcaaccgattcaatggcaacgagtataatatttgcgttgtttcgatgtcagttatgaactcacgttcagggaggaattgttgccggctcctgccaggcgcgttgtggccagggcgtagatttccaggggccgactccaggcctccaccgaccagggagcactctcgtatatccggaactcacgctccgtaaccgccacgaatatgggcagccacttgtcactctcatcggagctctcggaactggaacgaccgctgggctgttgatcgaagaaagttacaccttagaaatagttgcttttcaaatacttgggtagagcatatgttttagattaacttattactgtgtatggtggttagaaagcgagatagcaaatttttcttatcatgcaatgtgtttatttttaaacataagcctatgtaagtaaataagttactcctatcgggatgttgggtcaacttacacttaccaactcgccggctacaacgctgttcgaggtgccgctgcctccgctagccgctccgcccccggcgctaccagaacttcctccgccgctcatccgcttgctcagccatccaatgtgcttcagttcgccgatgaggttggtaagcgcccgattggcctcggccaaagcgcgctgcgtgctggtgcccatcgccgagtggagggcattgaaccagacgagggcctccgccgagtccgctgcccgcaggatgcaggagtgcactccgtcgggcgaatgcaactcgaagcaccggttttctaacgcggagaaagatgtatgattagcttcgagtactaatggatattcaataaaacctatcagggtttcatatcttaaaatttatgatccctttgttctgcaattttgtgcacttgaatattatagcatgctgtacatttcataaataaatttcgacagcagctaaaatctctaacatatctctaattacccgggtcgatgtatttgagattcctggccagatgcgtcagctgcagcgggatgtatcgcgtatccgcccggggtgtcgtcttgggggcgggcggcgacgtgggtacgcctggtcccagcggacagaggaaggcccgctggagctcccaacccacttccgagatgatgcttgccttccgaaagtagggcgtcacttcgcgcaggaatttaactgcaaagtacagaggagaaaaccaaccggggacataaccatcagtgcaaatcaaacgttatcgcatgaatatggatgcaggacgggatgtttggtggggggcacagtgtcatcagcaaaacactcgcaaatgcactaacagcattcaatcagccgcagttagagccttcttcgctggttctgctgttgctgttgttgctgcggaagtcttggcaaacgctgcggcataaattcattagggtttccgctccatttttattcgatttacacacccaaagtccccccccggctagagtcaaacccttgagaacagtgggcacagctttatggtttagtacttaacttatgtttacctcgagtttcttacaaactacaagcaacattgtcatatattcttaataaaataatcaatgaggagtggataccaacgacgatttgattttagtagaagcaggaagttttaaacttcataccttgctatattttgaaagttcgtaaataattaagaattacaatgggatgtgttctactgtattctgctgtattcattagagagtagaccactgtgcaactactatgcaaatggtgctgacgatgccaggtgctatggcggtgatggcagggggcattttccaagtctccccactccgagtcgcatatctagcttgaaaagttccatgccatatcccgtcccacttgatatgctcaggattccgcccacaacatttgcacaatttccgtttgctgttgccgttgtcgttgctgttcctgttttggcgttgtttttgttgttgtagtcctcggttgccgttcgagtgatttggaaattcaattttcacacttaatgccatcggccgacggttgcaaccggttggcggcggttcgtccgactcaattcgtgtgtttagctcgactaattagagcagacggccacacggcggatgggtaatgctctatggcagggggcctggccagtggccacccacctgctaattgctcggcatttacgtgctctgaaaggtggaactccgagtgcccaactcctgcgcctttctgcagctctgcaaacatttgcactcacaaatatgcgaccgacggcaaacaaacgggcaaacaagcggagaaataaaatatataaaaaaatgttgcatagcggcaggcgcaaagtgtgatttttttttttttttttttttttacgattacgatgatgtttttattatttgatcaa

SEQ ID NO: 15878 - DNA, 1161 bp, DROSOPHILA
atgccgcagcttaaattcctgcgcgaagtgacgccctactttcggaaggcaagcatcatctcggaagtgggttgggagctccagcgggccttcctctgtccgctgggaccaggcgtacccacgtcgccgcccgcccccaagacgacaccccgggcggatacgcgatacatcccgctgcagctgacgcatctggccaggaatctcaaatacatcgacccggaaaaccggtgcttcgagttgcattcgcccgacggagtgcactcctgcatcctgcgggcagcggactcggcggaggccctcgtctggttcaatgccctccactcggcgatgggcaccagcacgcagcgcgctttggccgaggccaatcgggcgcttaccaacctcatcggcgaactgaagcacattggatggctgagcaagcggatgagcggcggaggaagttctggtagcgccgggggcggagcggctagcggaggcagcggcacctcgaacagcgttgtagccggcgagttgcccagcggtcgttccagttccgagagctccgatgagagtgacaagtggctgcccatattcgtggcggttacggagcgtgagttccggatatacgagagtgctccctggtcggtggaggcctggagtcggcccctggaaatctacgccctggccacaacgcgcctggcaggagccggcaacaattcctccctgaacggccagcagaccacagtgttctgcgtacgatgcggcaccgcccgcggagtgctcgtctattggcttcgctcagagacgcaccgggacatggccgcctgggccaggtctctcgtccagggctcccaccaggcggtcaactaccagagggagttctccttccgctgcctgttccagggccggcagtgtcaattggttgtgcacataaaccgaggcttctttctgtacgactgcggtggattcgctccaaccactccgacggtagccaccgccaagacgcagttgtggcagttcgccttcgacaagctgaagggttccgccgatgacggcgccaggatgttgtatctggactttggcgaggatggagagattgaactggacatggagtgttgtcccaagccggttgtcttcgtcgtgcacaattgcctgtcggccaaagttcacaatatcgcctag

SEQ ID NO: 15879 - protein, 386 aa, DROSOPHILA
MPQLKFLREVTPYFRKASIISEVGWELQRAFLCPLGPGVPTSPPAPKTTPRADTRYIPLQLTHLARNLKYIDPENRCFELHSPDGVHSCILRAADSAEALVWFNALHSAMGTSTQRALAEANRALTNLIGELKHIGWLSKRMSGGGSSGSAGGGAASGGSGTSNSVVAGELPSGRSSSESSDESDKWLPIFVAVTEREFRIYESAPWSVEAWSRPLEIYALATTRLAGAGNNSSLNGQQTTVFCVRCGTARGVLVYWLRSETHRDMAAWARSLVQGSHQAVNYQREFSFRCLFQGRQCQLVVHINRGFFLYDCGGFAPTTPTVATAKTQLWQFAFDKLKGSADDGARMLYLDFGEDGEIELDMECCPKPVVFVVHNCLSAKVHNIA

SEQ ID NO: 15880 - DNA, 4898 bp, DROSOPHILA
aaacgaataacgaaaagcatctaaggagcaaaaaaagagcgaaagagaaaagtttaatttagaaaacccttttttcacaaagctccagagatttccccgccggcgaccggggaaaactgtcaaccaattttaattgactcgcaatccccaaaatacaaaatacaaaacaactgcttaaaagagacaatatcacaatatcaaatacgcattactttctgcacccaattttaattggccctggacccagaacattgcgcactacaaagttggggtagggaaatttatttctgcccactctggcgtaaaattaaggcacaagctgtcttgtgttttcctttcgttattttttatttccgtctcaattgctgcactaaatactttgcacaaacatttcacaaaagcgaagcgaagcgaatgtgggaaccagtttttgccgctccccgtcccggaatcgcgtgtcccagcccgagacatatgttaatttttgcccgcactctcccgacaggatgatactttatcagccctttaagctggatatagcctttttgccctttttgcctgttgttaaattagctagatatgcctatgccgcctattcccggcattttcaacgctcgagtgagaaaaccgtggctaaatcaacatttgatcggcgtttgcgagttaacaagactcgacagctgcctttcgctaagggatgaaattgcaagttaatctgtgagggttgtaagccggtggagagggctaggattaggctacaagttaatcaaattattgcacagaaaaccatgtaattagggtttgtatccttgcgatgtttttgattaggtaactaattccaagtgtctatatcttcttaacactttaagttgtcaaaaatttgcaaaaatattaaagagtaaatttgtattttaagctttttcataaatacatatatgaaaaaaaagttcctgcatatatctattaaaacaaaaagcgcataaagaagtttcgtgtttttaaatgaaagaacaattattttatttcctctttttgattaacatctgaataaggctgctcttcgcccatgtcagtactgtgagaagtataaggttaactacttaacctgacaaattgtttagcagcgcttggctttctccttgtagtttcgattgaacgtttgaagatgagttcgacgttgactgcgacgatgaatgtgacgatgattgagacgacgactcggacttcgactccgactgagtcttggagctcgattgatctagtagcaaggtatttcgattgccagcctcctgtcgttgtgcttcagactgtgatgcctgcgatgactgtgatgacgaactctgcgagttttgtgagttactgtgcgagcttgaagaagaggttttctgatcattttccgtctgaattcgcagttgttcctgctccttcaatcgctgaagagcggcgctttgagatgcagaactttctgtgccttgtagggaactagtctgcaggccagtggatccagcttgaagaccctgctgtgagccttgagctccagtactttgtatatcttgctgtaacttggtctgagaactagagccagcagatgaggactgttgtttattgattgattcctgagcttgttgttccttctgttgttgtcctagcaacagctgtgcgttttgttgttttttaatatcattttgtctacgctgcaaaaggctcaatatattttgatgcttttttaattcttgctgtagacgaaactgatctcggtaatccgacaaatcattgaaatccggcgataaaatatacagtcctgttgaagctggcttgccaattagccctccgcctgatggcaatttgtccagtgaaccgggttgggggaccagcttaggctcaattgaaggaccttgatttccaggagctggctttccttcggaaggcaattgtccgataataaatagattggatgggttacttccctttgatatttctgcctgcgacttcttttggtcttccaattcttttagttttaactgtttcaattggtagctcaacttctccttatttagctgcagaatattttggtatagctcatgtatacgtcgctgagagtccgattgggtttgtagctcagacttgcccttctgcagcagctctcgaatattttgcatttccaactttatttgttccaattgccgaagattctgatcccgctgcaactgtaactgctcctgcgattgtgactgtgactgtgacagtgagttagattttgactcttgcaactggctttgggtttgtgtatctgattttagctgattctgctgaaactgtagaagattttgcagctgtaacagaatttgctgctctagctgcccaggcgactgtgattttgaactgggtcgtaaggtgggttgctcagccaactgtttctgttgcacttctgtaagtttctttagttgcaaaaggatttgttgttctaaatctgatttcaatgccgactgcgtcttcaatctggattgcagtaatcgaagaagttgcaaatgtgactggatctgttgcgctacctgtgactgtggctgcgactgtgaagcagattgctcatctaattgcttctgctgcagttgccgaaggctttgtaattgcaattgcatttgttgctccagctgtgacttggattgtgactgaaactgtgaagcaaattgcttatccaactgattcttttgtagctgtgactggatttgctgtcccagccctagccgtgactgtgatagtgaagacgatagctcctcaagttgttgcaaattcaactgtttttgttgctcttgccgtgtcttggattcggactgcgactgtgatgcagatttgtcatctaactctttttgctgcagcccttgaagaatttgaatttgtgactggattggcttaccttgctctgactgcgattgtgattgttcttgtaattgtaagttggattgagaatccgattgcctctgcgattgaatctgagaagcagattgtgcggcagattgctcatttgacttttgttgcaactgtcgcagtatttgcaattgcgtctgtatctgttgctgtcgctgtgactgcgactgtgactgcttctgtgactcggactgtgactgtgactctgattgtgactgagattctgaaacaggtgggttttccaacagtcgattgctttgctcctgtgcctggaattgtgaagatgcatttgattcagattgtgaggcagattgtgactgcgtctgggattgcgactgagaatctgcatatctcaacagttgcaactgcaatgcaggtgatattttatctactttatcccgagaaatcgtttccaaactaggattatttcttccttctcttagtgctgacacaccgaatcgaatatgtaagttattgttctgaacttgcgtctgtttctgatctttgtctgagagcacgtcttgtgcattaattagttgttgatttggaattccaagtaaattggctgacggcaggagggatggatactgactgtacggcccatgtattcctatctgatttttcgtagaaatagtatcgacttttggatagtagataggcttaagtatcacttgtggttgatgtacgtgaatcacttgtgaagactgcaaatattaatacacttagtttatggactcaagatgggtgcagattgtctaattacctcgggctttggggtcactttcggttgctgcacttcaatcaatggctgtgggtttactccaaatatcggaggactaagaatgtccctaaacgattcgtgaactttttcaagatttttcctgaagcaatgcttgcacaaaaaagactcactgggcaccaaagtgccgaggagaattagggcaataaactgttggcacgtcaaagtccacatctttggaccaagttcgagatcaagtcgaaaatgtgtcttatatagggcatgaggccataacaccgtgaaataaaatatgccatggtttaaatgggttctcctaccgaagataagcacattattatgcttttacatcacaaaaggttatagatctagaaaccttggccataaaaatgttctgaaaaggaaaaaaaaaaattatttgcagaacattttaatattttaaaaataaattgcttgttgaaggaacggtcaaatatgaattcatttacatatcagttcattttcaacaaaattgataaagtttcgagtaacttaattcccatttacaacacccccaagaccattaaccataacagccgtagtgcaccttaaaaaaagtagaaaataaataaaatgtaaaatgggccacaacttgtttaaaaaataaacttaattaaattgaaggcattgaacgatgcaacaactttacaacgctgtgcaacataaatgggtaaactgtatggaaaaacatatattgattaataaaagggatgaacgaaaaaacgtgaaatatacaagtgcaggctgaaactgaaacgcagtctcttcaaacggctgactcaatataaattttccgaaactgcttgtgtaatgtgagaaaagcaaagttttcagcctgattgttttgagtttgcctgcgtggggaggggaaaaactatttgatgatgacaaaagtcggtttttttgccagactcctaaagagattgcctgcggggcgttcgtctattgtgattatgcgatggcattccccactgacagcgagcccaaggggcaatctgcagccaagtcaagccgcacggaagcaacaagcaacaacctcggctgcagtaacgtgcaacaacagcagctgcaacaccagcgtcaacagcaacttcaacgcttcattacaaaagtctggtcaggaaggaggcgtttcccaaaagagaccaacgagaaatgagaaacccgatagtgagaa

SEQ ID NO: 15881 - DNA, 2839 bp, DROSOPHILA
atgtggactttgacgtgccaacagtttattgccctaattctcctcggcactttggtgcccagtgagtcttttttgtgcaagcattgcttcaggaaaaatcttgaaaaagttcacgaatcgtttagggacattcttagtcctccgatatttggagtaaacccacagccattgattgaagtgcagcaaccgaaagtgaccccaaagcccgagtcttcacaagtgattcacgtacatcaaccacaagtgatacttaagcctatctactatccaaaagtcgatactatttctacgaaaaatcagataggaatacatgggccgtacagtcagtatccatccctcctgccgtcagccaatttacttggaattccaaatcaacaactaattaatgcacaagacgtgctctcagacaaagatcagaaacagacgcaagttcagaacaataacttacatattcgattcggtgtgtcagcactaagagaaggaagaaataatcctagtttggaaacgatttctcgggataaagtagataaaatatcacctgcattgcagttgcaactgttgagatatgcagattctcagtcgcaatcccagacgcagtcacaatctgcctcacaatctgaatcaaatgcatcttcacaattccaggcacaggagcaaagcaatcgactgttggaaaacccacctgtttcagaatctcagtcacaatcagagtcacagtcacagtccgagtcacagaagcagtcacagtcgcagtcacagcgacagcaacagatacagacgcaattgcaaatactgcgacagttgcaacaaaagtcaaatgagcaatctgccgcacaatctgcttctcagattcaatcgcagaggcaatcggattctcaatccaacttacaattacaagaacaatcacaatcgcagtcagagcaaggtaagccaatccagtcacaaattcaaattcttcaagggctgcagcaaaaagagttagatgacaaatctgcatcacagtcgcagtccgaatccaagacacggcaagagcaacaaaaacagttgaatttgcaacaacttgaggagctatcgtcttcactatcacagtcacggctagggctgggacagcaaatccagtcacagctacaaaagaatcagttggataagcaatttgcttcacagtttcagtcacaatccaagtcacagctggagcaacaaatgcaattgcaattacaaagccttcggcaactgcagcagaagcaattagatgagcaatctgcttcacagtcgcagccacagtcacaggtagcgcaacagatccagtcacatttgcaacttcttcgattactgcaatccagattgaagacgcagtcggcattgaaatcagatttagaacaacaaatccttttgcaactaaagaaacttacagaagtgcaacagaaacagttggctgagcaacccaccttacgacccagttcaaaatcacagtcgcctgggcagctagagcagcaaattctgttacagctgcaaaatcttctacagtttcagcagaatcagctaaaatcagatacacaaacccaaagccagttgcaagagtcaaaatctaactcactgtcacagtcacagtcacaatcgcaggagcagttacagttgcagcgggatcagaatcttcggcaattggaacaaataaagttggaaatgcaaaatattcgagagctgctgcagaagggcaagtctgagctacaaacccaatcggactctcagcgacgtatacatgagctataccaaaatattctgcagctaaataaggagaagttgagctaccaattgaaacagttaaaactaaaagaattggaagaccaaaagaagtcgcaggcagaaatatcaaagggaagtaacccatccaatctatttattatcggacaattgccttccgaaggaaagccagctcctggaaatcaaggtccttcaattgagcctaagctggtcccccaacccggttcactggacaaattgccatcaggcggagggctaattggcaagccagcttcaacaggactgtatattttatcgccggatttcaatgatttgtcggattaccgagatcagtttcgtctacagcaagaattaaaaaagcatcaaaatatattgagccttttgcagcgtagacaaaatgatattaaaaaacaacaaaacgcacagctgttgctaggacaacaacagaaggaacaacaagctcaggaatcaatcaataaacaacagtcctcatctgctggctctagttctcagaccaagttacagcaagatatacaaagtactggagctcaaggctcacagcagggtcttcaagctggatccactggcctgcagactagttccctacaaggcacagaaagttctgcatctcaaagcgccgctcttcagcgattgaaggagcaggaacaactgcgaattcagacggaaaatgatcagaaaacctcttcttcaagctcgcacagtaactcacaaaactcgcagagttcgtcatcacagtcatcgcaggcatcacagtctgaagcacaacgacaggaggctggcaatcgaaataccttgctactagatcaatcgagctccaagactcagtcggagtcgaagtccgagtcgtcgtctcaatcatcgtcacattcatcgtcgcagtcaacgtcgaactcatcttcaaacgttcaatcgaaactacaaggagaaagccaagcgctgctaaacaatttgtcaggttaagtagttaaccttatacttctcacagtactgacatgggcgaagagcagccttattcagatgttaatcaaaaagaggaaataaaataattgttctttcattt

SEQ ID NO: 15882 - protein, 912 aa, DROSOPHILA
MWTLTCQQFIALILLGTLVPSESFLCKHCFRKNLEKVHESFRDILSPPIFGVNPQPLIEVQQPKVTPKPESSQVIHVHQPQVILKPIYYPKVDTISTKNQIGIHGPYSQYPSLLPSANLLGIPNQQLINAQDVLSDKDQKQTQVQNNNLHIRFGVSALREGRNNPSLETISRDKVDKISPALQLQLLRYADSQSQSQTQSQSASQSESNASSQFQAQEQSNRLLENPPVSESQSQSESQSQSESQKQSQSQSQRQQQIQTQLQILRQLQQKSNEQSAAQSASQIQSQRQSDSQSNLQLQEQSQSQSEQGKPIQSQIQILQGLQQKELDDKSASQSQSESKTRQEQQKQLNLQQLEELSSSLSQSRLGLGQQIQSQLQKNQLDKQFASQFQSQSKSQLEQQMQLQLQSLRQLQQKQLDEQSASQSQPQSQVAQQIQSHLQLLRLLQSRLKTQSALKSDLEQQILLQLKKLTEVQQKQLAEQPTLRPSSKSQSPGQLEQQILLQLQNLLQFQQNQLKSDTQTQSQLQESKSNSLSQSQSQSQEQLQLQRDQNLRQLEQIKLEMQNIRELLQKGKSELQTQSDSQRRIHELYQNILQLNKEKLSYQLKQLKLKELEDQKKSQAEISKGSNPSNLFIIGQLPSEGKPAPGNQGPSIEPKLVPQPGSLDKLPSGGGLIGKPASTGLYILSPDFNDLSDYRDQFRLQQELKKHQNILSLLQRRQNDIKKQQNAQLLLGQQQKEQQAQESINKQQSSSAGSSSQTKLQQDIQSTGAQGSQQGLQAGSTGLQTSSLQGTESSASQSAALQRLKEQEQLRIQTENDQKTSSSSSHSNSQNSQSSSSQSSQASQSEAQRQEAGNRNTLLLDQSSSKTQSESKSESSSQSSSHSSSQSTSNSSSNVQSKLQGESQALLNNLSG

SEQ ID NO: 15883 - DNA, 5715 bp, DROSOPHILA
gcagaaaattgattgattcaagccgtgtcgcttcctaagatgctagtcgagatcctcaacttccagacaccagctacagcaagatcgaaagttgactgaaataatatgtaaggcctttgccatttgttgtagacggccaaaatccttttggaataaacatagaaactttcaataataataataaaaaccaaaattattaaattaatattaatatattcaaaagtgtgggagcagctttgtgggatagtggacgtgctcactcttagttaagggaatgtgttctttttatcattcgttctcataaactttctctaactcttacgtaagctcgcagacttacgaaatcttaaaaataagcgaaaataatacttgctgcaaattgtttcatgattaaaaagtccgaaaaactaatatccagtgttgggttgtagtcacaaataatatttattattcatttcattttttcacttgcgtattttgatttgcatttcagttgtacacttcagattttgcacttttgttggaaaagacaaatggcaactaaatgcattaagcttattaattttacaagcatggccacaatgagttgtattgtacttgagctgttatagattcactccgggacaatctgttgctctggcaagactaagcatacaaaaatatttcaggtttcaatcgtgttatgcctattattttataaattattgcatcgaaattcgttcttaaactaatttcctttaatagggaaattattatgacaacactaactcatacattcttcaaattatactttttggtagcagcaaaattgggattaagggtagtaattcattaaaatgacctgtactacaaagtatatatctttgggataaattatttggttgggtttcgttctgcaactttgggttactaaacactaaactaaatggcaagaactagttctacaaatccttcttctatggcacactcgcatttggcgttggctatcaactcctggattctacttctgtttcatatacatggtagcaattttctcaagaatcgtgtctatagacaacaattcgtcgctgaatttctgcatagtgggggctggcacaatccacttaagaaattcctccacatttagccggagtctggccaatggggtcatcgtggcgtcgtcatgggattgtcgctgagccagcttcaaggatgcaatgataacgttatcgattagacgcttctcgtagcccaactggcgcagcttttgagcggagctaattttcttcagtaccactgccatgttaaatcttaagacagagagaatttgcgcatcttcagactgattgccactgggtttgtccccgtcaactggacacttggcgcagtgctcaacatgcgactgcagctccaccttgatcttaaagaaatcgtggcagccttcgcacatgtagggcttttgctgtttgtgtatcttcttcatgtggttctttaggtgcgccagctgagaaaaggctacttcgtcttcgcacagctggcagcgaaagggtttttcccccgtatgctttcggatgtgcagttttagtacgcttgaatgggcaaaggtctggtggcagatctgatggaagtagaaacataatttacggctgcatgcaagctaacaccctttcaacttaccctacactgataggggcgctctcccgtgtgcattcgcatatggacattgtactggcttttctgggtgaaatatgtgttgcacacctcgcagacgtgggtcttaacagcggtgtgcctctgcatgtgagtggccaaatcctcgtccggctcgatcatcttatggcatatctcgcactcaaattgcgtcagcttgtggtgctcctggtttatgtgcgctcgcagggccagctcgttggcgaattggttctcacagatgctgcaccggtgctccatgccctgctcgtgtcgctccatgtgcacccgtaaattggcgttggttgagaagctggccgagcacttagtgcagttgaactgctggatactcgtcttgtggtgagaaaccatgtgctgttgcagctgcaatataaatgataatatatattaggaacaccaatggttaagacctataaaaacaaaagcctaatagaaagttcattattaaatacacttatttatatttaattattataataaatattattatttaagtttataataaatcaaattatgagaaaaatataaaattaattgttaaatctcagttaaaaatggaatgtcgtattactcacttgacctcctcgggcgaattttttgtcgcagaggtcgcaaggatagggcttctcgccagagtggaggcgcatgtggagccgcaggcgctccttgagggcgaatgattttgggcactgggaacaaacgaactgtttccgatgctcgtgggcggtggtgatatgatttttcaggttgaccgcctggcggtagctcttgccacaatccttgcacttgtgcggtcgttcgtccgagtggataagcatgtggcgctgcagatccgtcttgccaccgaactctttggagcattgactgcagacatggtgcttgcgtttcaccggttcgccctttcgggcagacttcttaagctgcggttgcacgtaatcatcatcctttgagtcctgctctccgccgtcgtcctcctcctcgtccacacaagcatcgcgcagacttgccaagctgctcttcctccttttgatcgcaagcgtagggcctggtgaggattccctcgccgccggcggcgaagacagcgatatgccgctgtctgtgagcagagagacggcatcctccttggacacactacgacggctgcgtaccatttgtttggtttttattatttggattcgtaactaaatttctggggaccgcttcctgggaaacaccggcacctgctgcgtttgtctttacttctagggttaatgttctacgtatgtaatttagggtattcgtattttttggttcgattgctacttctaggatagttcccattcacctttggtttggattagttcagatgggctgcaaaaaaagttaagagctgttttaattctccactcgccgagcgccacgttccgaagcagacggagaatcaaaaacacagacagaaatagtaaccgcaagtgaagccgaaacagaaacaagaagagaaacagcaacggaacagaaactccagctgtgtcaacagtgataagacctatgcacaggaaaaatattaccaaaattggtggatttgcatatttaggggcttcgaaaagcatggcactttttacgttaatgcaatagttcttactatttttgcagtgttgtcgaaatcacttgagatttttagacgttgtttatcataattaattaattaattgcaattcattggctatccaattagaaaatatattcgtttctttacaaatctagttaacaacggaaggttgtggactgtttttcacggtgtacagagctaggagcccaagtcttgaagtgggtcgcattatcaattgacatttccagcgaacgtaagcttccaaaaaaaattcttagtttgttgtcttaatcttttgtttgggcgggagcgagatggagaaaccgcctgataagatcccgaggaaggcaacaactgataagcaatccaccgctttcactaaaatcacggtagagctataaaaagatatcgagataaagctgtgcaacctgagcgttttcgatcccgcggcgtctgttctccgaggcggcggagtttccaatgaaaagcgagaacactgaaaatgcaactgcaagagagcgattacgatgaccctgggctgggacgaacatctggcaagcagattgggaaccctccgattccgattccagtgccaagcaaccccctccccctgcggagggttaatggttcattagagccgcacccgcagaagctgaaaactaactcactttagcagcacaacggccctcgaccaaactgttgaaaaagcgaatttaagctagaatccgcagctgggaatcgaaattgaaagagaacagggcaaaaagcacgaacgacagcgaaaatcacacacaaaaagcgaaaataaagaagtgaatacataacagcagttttgtaatgctaaataggcggggttatgggggtgggtaagggttaaggcggcggcggtcgctggatgagggtaggggccgttgaagtctttcgtattcggggcacaaaactcgacgactgtgtagttttcggggtcttgcaaccgattgttagtaattaatgaaccagcaccacagcactcatatacgtaaagcaatccattatacacatatgctacacatttggcccaggggctccacattcaacaccaacaccaaagccccaccgggcgtggacttaccttcgcaaaaagcaggagtcgctaggctaagggccttcgatccacaggaaacttagcatcaccccgaatgggacacacctggacttcctatgcattccgcgtccgactatgagttcgcttcttatttgtttttaatttcgacaccacgagctgtgtgtacatactttttgcaatccgctaggtggcagtccgactggctcctcaaggtgtatccatcgtgctgcctgcggcttaacctttgtgggactttgcgggtttgccgattctaagccaatactgcgttttgtccagcaaaataaataacagttttcggtggtttttcgatgttgttcttaatgttagtgatgtgtattcaccgatagacggtcacactgggactctctgtctgcgcggccacagatgggagcgtgatgcacagtcactagttagagaaaatccaataacgtgtaggttgcggcgcaataagttataaataagttaaaaatcacattgcgcagtatcactgcaatatttattgaaatttcagtaagaacaaagtgaggcacactttgttgaacgtgacttcttttacacactgaaatcacagcctgctgaacgtgaccactttgctcactgaaatcgcagacgtgtggcaacactcaagccgccagaaagatctggcatctctcatacttaacacgcgcatgcaaaatatttaagaaataaatattagtcgctaacagtttaaatataataaaattctgctgatataaacccagttcataaaagaacacgcatttacctccgcatataagatcaaatacgtataaaatctaattagccgactcaaggtaaggcgtgcgtttttggagctccactaaactgacttcaaagcaataactcatcaaatactacatttcagttaaaatggctggagtactctttgaggacatcttcaacgtaaaggacatggatccggagggcaaaaagttcgaccgtgtatcccgcctgcactgcgagtccgagtcgtttaagatggacctcatcctggacatcaactcgtggctataccccatggagctgggcgacaagttccgcctggttttggccaccaccctgcgcgaggatggttgcccggacagcggggagtacaatccaatggagcacgagggaacgcgggcggacagctttgagtacgtgatgtacggcaagatctacaggatcgagggcgacgaagcacacaatgaggcctcccggctctccgcctacgtgtcattcggcggcttgctgatgcgacttcagggtgacgccaacaatcttcatggcttcgaggtggaccagcacatgt

SEQ ID NO: 15884 - DNA, 2095 bp, DROSOPHILA
acatcgaaaaaccaccgaaaactgttatttattttgctggacaaaacgcagtattggcttagaatcggcaaacccgcaaagtcccacaaaggttaagccgcaggcagcacgatggatacaccttgaggagccagtcggactgccacctagcggattgcaaaaagtatgtacacacagctcgtggtgtcgaaattaaaaacaaataagaagcgaactcatagtcggacgcggaatgcataggaagtccaggtgtgtcccattcggggtgatgctaagtttcctgtggatcgaaggcccttagcctagcgactcctgctttttgcgaagcccatctgaactaatccaaaccaaaggtgaatgggaactatcctagaagtagcaatcgaaccaaaaaatacgaataccctaaattacatacgtagaacattaaccctagaagtaaagacaaacgcagcaggtgccggtgtttcccaggaagcggtccccagaaatttagttacgaatccaaataataaaaaccaaacaaatggtacgcagccgtcgtagtgtgtccaaggaggatgccgtctctctgctcacagacagcggcatatcgctgtcttcgccgccggcggcgagggaatcctcaccaggccctacgcttgcgatcaaaaggaggaagagcagcttggcaagtctgcgcgatgcttgtgtggacgaggaggaggacgacggcggagagcaggactcaaaggatgatgattacgtgcaaccgcagcttaagaagtctgcccgaaagggcgaaccggtgaaacgcaagcaccatgtctgcagtcaatgctccaaagagttcggtggcaagacggatctgcagcgccacatgcttatccactcggacgaacgaccgcacaagtgcaaggattgtggcaagagctaccgccaggcggtcaacctgaaaaatcatatcaccaccgcccacgagcatcggaaacagttcgtttgttcccagtgcccaaaatcattcgccctcaaggagcgcctgcggctccacatgcgcctccactctggcgagaagccctatccttgcgacctctgcgacaaaaaattcgcccgaggaggtcaactgcaacagcacatggtttctcaccacaagacgagtatccagcagttcaactgcactaagtgctcggccagcttctcaaccaacgccaatttacgggtgcacatggagcgacacgagcagggcatggagcaccggtgcagcatctgtgagaaccaattcgccaacgagctggccctgcgagcgcacataaaccaggagcaccacaagctgacgcaatttgagtgcgagatatgccataagatgatcgagccggacgaggatttggccactcacatgcagaggcacaccgctgttaagacccacgtctgcgaggtgtgcaacacatatttcacccagaaaagccagtacaatgtccatatgcgaatgcacacgggagagcgcccctatcagtgtaggatctgccaccagacctttgcccattcaagcgtactaaaactgcacatccgaaagcatacgggggaaaaaccctttcgctgccagctgtgcgaagacgaagtagccttttctcagctggcgcacctaaagaaccacatgaagaagatacacaaacagcaaaagccctacatgtgcgaaggctgccacgatttctttaagatcaaggtggagctgcagtcgcatgttgagcactgcgccaagtgtccagttgacggggacaaacccagtggcaatcagtctgaagatgcgcaaattctctctgtcttaagatttaacatggcagtggtactgaagaaaattagctccgctcaaaagctgcgccagttgggctacgagaagcgtctaatcgataacgttatcattgcatccttgaagctggctcagcgacaatcccatgacgacgccacgatgaccccattggccagactccggctaaatgtggaggaatttcttaagtggattgtgccagcccccactatgcagaaattcagcgacgaattgttgtctatagacacgattcttgagaaaattgctaccatgtatatgaaacagaagtag

SEQ ID NO: 15885 - protein, 522 aa, DROSOPHILA
MVRSRRSVSKEDAVSLLTDSGISLSSPPAARESSPGPTLAIKRRKSSLASLRDACVDEEEDDGGEQDSKDDDYVQPQLKKSARKGEPVKRKHHVCSQCSKEFGGKTDLQRHMLIHSDERPHKCKDCGKSYRQAVNLKNHITTAHEHRKQFVCSQCPKSFALKERLRLHMRLHSGEKPYPCDLCDKKFARGGQLQQHMVSHHKTSIQQFNCTKCSASFSTNANLRVHMERHEQGMEHRCSICENQFANELALRAHINQEHHKLTQFECEICHKMIEPDEDLATHMQRHTAVKTHVCEVCNTYFTQKSQYNVHMRMHTGERPYQCRICHQTFAHSSVLKLHIRKHTGEKPFRCQLCEDEVAFSQLAHLKNHMKKIHKQQKPYMCEGCHDFFKIKVELQSHVEHCAKCPVDGDKPSGNQSEDAQILSVLRFNMAVVLKKISSAQKLRQLGYEKRLIDNVIIASLKLAQRQSHDDATMTPLARLRLNVEEFLKWIVPAPTMQKFSDELLSIDTILEKIATMYMKQK

SEQ ID NO: 15886 - DNA, 4233 bp, DROSOPHILA
actgaaagtggggctccagaaaagcggattcccaaagataaagcctcataagtagtagaattcatcatcggattacttaaaactagttgctttcaaaaaatttggcgagagtccacaaattttatatttaatttgataatattgtttttttagtttatatttccaatcccttggagtttttctagccagtcccacacagtttctagccactgttttcatattgccataggttccttttaggtttaatgacgcaagttgcaacaacaacgggaatccacaagtcttgccaaatcataatgaggttattatgcctgtctaagtctaggttaatctagggctaggggctctgcaacgagagccccgcccccagaatgcattccaaatgtgccttaccaaaacgggtgacgagtgacctccctccaaattggaaagcttcgttgcccaacaaacttagttttagttattctactcgtagactaagttccatttgctgtttttgctgtagttagacaataaagtgctttttatattgtatactagctcatttggctttacaaattttattacttactaattttgtaaaatggcttgcaaattttgttacaactacattcaatttagtttaatttctaattgtaagcaattacataaactaggacactttgcaaatgtatataatagacgtataaataaatcgtattttgtaccaataattgatcagcttccaattcaaaaaaggaacaacataaaagactcataaaaacaaaactgatggttaatacacttgttttcgaagacaagtattaaaagtaatgcatagaaaataatatagcagattcacaacataattaatcgctatggagcgacttcagattctttgaaagtaatcaaaatcaatgccaatcagaactgagcaaggaatcacaaatgggatttcaggtacagtacgaaataagaaaatactttacggactcaatagcaaagcaaatagtgcctattttcacatggactcagttccctgctccaaaaccgcctgccaatcgatgcctttgaagaatggatgagcctgcaattggtcgtagtccaaacgtagctccggagaaagctgcagcagttgctccagcagatccttggcatgatcggaaatctccaacgactcactaggatactgaacacaaccatagaggtccagttgcccgggatgcgtgactttgtagggctggaaagaaagcagattgctattatccaaacattttcaatcgagaactcaaaacttacaactcccagcagaagctgatagagcaccacgccgtagctccaccagtccgagcgaaaagtgagcggtctttctggtgccacaaagtgattagccactgcctccaagttcagtgccttgtgcacatagttgtcgtccgaggttagaccctcgttctgatagaaatacgtcaggagcagctgtcccttggcgcccagtaaaatgttgcccatgtgcagatcgcgcagaataacgcccttgccgtgcagactgtgtatggcgatggccagttcgcaagcccactgacgcaggcactgctccggaatgggtttacttcggatgcgattttgatccacctttttatttcttttgggtgtaacgactcccgcttgcaaattgctcagcgtgtttgttacggactttaaaagctgctgggagctgcgaaccaaatcgctgacatcgctgtccgaagtcagaggtggctcctctgcctccttctcctccggctcctggtccgagggaaaaagctctccataattgacactcttactactcgtgggcgtgtagctctgcaggtaatcgtacaacatgccgccctccgcctgccgcagtagcagaaaaatcttctgctccgactgaaagtaggccagcagttggaccatgtaaggcacctgctggggcagaaagatgctctgggtcagcgagtgactggccggcttctcgacgcccttcataatggcagccggctgctgggatttcgtcacacactgcacctgcatcacacggtcctggagaatctgcagcaccttgtagcgtgccaactgattccaggggcactccaaatggctcacgctaccgccgtctgtcgtgtccagcgagagctggaactgcagcttcttcgtcggacaatcgttggccaggaaattggcgtgaatctcctcagcccgcgccaagtatttggctatcttcgccttggctataaatctacgctcctcactgctatcctgcttggccccattgagcagcaggtccacaccatgcttgtacctctcgtgggcttcggcatactccaggttaacctccgcttggacggcatgactgaactctagagccgcctcatatatgtagtcgctgtcgtcgctttctatggaagccatgggcgtcagaaggcggagataatccctcttggtcagcgctacgtctgtcttgggctcctgtttcgtttctaattcgatttcagtttctttggcctgggattcgttgttcgtttgctccttatcacagcgcggatctagaggcgtgatgccccccgcgtcgtgtgggtcatagggcaagtctagtttatcgcaaatgtcggctatggcaccagcgcaagttcctgtttccgaaccgccacttccgcagccattgtcttccgtctgcagccgcagggatcgctccacatatagcttcttaagtggcgatccgtttggcgagggtgtctcctggaagaactgtgtgaaggttgagcacttgtacagcgccggatgctgcgctgcaaagtctaataattgcaggatgtactccttacgccgttggatgactgccgcatcgaatctcttgaaatatgtgctatctgtgggcactggcaacttgccgggtagttggagactcttgtggcgccggctaagctcgcgatgcagccgcttgacatcgtggaaccgtttccacaccaccaggcaggtcagagcttgaggtaccgaccttgggaagacctaaaagtgggtgaggtttactatttggaacagttcatctgcccccaaaaaaaacgacttacaatcgaggtgattttgtatattgtgtacccgcccttgtgctcctgggtgtccgtcactgtgaagctgtggatccagccgcccaggttgagagtcattctggtttctgctgcaagacctggtggtttagtttctaaacatatttcccatatcaaatgtcgttgttccccaacttttttgcaacattaaagctagtgtgaccaaaggacgccaaaataaccacttccggacttcgaaattaaataagagcatttagtagcttatttttttaacttagaaggattaaattaaaccataaaaatattaactgttttttaaacacttttatttaaaataaaaaacggtcacattttaaaatttaaaatttatactctaatcgaaagtatcataagtatcgatagtctgcagtgcatgtgggttatgtcatgactaatgacaaattgaattgcacagaaaaggtggaagtccctgctaacgacattgcttcatgtgttcatttaatacaacatatttatagctatagcttttttaaatgtgtcaatttactataacattttaaaacttccgaataaaagcttcacacaaacggattttcacaagtaatatccagatagaaataccattttaaaaagaaatttttccgattttaccaccatcgcttgcgcatgcgcacggaacgcgtgatgcgtttttaagtccgtcattaggccatcgcccatcaattttagtgtttcaaccgccgcccgatacggtcacaccgctcgagaagtagagaaaaaagaaggcgacgaaccacaggcagcaagcaaaatcgacgccgcacgtaccgggagcatttaaataattttttctgtggattaattttaccgaaaaggcttcaacacaatgactgagcgcgagaacaatgtgtacaaggcaaagctggccgaacaggccgagcgctacgacggtgagtagtgattccgaaaaaaaatggtagcaaaaatggtagaaaacggtagacaaatgctagtagagtagggaaaaaattttctcgactgaggagcgccaacgtttttggggaggggtcgcctgggatttttttttgtcttcccgatccattgcgtcgtcgcgtggtcgttgaaaaagtctagagctccgcttttcgtccgaatgtgccaatta

SEQ ID NO: 15887 - DNA, 2112 bp, DROSOPHILA
caacgacatttgatatgggaaatatgtttagaaactaaaccaccaggtcttgcagcagaaaccagaatgactctcaacctgggcggctggatccacagcttcacagtgacggacacccaggagcacaagggcgggtacacaatatacaaaatcacctcgattgtcttcccaaggtcggtacctcaagctctgacctgcctggtggtgtggaaacggttccacgatgtcaagcggctgcatcgcgagcttagccggcgccacaagagtctccaactacccggcaagttgccagtgcccacagatagcacatatttcaagagattcgatgcggcagtcatccaacggcgtaaggagtacatcctgcaattattagactttgcagcgcagcatccggcgctgtacaagtgctcaaccttcacacagttcttccaggagacaccctcgccaaacggatcgccacttaagaagctatatgtggagcgatccctgcggctgcagacggaagacaatggctgcggaagtggcggttcggaaacaggaacttgcgctggtgccatagccgacatttgcgataaactagacttgccctatgacccacacgacgcggggggcatcacgcctctagatccgcgctgtgataaggagcaaacgaacaacgaatcccaggccaaagaaactgaaatcgaattagaaacgaaacaggagcccaagacagacgtagcgctgaccaagagggattatctccgccttctgacgcccatggcttccatagaaagcgacgacagcgactacatatatgaggcggctctagagttcagtcatgccgtccaagcggaggttaacctggagtatgccgaagcccacgagaggtacaagcatggtgtggacctgctgctcaatggggccaagcaggatagcagtgaggagcgtagatttatagccaaggcgaagatagccaaatacttggcgcgggctgaggagattcacgccaatttcctggccaacgattgtccgacgaagaagctgcagttccagctctcgctggacacgacagacggcggtagcgtgagccatttggagtgcccctggaatcagttggcacgctacaaggtgctgcagattctccaggaccgtgtgatgcaggtgcagtgtgtgacgaaatcccagcagccggctgccattatgaagggcgtcgagaagccggccagtcactcgctgacccagagcatctttctgccccagcaggtgccttacatggtccaactgctggcctactttcagtcggagcagaagatttttctgctactgcggcaggcggagggcggcatgttgtacgattacctgcagagctacacgcccacgagtagtaagagtgtcaattatggagagctttttccctcggaccaggagccggaggagaaggaggcagaggagccacctctgacttcggacagcgatgtcagcgatttggttcgcagctcccagcagcttttaaagtccgtaacaaacacgctgagcaatttgcaagcgggagtcgttacacccaaaagaaataaaaaggtggatcaaaatcgcatccgaagtaaacccattccggagcagtgcctgcgtcagtgggcttgcgaactggccatcgccatacacagtctgcacggcaagggcgttattctgcgcgatctgcacatgggcaacattttactgggcgccaagggacagctgctcctgacgtatttctatcagaacgagggtctaacctcggacgacaactatgtgcacaaggcactgaacttggaggcagtggctaatcactttgtggcaccagaaagaccgctcacttttcgctcggactggtggagctacggcgtggtgctctatcagcttctgctgggagttccctacaaagtcacgcatcccgggcaactggacctctatggttgtgttcagtatcctagtgagtcgttggagatttccgatcatgccaaggatctgctggagcaactgctgcagctttctccggagctacgtttggactacgaccaattgcaggctcatccattcttcaaaggcatcgattggcaggcggttttggagcagggaactgagtccatgtga

SEQ ID NO: 15888 - protein, 681 aa, DROSOPHILA
MTLNLGGWIHSFTVTDTQEHKGGYTIYKITSIVFPRSVPQALTCLVVWKRFHDVKRLHRELSRRHKSLQLPGKLPVPTDSTYFKRFDAAVIQRRKEYILQLLDFAAQHPALYKCSTFTQFFQETPSPNGSPLKKLYVERSLRLQTEDNGCGSGGSETGTCAGAIADICDKLDLPYDPHDAGGITPLDPRCDKEQTNNESQAKETEIELETKQEPKTDVALTKRDYLRLLTPMASIESDDSDYIYEAALEFSHAVQAEVNLEYAEAHERYKHGVDLLLNGAKQDSSEERRFIAKAKIAKYLARAEEIHANFLANDCPTKKLQFQLSLDTTDGGSVSHLECPWNQLARYKVLQILQDRVMQVQCVTKSQQPAAIMKGVEKPASHSLTQSIFLPQQVPYMVQLLAYFQSEQKIFLLLRQAEGGMLYDYLQSYTPTSSKSVNYGELFPSDQEPEEKEAEEPPLTSDSDVSDLVRSSQQLLKSVTNTLSNLQAGVVTPKRNKKVDQNRIRSKPIPEQCLRQWACELAIAIHSLHGKGVILRDLHMGNILLGAKGQLLLTYFYQNEGLTSDDNYVHKALNLEAVANHFVAPERPLTFRSDWWSYGVVLYQLLLGVPYKVTHPGQLDLYGCVQYPSESLEISDHAKDLLEQLLQLSPELRLDYDQLQAHPFFKGIDWQAVLEQGTESM

SEQ ID NO: 15889 - DNA, 3946 bp, DROSOPHILA
ataaatggccgaatttgcaagtcagttccacttgctctttaaaaagcgaatctcaccgaaatttaagcaaaatttatcaccgaccaatgtgaaattccactaataatttttcagcggtgttgatggctttattgacatcgccagaaatgattcgagctgtagcagcgaaaatttaatcaaagacctaacccacgaacctggacgttctcacatagaaaatgaaaacgaaagctgaaagacagatggatcgttcgatgtgagctctttttacacttggcttacacgacgactgcggcgtcggtaaaattaatataccaaacaattacacggcccggcaaaacaattttaagcccagttaatgccgtcgcacagtggctgcaagccacgcaaattcgccgcgaaaaattgcccacaattgccagtggccgagaaatgaaagcgctcaaatttgcatactcgtactgtcaaatgaagcgtagcaaaaggaaaattgctacacatactaattggaaaagaaatgcaaaaccaatgcaaatgaaaataatgacagggcgcggtttgcgaagctgtctaattatttatttgacattggcaatgacaatgaaaccgagagtcccacagcagagtaatggatttttctttcaactgcttaagttcgttttccattgaaatcttatttggacatataaaccatacgtagaatgataagaataataaaaaacaagtatgttggacacaattgataaggaatctttagtactttctcacctaaaaaaggtgatatatatttgaattcatgttgtcatgatagctactcgaaccactgtgcgttggctacagtctgctgatgctcacagtgtttgaaagttaagacttttgctttccttcccccgacttggtttttgcttttggaaagaccaagcaaatggataaacaagagttcaagaggttgtcagccccgcccctttgcgcacatgaggcaagaaagaaaagaaagttattacaaaattaacagaggctgacagctgacaagggcagaggaatggggccgaaatggaactgtatctagcttgagttgggtccgaccgcctcgggcagaaaatgtgacaaatttggaggggaaaagctcgtatgagcgggacttaccacctccattgttggcactggagcagtgtttggagctgagtccctggcccgtgttggatgcagagttgggcagtccgcagccgctcatcacgccgtacttgatgggcttgaagtggaagaacgagggcgagtagccggaaccggcgcgactcagggaactgaactgctcctcgcggtcctccacgtacaggccctccttgcccatggccgccagttgcctgcccttgggcatgaacatcaccaagaagaccgtggcggatgtggctaccagaccgaaggccacgcaagcgtccttgtgccgctcggccacggccaggccgcatagcatccatcccagccagatggggatggctcctccgatggccagcccaatgtaggtggcctcacggtagttgtccctgatgccgcgcgacttgatggctagcacggcgatgaagacgatcagaaagacaatgtagatcagcgagaagagcagctccgagaactgcgtcttgcagagcggtattagtacggtgctaaccgccgctatccgggtgtagatctccggagtcccgtccagcgttgtgtaggacgtggggtaaaacagtgccgagtagttggtctgtgaggccaccgtggtgctaaggaagccactgcccatcacaggcacactggtggtgtatacctccggtggttgggtgagcagccactgccctccgatcgctacctggatgagcagcgcaaagaggagcagcaatccctggtatggagccggcagatacacccctccatttagactaatcagaaatacgcatttgaccagcagggcggcaaagaccagggcgtaggccacgcccactccgaagcggatggccccgcaactgatcaacgagggctgtgcggtgatgatggcccccaaactagcgcaggcgaacagaccgagaagcagcatctggcccagaaagaggtgcctacgcgacggggacgtccgccaggccttgaagagcacaaagatctcgaacgctgccatcatgagcatggtgagggtggccaggactagcaccggcaccacccacggctccttgcgtagtcccgcgaagggcaagtgggtggacactatactgggcggtgtgctgttggagctgctcccgggagtcacccgtccagtggtgccggctgctcgcgccttcgcccctgaactccgacggggcgtggctggtgtggtggtggacgtggtgctgctagaactgctggccgatagtgtgggtaccacaaagaattccgtcgacatttcgagacgggcagcactggagacattgccacccggaaaattgagatccaattgtttggcagatcgctgggtctgaggagctgccggagtagtggtactagtggtgctacttgtagtacttgtagtcgtgctggtagtagtggtggtgctggtggcattacggctactcggcttaagcacctggtaggcgttgcgatccgattcctggctggtcaccaggcgcacccgccgccaaatgttgttgccattaacgctgaggctgcgcgacgccggcgtggtggcgatcaactgcatgatcagcagcaggatcagcagcaggtggcgtctaccggccattggatgtggtgaccttcgatgccctggacctctgacaatataatcaaacgcggcacatctcttgcaaacgcacactaaccacgcactcgcgatcgcgattgttcaggttcgtaaattcttcagtcctcgcaggccctagatcatgaattcttcttctcgattctcgcgctaaaacgtccgctcgctccgatcgaccaactgcaactgactggcggctctgcaagttgggctttggaccggcttagtcgtttgagaccagtttgacggcagccaagtcgaactaacacttgtttgagttcgatgtgcgtttgctaacccggctaacacttacaggaacgcaacatgatgcgtgggaggcagttggggtttggggcgctttatatgattttttgcaatgtagagtattgcacgagcatttactaaagcatcctttgaatttgatacaacattcgttactcgatcttctggctttaaggtttagtatatagcttcaacaactaatgttctaaatagctcaatgtcttgctgaagggctattgatttcctctcgaaagctatggtacttaatttcctatttagagccagtaagaactcaatttatctttagcttccgtgctaatccgctggaacatatactttaacacaacatttacatacgtaagttttttttccatttgataattattccaattagatttcatattgcgggatattaacattggacacaattttttcctctgcggttggttgcaacatcaactgcagacgcgatccacagacctagctcaggatccacactcaaaccgactgcgggatggagaacactttcattcgttctgcatatgcggaatttcggtttatgggctctgatgctcgagttggctggtaggaaagtgctatgggccattatctattagccaaccgcttttacggtctcctcgcggagcctctctcctcgaaaacgagccaacaaaaggccaaatagcgaaatccgagcacaaaaggtgattgtaaatcaaaagagcgctaatggtatatcgatatacaaagtgttgaggcgggaaaggcatcgccaatagcgttagaaacggcaatagcaatagcaacccgctctgattccttaggtcttattgtattcggcgcgcgctttcagtcaaccgcagttagaattcagatcacctgaatgagtgggca

SEQ ID NO: 15890 - DNA, 1946 bp, DROSOPHILA
tcgatcggagcgagcggacgttttagcgcgagaatcgagaagaagaattcatgatctagggcctgcgaggactgaagaatttacgaacctgaacaatcgcgatcgcgagtgcgtggttagtgtgcgtttgcaagagatgtgccgcgtttgattatattgtcagaggtccagggcatcgaaggtcaccacatccaatggccggtagacgccacctgctgctgatcctgctgctgatcatgcagttgatcgccaccacgccggcgtcgcgcagcctcagcgttaatggcaacaacatttggcggcgggtgcgcctggtgaccagccaggaatcggatcgcaacgcctaccaggtgcttaagccgagtagccgtaatgccaccagcaccaccactactaccagcacgactacaagtactacaagtagcaccactagtaccactactccggcagctcctcagacccagcgatctgccaaacaattggatctcaattttccgggtggcaatgtctccagtgctgcccgtctcgaaatgtcgacggaattctttgtggtacccacactatcggccagcagttctagcagcaccacgtccaccaccacaccagccacgccccgtcggagttcaggggcgaaggcgcgagcagccggcaccactggacgggtgactcccgggagcagctccaacagcacaccgcccagtatagtgtccacccacttgcccttcgcgggactacgcaaggagccgtgggtggtgccggtgctagtcctggccaccctcaccatgctcatgatggcagcgttcgagatctttgtgctcttcaaggcctggcggacgtccccgtcgcgtaggcacctctttctgggccagatgctgcttctcggtctgttcgcctgcgctagtttgggggccatcatcaccgcacagccctcgttgatcagttgcggggccatccgcttcggagtgggcgtggcctacgccctggtctttgccgccctgctggtcaaatgcgtatttctgattagtctaaatggaggggtgtatctgccggctccataccagggattgctgctcctctttgcgctgctcatccaggtagcgatcggagggcagtggctgctcacccaaccaccggaggtatacaccaccagtgtgcctgtgatgggcagtggcttccttagcaccacggtggcctcacagaccaactactcggcactgttttaccccacgtcctacacaacgctggacgggactccggagatctacacccggatagcggcggttagcaccgtactaataccgctctgcaagacgcagttctcggagctgctcttctcgctgatctacattgtctttctgatcgtcttcatcgccgtgctagccatcaagtcgcgcggcatcagggacaactaccgtgaggccacctacattgggctggccatcggaggagccatccccatctggctgggatggatgctatgcggcctggccgtggccgagcggcacaaggacgcttgcgtggccttcggtctggtagccacatccgccacggtcttcttggtgatgttcatgcccaagggcaggcaactggcggccatgggcaaggagggcctgtacgtggaggaccgcgaggagcagttcagttccctgagtcgcgccggttccggctactcgccctcgttcttccacttcaagcccatcaagtacggcgtgatgagcggctgcggactgcccaactctgcatccaacacgggccagggactcagctccaaacactgctccagtgccaacaatggaggtggtaagtcccgctcatacgagcttttcccctccaaatttgtcacattttctgcccgaggcggtcggacccaactcaagctagatacagttccatttcggccccattcctctgcccttgtcagctgtcagcctctgttaattttgtaa

SEQ ID NO: 15891 - protein, 583 aa, DROSOPHILA
MAGRRHLLLILLLIMQLIATTPASRSLSVNGNNIWRRVRLVTSQESDRNAYQVLKPSSRNATSTTTTTSTTTSTTSSTTSTTTPAAPQTQRSAKQLDLNFPGGNVSSAARLEMSTEFFVVPTLSASSSSSTTSTTTPATPRRSSGAKARAAGTTGRVTPGSSSNSTPPSIVSTHLPFAGLRKEPWVVPVLVLATLTMLMMAAFEIFVLFKAWRTSPSRRHLFLGQMLLLGLFACASLGAIITAQPSLISCGAIRFGVGVAYALVFAALLVKCVFLISLNGGVYLPAPYQGLLLLFALLIQVAIGGQWLLTQPPEVYTTSVPVMGSGFLSTTVASQTNYSALFYPTSYTTLDGTPEIYTRIAAVSTVLIPLCKTQFSELLFSLIYIVFLIVFIAVLAIKSRGIRDNYREATYIGLAIGGAIPIWLGWMLCGLAVAERHKDACVAFGLVATSATVFLVMFMPKGRQLAAMGKEGLYVEDREEQFSSLSRAGSGYSPSFFHFKPIKYGVMSGCGLPNSASNTGQGLSSKHCSSANNGGGKSRSYELFPSKFVTFSARGGRTQLKLDTVPFRPHSSALVSCQPLLIL

SEQ ID NO: 15892 - DNA, 3038 bp, DROSOPHILA
atgtggaggcgtatccctggcagcgagtttgccaggaggagaccaggaccaacgtcaatgggaagtgcgagaacggagtccaagggaactgcgacttcagctccattgacaacagatcactgcacaatcacgcttttatattcacgcccaccgctcttcactactgcgatgtggttataaggagaacaggttaagtcaaacataactaaagcaataatatttaaaactactaaattatcacctcctttactgttttagatcccaaacaaacggtcatcacgggcatcaagggtctccgggtgctgaagacgacccaatcctcgttcgtgaacttcgtgaacgatgagttcagatctctgccagatcagtatgatcgcatctttagcaccgtggtggattgctcctgggagtactccgataccgagaacttggacttcctcagggcctggcaaacggtcaaaaacataatcattcgtaactttgctggcgatccgcaggtgggcgtgtcctcgccctccgttcagcacaccctgtatctgagtgaaagacaggtcctggatgtcctgccgcaggtgtcggtcatttcgatgaccatgccaaacaagcactacttcaacttcgatacgaagcccttccagaagattgcacccggcgacaacaatgaagttttcatcccagtggacaagccacatggcaccatctatgcccaattggcccggaagaacatcaatagtcacctgtagatcgatctctgatgtagtaaatctaaatcaatctaaatcaatttagccaattcataattgcatgcggcgaagttatatatgtattttaaattatttaagcaaacgaatcatatgctgcgttcttcttatttaaacaataataaactaataaaaaataaagtgtaaaaatgaataaatcgattgcaaaaccatatttcgagatcacccttgccttggctgaataaatccaaattatatcagaactattttctaaaatcctaaaatgaggcatcgttcataaaaaaaaatatataaaataaattccacaattttcgaccactttggcagtcaaaattcgcaatctaaattcgaaattagcaaataaccatttagccacaaacagcgtgaccatgaccaatcgactggccttgcaccacatcctgaccacccagctgcgaagggactgggaacaggaggagagcgccaagaccaggctgtcgcagctgtccaggagggacaggatcaaggcctcgctaagatcgagtcagttgccaggacgttacctgttgcccgacaccagaaagacctacgacaatatggtggccaatattcactcgaccatgaagtgtaagctgttgtgctaaaaactaaccagaaactttcaaaaccaatcaatcatttacttagcggtacgagcaccacgaagaccacggccaacggggccgctgcccacatctggaactccgaatccagtaccagtagttgcaccaccactgccatcgaaactggtgtccaagcaaccgcaacgcaagtcggcggggcgcatcaagggtggcggcaactcttcgaaggcggacagtggccatggcattgccatcaaatcattggcgaaggtcaaggcctgcatcaaccagaagcagaagagatcgcgtggctttgagcagcacaatcgcatccgtgaagtcatccaacagaagaaagtgctggagaccatgttgcagcagcacaagaagctgcaaagcgatcgacacaccatagcgatggatatccagcgaatgcgtgccgatctggacaggattcgcaacaagctggacacctcgctgcagagcctcaactcgacgcgcaccctattcagtgccgccaacaaggcgagtctcaggaagtcgaccgccctgcagaagccgacgcaaaacatggtgacctccaccaatcgccgctcgggtggcaaacgaaaggcccggaccgttgccattccgatgaaccggcaaagtgtgctgaccaacaaggcccctattctcaaacgaaaagttcggtgaaatgcaaagtaaaaaatgagaaaaaaaaatgatttaaacttcggcaaaaaaaaaattattttcaaaataaggcataaactacaataattgttcttttcagtaaagtattctttcactttacaagcataagtacatagaaaaatttactgataaaatctgttactgtttaaatctttgacattataaaataaatttaaattaacaaatttacaatttaattaacaattttttagtttaaattcaaagccgtaaaaatcgatatgttatcaattgcttttagtgttggaaagcaaatggctaatatcagcgagacgtcttacaattctctggacaaaaggaacggtcacactgctcatggcgtctgtttttcgccagcggatttttgtttttaattattttgcttaccattttcaccgatttgcctaattgttcgacaactgggagcctaagatgggctcctccaagaagcacaagaaaaacaagtcggagcgacgcgagaaatatgaaggtgagtgaaatgaaagtgctgtgtctacgtgagcccctgttgccataggccatctcgctcacacattttgccgcttgtttttgagcatgcctacacttagaaaaaaatgggtgtacattatttgtcacaattaatacaaaatgcatggttagaaataatctacgcgtctaaaggcagtaataatactattcagcacccattataatacctataccttatataacctggctttctcctatatatattatagaatacagtcagcaccaggacccggctcagctgcaacgaggtctaaagcttatccttaaggtgggctcgaatgccacgccggagtacagtgccaattcgccaatggtggacggaggaccgcccacagcagccgaggccatgatgtcgccagtccccgaggaacttcaagatcaccagggtcatcgcgagcgccacaaaaagtcaaagaaaaaaaagaagaagaaggatcgcgagaagaagcac

SEQ ID NO: 15893 - DNA, 978 bp, DROSOPHILA
ctaaaatgaggcatcgttcataaaaaaaaatatataaaataaattccacaattttcgaccactttggcagtcaaaattcgcaatctaaattcgaaattagcaaataaccatttagccacaaacagcgtgaccatgaccaatcgactggccttgcaccacatcctgaccacccagctgcgaagggactgggaacaggaggagagcgccaagaccaggctgtcgcagctgtccaggagggacaggatcaaggcctcgctaagatcgagtcagttgccaggacgttacctgttgcccgacaccagaaagacctacgacaatatggtggccaatattcactcgaccatgaagtcggtacgagcaccacgaagaccacggccaacggggccgctgcccacatctggaactccgaatccagtaccagtagttgcaccaccactgccatcgaaactggtgtccaagcaaccgcaacgcaagtcggcggggcgcatcaagggtggcggcaactcttcgaaggcggacagtggccatggcattgccatcaaatcattggcgaaggtcaaggcctgcatcaaccagaagcagaagagatcgcgtggctttgagcagcacaatcgcatccgtgaagtcatccaacagaagaaagtgctggagaccatgttgcagcagcacaagaagctgcaaagcgatcgacacaccatagcgatggatatccagcgaatgcgtgccgatctggacaggattcgcaacaagctggacacctcgctgcagagcctcaactcgacgcgcaccctattcagtgccgccaacaaggcgagtctcaggaagtcgaccgccctgcagaagccgacgcaaaacatggtgacctccaccaatcgccgctcgggtggcaaacgaaaggcccggaccgttgccattccgatgaaccggcaaagtgtgctgaccaacaaggcccctattctcaaacgaaaagttcggtga

SEQ ID NO: 15894 - protein, 281 aa, DROSOPHILA
MTNRLALHHILTTQLRRDWEQEESAKTRLSQLSRRDRIKASLRSSQLPGRYLLPDTRKTYDNMVANIHSTMKSVRAPRRPRPTGPLPTSGTPNPVPVVAPPLPSKLVSKQPQRKSAGRIKGGGNSSKADSGHGIAIKSLAKVKACINQKQKRSRGFEQHNRIREVIQQKKVLETMLQQHKKLQSDRHTIAMDIQRMRADLDRIRNKLDTSLQSLNSTRTLFSAANKASLRKSTALQKPTQNMVTSTNRRSGGKRKARTVAIPMNRQSVLTNKAPILKRKVR

SEQ ID NO: 15895 - DNA, 7339 bp, DROSOPHILA
ccggatctcgtacgaggagctagaggaccttaccttcgcccgagaggttggcctgaatgtggtagtatcccatatcgtggggaccccaaagtacgtggacaacttggagcacgcgatgtccgctatgcactgcgatggcatgagactgtacgctagagtggtgctcaacgaggtccagggctgcaaaggggagctgaactgggcgatcaaacgctacgacgggttcttggtggaactggcggagccggccactgttccggacataatgcacctgtgccccgacgccgagtgctttatgcagttgacatacgctgcgaagaaacccattatctttgatccgcggcttttggatgagcaaaagcttagggtggaccccgcgcactactattacacgttctattatccggacaagtacgtgaccacgtgcccgcagccgaaaggtacaatctacttccgcttactgcaatccgccatcttcgagcagatcagcccaacggcactggccaatactccatactgcgaccgatctcacactggagcggatagcttggcgcgttccgtggtaactgcctccattgaagtccatgcggtggccatcgtcgtgatcggagtcaccacgcggatggtgcaaaagatctcccactttcggccccacgcccccattctcttcgttagccacatgcgctccgccgaggattacgtttccatttaccacaacgtgaccatgcttccattccgcaccaagtgcattattgcacataggcggaacgtcttccttaaggccatatacgcgttggcctatttggtgaagcgaaagatcgccaagcagaacgatcaggtgatcctggtgtacaattacgaggatggcacaaagtttcctgaaaagtacatcgtgtacaagctggacagaactaactttgcgtcgcacatggcggaaatcctgttccctgtggaccaggaccagatgcagaccctcaaggaaatagaaaagacttagttcccaagtgtgtgtagatagtttatttgctttggtgagtaattggaatgttaacgcgttggcctagaatatacaaaacagatacagataaatacatacataaatatatagatacacatttctacgctgtactaggggctaatcaattgcggctgtacagaatcaatacccgtaatcatatgagggaatttcgtcgttctatgtatatacagactatttacgggaaatcaacacttgtgtttcttattcaccgagacttaacaatgccaacaagaagtaactaattttctaaaacctcatgtgtcggccttttcggcaacggagcccgaaatctttgagctgagcccgctcaggggattttttgcagagctctcgacgtcacgtgctcatatgcggccttcagtgtagtgtagcagtagcccgccattccattcatctcggcttggaaattggggccaccggtcagatcgtccaataaggccagctccgcacccaagtggggaacagcagcgcgcagcatcgtgagcatggtgagcggtatcatgttgtccgcattgagctgggcggcattagctgtgagtcggaactgcttagtgaaactatttacggatatctggacctttgagactcacctgccatggcgtgttcgtaggcctcagttagtagctgcgtgctccgctgtatcacagtcaacatgtcctgtggactaaacttctcctgcagttcctttaacgtctgcacggactccacaaacttggggtccaacattacattgtgcagaaaactgaaagcaaaattgaaaattacaagaaagataaaatagcgtagacattttagaatacctttcatgacccataagttcaacaagctcttggtcctttagtttctcggcaagattcagattctgccgatacatttcgtcctttcgactgtacttatttgcatacagcacaaacaaagtggagtagatgccctctgatagcacgagtgggtataatagggtaatatgcgatatgacttccctgctgccctccatctggcaaagttcctcgggcaacgctggaaacatcttccgcacaaagcggtaaatgcgacgcgatatggactcccactctctcatggcttgcttggccaaaatcggggtgggtttaactttccaatagccatatgagtagtggaaacagttggcaatgcgctcattcagcacgtacagcgggtgatggcgatccttaaaagcctgctccaggtacaaacgtatggaggtcacatcttgctcggtaagcaccaaagccattccaaaactgggtacctggtccagcactgcactcgttgtagacgttgttgatgttatcgagcaatcgatgttgttcatgtgcttcgaaatgctgttattgttgttgtgacttagtttcgaaaagctttcattgaacgtgctggattcatcgccgttgacagtgctgttcatgaggctttggtccaattggaaactagccagactactgttgtccaagtcacgagatgtattgtggcccatagagattaagctatccgctctctgcaatccgcctggcttgctgttcagtgcctcttgggattggattcgtcgcggtggaaatcccaagaagtccagcgccgatgcagcctccgtttgcagcttgctcagtgcgctggtggtggtgcgggcctttgccagtggggatgatgttttttgcggcagcggcagactgagcaggatgttgttaaagtagttgccaggctttgttccttcccgagcccgctgtttgctcatgtacaccgctatgcagttccagatttgggccgtgctcaaagtgggtttcgaggattttctgagggtgccagctgattgattgcctccagagctgctagtgcttgccgtgcaattggcaaggtccgattcaaagttgttaaacaatgatcgccacttgcgattgtgatctaccacttggcgcccaagggagctgcagtaaagccattatattattttttcattgaagtacgtttgtgggttcttattgactcacctggggtacttaggaaagcgccgatttagtaccagttcaccggcctgtatccgcaccgtgtcccaagtaccactaagctgtccaaacattttgttcccaataagctcgcaagtgtcgtcgaactccccggtccccatggcaccgcttcctccacaggcatctccactgggcatgtagtattccccccgtccgtttgggccgaggagcgtgagttcgccctcgtagtaatagtcgttctcgaagacagcaaccccactgcctgtgagatcgtctccggagaagctgccctcgaagtagtcgccgcggttggtgatgcagctgccgattccagatcgcttgttatccgcaaacatgcccatgtacttgtccccgctaaccagatcctctatcactccgtatccactgcgtgcattggcctggtactcgcccacgtagatgtatcggttgttccgcatcactccatggccgtgaaacaggccctcgcaaaaatttccttcgtagacttcgctctcgggggaatccttacagtgcatttcgtaaacaccgtggccgtggaaccggccacctttaaagttacctacatacagccccgttgtcggaatcaccattttgccgaaaccttaggaataacgttcttttaatgcttttttctatctctaaactatcgttttggatgatcatcgataatttacataggagctatataactaaataacacccaggtcaattataactcaccttcaatgatcccgtgttgcagctctccgcagtatacacttccgtctggatactcaaggtagcaatttccgtggagaacgccctttctccaggtaccgcacgctttcaccctggagaactttgggtgttcccgactaaactcgtaccccgtggagcgatagctgggcacaggacttccgagaggtttgcccaaggacgctataatgctcgattgcaactggtccagccacaccttgcgcatctcctgcgaacgggtgcttaccagaaaggatttttccggcgtggtcaagcgcaggctgtcgccttcggtccacacccacagggtagttaagggatacgagtacagcgagttgccgcttacctggcagaggaagtccgaaaagagaatgaaactgttgcttgacctgctgataccagaagtgactagtttcaatggaaccaaagccgacgtcaaaataacccttctgtgacgtcctctgaactgcacaatcctcgggtttctatcgttgctgctccagaaatccttggtattcacggcgagctcctggctgatgcagctgtgccgcgcgaactccgaccaggccaccctatgctctccgtactcagattgcgtcctcaccagcagctccataaactggacaaacagctggtagatactgaagggttgctggaacaaccgagtgacgtagctctcctcgttgagctcggccagcgggctgctgagtccagtaatggcgaccaccgcctctccaaatccattgaccgagaacacatcgcaataggcctttgtgtagccgtcaaacagatcgatgtactctttgtaatgacagataaacaacaggtcggcaggctgcacaaagtccgctcggtagaatccctctagcgaatgcaaagtggccactagcaggcacagtattctctcccagttgatcagcaagggaccgagggcgctgagcggctccagtgccgactgtctttgccagatttcgagtgtttggactgcctgtcgatgcttgagaagcagttgtaactgtgactgcagatgactcagatagtagtgatactgccgctggaactgcctttggttttgaagtgtgtatccgccagaacacataagcaaacgtagttgtctgggccacgctgctcccaactgaagctggagaagcgtctgcgcgtatgtgctggactgctgcagatgtcgcattggaggcgcaggttgaagggaatgtatttgacccgaggcattgagcagtagtgtatggtagtcgccgcaagtcgcctcaagcgccgagttttgttctatgggtagtgctgccgtgttttccgtaattgtgatctccatgggcgagctgacatcttcacccaactgagagtggttgttcaggccccagtggtagagccttccgtccagagtgcgggccaccgtgtgctctaatccagctgcaatgctgcacacgcccatgctgtctagtttctgcaagcgcatcacattggccctccggatatgatccccactgcccaggagaccattattggaggctccgaatgtgaaaagttgggtgtggagcagagcgtatccttggtgaagaaggtgccttgtgttagccgcaacgctgcgctccgagtggccactgcttatggattttacagaggcccgttcatcctcgggttcttccttcgcactggccaccgacagctggagtgcatcgtcggccaggttgtagggagctactaacatcacaaagtgctcgtttccggctgctaagtccaacagttccttgccctcttcgtaaaggcgcatgtgccgaggctgttgttctgccttgaagacttcgccgcagctgcccatgacataggtctccccactagcgccgacgaagacaacgccctgggcggagcagcaaacccgtcggatgcgtacgccctcagcatgcaattcgagagggtcgaaaccgagggtttgccacgcatgtggatgacccacatcccggccagatcccgtggcttggcgctgcacagagccattggtgaggactacgaatagttcctgactgccggagcagaagtccatatccacaacatcggtacgcaggagttgaagatccatgtgttcgcggttggcctgcagcttggcggagtagagggcgtggtcagtggtcagaaggagcagttccccgccggcattgctgcaaatccgggatgcgggaaaccgctgcaggggcggcaatccgcgccagtgaagctgtagctccctgccttcatgatagatggtgaaggactcccgctcctcctgacccccaagtgccgagtcatccgctgcactggccatgatgtgcaaatttttgttggggttttggacagggccaaagctttgtaacacgacgcaattgctcgatttgtctgcaggtcgttctcacatcgtgcacgtgctccggtccacgctaggcactactggcaccaacgaacatcatataacttgattcggaatgcaactctagctgccacgataaaataaattctgttttcacttgttcttaactggctaataagaattcatgtttttgtgatggttttttggattagtgtgaccagcgctatcgagtcccaatgagaatttattaagtaagggtgttcgggtaaaagtgacgttctaaaattgggcttatcactatttatttggtccatgcaaattgttgttttataaccaattttgaaaacacacataataccttatacgtaaactcaatattgtagttagctagaactcttatataaatttaaataactccttagttgcattcgccataatcatggaaccagtcaacacaaaaaagttattttggtatttttttgcgatacatcaatttgttttaatatggtcatattgtttttgccatcagctgttcgactcaaaagtttttgcatgttttgtttatttcgcttaaaatgtagttttatcgttaattaggaaaagttacccacggtaaaaaaaaacaaccgtcaacaattgttcagaaacatcaactagtacgactcagtggacacctccgtgtggtactgctggtttgcatacgcccacaaaagttgttttaagccacaaactcaccctcctaaaataaaattttttcagctcggttatggatttggactgcgagggcgctacagctttggctgacgactcagggcactttagctgcactagcgatgatggagtaggagatcctgctcagaaaccggcgccgcagcctgaaccggaccaatcgatttttctggtgcggcaagagctgcttcggacgcgcagtgaggtgcaaaggctcttaaaatcggagcagtggtacaagcaggagcttaagtcccagaagcacagcaggctacagacgctagaacgattgtacgcacaggaacggaagtatttgatggagaaccagaagctgcagcaagaatcgatccgcctgcacacacaatgcgccactctggagaagcagcaggagcagggctcaccattttcccctggctcatcgccgtttaaagcagactcggagtcacacgactcctcttttga

SEQ ID NO: 15896 - DNA, 5040 bp, DROSOPHILA
aaaacatgaattcttattagccagttaagaacaagtgaaaacagaatttattttatcgtggcagctagagttgcattccgaatcaagttatatgatgttcgttggtgccagtagtgcctagcgtggaccggagcacgtgcacgatgtgagaacgacctgcagacaaatcgagcaattgcgtcgtgttacaaagctttggccctgtccaaaaccccaacaaaaatttgcacatcatggccagtgcagcggatgactcggcacttgggggtcaggaggagcgggagtccttcaccatctatcatgaaggcagggagctacagcttcactggcgcggattgccgcccctgcagcggtttcccgcatcccggatttgcagcaatgccggcggggaactgctccttctgaccactgaccacgccctctactccgccaagctgcaggccaaccgcgaacacatggatcttcaactcctgcgtaccgatgttgtggatatggacttctgctccggcagtcaggaactattcgtagtcctcaccaatggctctgtgcagcgccaagccacgggatctggccgggatgtgggtcatccacatgcgtggcaaaccctcggtttcgaccctctcgaattgcatgctgagggcgtacgcatccgacgggtttgctgctccgcccagggcgttgtcttcgtcggcgctagtggggagacctatgtcatgggcagctgcggcgaagtcttcaaggcagaacaacagcctcggcacatgcgcctttacgaagagggcaaggaactgttggacttagcagccggaaacgagcactttgtgatgttagtagctccctacaacctggccgacgatgcactccagctgtcggtggccagtgcgaaggaagaacccgaggatgaacgggcctctgtaaaatccataagcagtggccactcggagcgcagcgttgcggctaacacaaggcaccttcttcaccaaggatacgctctgctccacacccaacttttcacattcggagcctccaataatggtctcctgggcagtggggatcatatccggagggccaatgtgatgcgcttgcagaaactagacagcatgggcgtgtgcagcattgcagctggattagagcacacggtggcccgcactctggacggaaggctctaccactggggcctgaacaaccactctcagttgggtgaagatgtcagctcgcccatggagatcacaattacggaaaacacggcagcactacccatagaacaaaactcggcgcttgaggcgacttgcggcgactaccatacactactgctcaatgcctcgggtcaaatacattcccttcaacctgcgcctccaatgcgacatctgcagcagtccagcacatacgcgcagacgcttctccagcttcagttgggagcagcgtggcccagacaactacgtttgcttatgtgttctggcggatacacacttcaaaaccaaaggcagttccagcggcagtatcactactatctgagtcatctgcagtcacagttacaactgcttctcaagcatcgacaggcagtccaaacactcgaaatctggcaaagacagtcggcactggagccgctcagcgccctcggtcccttgctgatcaactgggagagaatactgtgcctgctagtggccactttgcattcgctagagggattctaccgagcggactttgtgcagcctgccgacctgttgtttatctgtcattacaaagagtacatcgatctgtttgacggctacacaaaggcctattgcgatgtgttctcggtcaatggatttggagaggcggtggtcgccattactggactcagcagcccgctggccgagctcaacgaggagagctacgtcactcggttgttccagcaacccttcagtatctaccagctgtttgtccagtttatggagctgctggtgaggacgcaatctgagtacggagagcatagggtggcctggtcggagttcgcgcggcacagctgcatcagccaggagctcgccgtgaataccaaggatttctggagcagcaacgatagaaacccgaggattgtgcagttcagaggacgtcacagaagggttattttgacgtcggctttggttccattgaaactagtcacttctggtatcagcaggtcaagcaacagtttcattctcttttcggacttcctctgccaggtaagcggcaactcgctgtactcgtatcccttaactaccctgtgggtgtggaccgaaggcgacagcctgcgcttgaccacgccggaaaaatcctttctggtaagcacccgttcgcaggagatgcgcaaggtgtggctggaccagttgcaatcgagcattatagcgtccttgggcaaacctctcggaagtcctgtgcccagctatcgctccacggggtacgagtttagtcgggaacacccaaagttctccagggtgaaagcgtgcggtacctggagaaagggcgttctccacggaaattgctaccttgagtatccagacggaagtgtatactgcggagagctgcaacacgggatcattgaaggtttcggcaaaatggtgattccgacaacggggctgtatgtaggtaactttaaaggtggccggttccacggccacggtgtttacgaaatgcactgtaaggattcccccgagagcgaagtctacgaaggaaatttttgcgagggcctgtttcacggccatggagtgatgcggaacaaccgatacatctacgtgggcgagtaccaggccaatgcacgcagtggatacggagtgatagaggatctggttagcggggacaagtacatgggcatgtttgcggataacaagcgatctggaatcggcagctgcatcaccaaccgcggcgactacttcgagggcagcttctccggagacgatctcacaggcagtggggttgctgtcttcgagaacgactattactacgagggcgaactcacgctcctcggcccaaacggacggggggaatactacatgcccagtggagatgcctgtggaggaagcggtgccatggggaccggggagttcgacgacacttgcgagcttattgggaacaaaatgtttggacagcttagtggtacttgggacacggtgcggatacaggccggtgaactggtactaaatcggcgctttcctaagtaccccagctcccttgggcgccaagtggtagatcacaatcgcaagtggcgatcattgtttaacaactttgaatcggaccttgccaattgcacggcaagcactagcagctctggaggcaatcaatcagctggcaccctcagaaaatcctcgaaacccactttgagcacggcccaaatctggaactgcatagcggtgtacatgagcaaacagcgggctcgggaaggaacaaagcctggcaactactttaacaacatcctgctcagtctgccgctgccgcaaaaaacatcatccccactggcaaaggcccgcaccaccaccagcgcactgagcaagctgcaaacggaggctgcatcggcgctggacttcttgggatttccaccgcgacgaatccaatcccaagaggcactgaacagcaagccaggcggattgcagagagcggatagcttaatctctatgggccacaatacatctcgtgacttggacaacagtagtctggctagtttccaattggaccaaagcctcatgaacagcactgtcaacggcgatgaatccagcacgttcaatgaaagcttttcgaaactaagtcacaacaacaataacagcatttcgaagcacatgaacaacatcgattgctcgataacatcaacaacgtctacaacgagtgcagtgctggaccaggtacccagttttggaatggctttggtgcttaccgagcaagatgtgacctccatacgtttgtacctggagcaggcttttaaggatcgccatcacccgctgtacgtgctgaatgagcgcattgccaactgtttccactactcatatggctattggaaagttaaacccaccccgattttggccaagcaagccatgagagagtgggagtccatatcgcgtcgcatttaccgctttgtgcggaagatgtttccagcgttgcccgaggaactttgccagatggagggcagcagggaagtcatatcgcatattaccctattatacccactcgtgctatcagagggcatctactccactttgtttgtgctgtatgcaaataagtacagtcgaaaggacgaaatgtatcggcagaatctgaatcttgccgagaaactaaaggaccaagagcttgttgaacttatgggtcatgaaagttttctgcacaatgtaatgttggaccccaagtttgtggagtccgtgcagacgttaaaggaactgcaggagaagtttagtccacaggacatgttgactgtgatacagcggagcacgcagctactaactgaggcctacgaacacgccatggcagctaatgccgcccagctcaatgcggacaacatgataccgctcaccatgctcacgatgctgcgcgctgctgttccccacttgggtgcggagctggccttattggacgatctgaccggtggccccaatttccaagccgagatgaatggaatggcgggctactgctacactacactgaaggccgcatatgagcacgtgacgtcgagagctctgcaaaaaatcccctgagcgggctcagctcaaagatttcgggctccgttgccgaaaaggccgacacatgaggttttagaaaattagttacttcttgttggcattgttaagtctcggtgaataagaaacacaagtgttgatttcccgtaaatagtctgtatatacatagaacgacgaaattccctcatatgattacgggtattgattctgtacagccgcaattgattagcccctagtacagcgtagaaatgtgtatctatatatttatgtatgtatttatctgtatctgttttgtatattctaggccaacgcgttaacattccaattactcaccaaagcaaataaactatctacacacacttgg

SEQ ID NO: 15897 - protein, 1486 aa, DROSOPHILA
MASAADDSALGGQEERESFTIYHEGRELQLHWRGLPPLQRFPASRICSNAGGELLLLTTDHALYSAKLQANREHMDLQLLRTDVVDMDFCSGSQELFVVLTNGSVQRQATGSGRDVGHPHAWQTLGFDPLELHAEGVRIRRVCCSAQGVVFVGASGETYVMGSCGEVFKAEQQPRHMRLYEEGKELLDLAAGNEHFVMLVAPYNLADDALQLSVASAKEEPEDERASVKSISSGHSERSVAANTRHLLHQGYALLHTQLFTFGASNNGLLGSGDHIRRANVMRLQKLDSMGVCSIAAGLEHTVARTLDGRLYHWGLNNHSQLGEDVSSPMEITITENTAALPIEQNSALEATCGDYHTLLLNASGQIHSLQPAPPMRHLQQSSTYAQTLLQLQLGAAWPRQLRLLMCSGGYTLQNQRQFQRQYHYYLSHLQSQLQLLLKHRQAVQTLEIWQRQSALEPLSALGPLLINWERILCLLVATLHSLEGFYRADFVQPADLLFICHYKEYIDLFDGYTKAYCDVFSVNGFGEAVVAITGLSSPLAELNEESYVTRLFQQPFSIYQLFVQFMELLVRTQSEYGEHRVAWSEFARHSCISQELAVNTKDFWSSNDRNPRIVQFRGRHRRVILTSALVPLKLVTSGISRSSNSFILFSDFLCQVSGNSLYSYPLTTLWVWTEGDSLRLTTPEKSFLVSTRSQEMRKVWLDQLQSSIIASLGKPLGSPVPSYRSTGYEFSREHPKFSRVKACGTWRKGVLHGNCYLEYPDGSVYCGELQHGIIEGFGKMVIPTTGLYVGNFKGGRFHGHGVYEMHCKDSPESEVYEGNFCEGLFHGHGVMRNNRYIYVGEYQANARSGYGVIEDLVSGDKYMGMFADNKRSGIGSCITNRGDYFEGSFSGDDLTGSGVAVFENDYYYEGELTLLGPNGRGEYYMPSGDACGGSGAMGTGEFDDTCELIGNKMFGQLSGTWDTVRIQAGELVLNRRFPKYPSSLGRQVVDHNRKWRSLFNNFESDLANCTASTSSSGGNQSAGTLRKSSKPTLSTAQIWNCIAVYMSKQRAREGTKPGNYFNNILLSLPLPQKTSSPLAKARTTTSALSKLQTEAASALDFLGFPPRRIQSQEALNSKPGGLQRADSLISMGHNTSRDLDNSSLASFQLDQSLMNSTVNGDESSTFNESFSKLSHNNNNSISKHMNNIDCSITSTTSTTSAVLDQVPSFGMALVLTEQDVTSIRLYLEQAFKDRHHPLYVLNERIANCFHYSYGYWKVKPTPILAKQAMREWESISRRIYRFVRKMFPALPEELCQMEGSREVISHITLLYPLVLSEGIYSTLFVLYANKYSRKDEMYRQNLNLAEKLKDQELVELMGHESFLHNVMLDPKFVESVQTLKELQEKFSPQDMLTVIQRSTQLLTEAYEHAMAANAAQLNADNMIPLTMLTMLRAAVPHLGAELALLDDLTGGPNFQAEMNGMAGYCYTTLKAAYEHVTSRALQKIP

SEQ ID NO: 15898 - DNA, 2507 bp, DROSOPHILA
aaagcatgctgagctccaaactgagtgagggcagctccacgcccacggtgcagatcaacgacatacgctaccacatcttccagcttgtgatgcagttcctttactgcggcggctgcagctctttggacgtggcccacggcgatgtgctagagctgatggcggcggcgagcttcttccagctagagggattgctgcgctacacggaggcccgctgctcggaaatggtcgatgtggataatgttgtagccatgtacattcacgccaaggtgggatggctaatggtaaagattgctatcagacggagattctgatcggcttgctcttccaggtctataacgccaatcgactgctggagttctgccagtgcttcctgctccaaaatatggtggccctgctcacctacgacgactccgtgaagcgtctcctcttcgctaagaagattcccaaccacgacgtgctcgccggattgctgcagacgctccagaatcgcttgaaggcccgcaagcccaactcgggtggtggtctggtcaactcctaccgatcgcccccggtcacgcctgtgaaaaaatgaagtgaagtgaagtgatggagctctgcttccacacacttctctctcgacgaaatcgaattcttatttattgcattgtttttaatttaatctctgagcttttatgtattataatagtttccctgcccgccccgacctcctttcccaccttcctagttgtatttttgtattttcaatttgttcagcgcactgttaacctctacgaaccccaagatggccgagcaggcggtcctctagctattattggtagttgaaattgtttctgcattaaatgaaggaagtaaaattgtaactaccaaatctttcatttgaatggaggcagcattcaaatattgaatcacctttccctcatcggagatttcgagttctcagccattactttgcaattatatctggatgttttgctggagaacacaactaaaacaacaccaattagattccatttcagtgcctcgtttattagaccttaggaggcttagcatagtcaagatctggttggggcacctgctcgctgacctgcttggcggccagcgaaatctggggcaggattgctccgccctctggtacaaatccgtggtcatcggccttgtaggtgacggtcacctcctgtccgttggcatcgaagtaggagtaggagccgctgatctccaggtactcgttctcggtgccttggtttctgaccacggcctcctcccttctgtgggtgccgtcctcgccgaggtaagagaagttgtacgatccatcctcgtgcttttcgtgagatgattcgagaatggccaccggtggctgggtggtggatgtgacgtggtccactggagcactcagcacgacggccgtgcaaagggacagggcgacgatgagctggaaagatggtttaggaatgggctaatccttggagtgatcgcctctcggcggcgcgatactcacaatcttaaacatgctgctgtctggaggggaagctggctttgaattgactccgagtgagggaagactgctctttatatttccaaaactgaagtggaattggaattgctggtcgccttgtttaccggttatcgtccggcatccagacactcacttacatacactccatatgtacaaattgagtccgcgggtatttacttgaaacccgttctaagaattaattaaagagcgagcttcttacccaggcccatctgccatctcccattgcaatttcgaatctcggcctgcaatttgagattcctaatttatgttcgaccccggatcagggtctcacttacttatctctgctatagtagcattcggtttcgggagaattaaaaaaaaaagtttaagatgttttgcagtcatttcaaaagatcactgaaaatatgttacttttaaaaattatttctaagtcgaagatttttacttcatttttcgtaaggtattcgtttagcttgtggaaaataatgaccaataagcattagttctatttcggttgccctggccacttttcattacattgtttgagcttcagctgcttgtgttgtttgggcattttccagattcaatttttctcgaacgccaacacggcgggaagtcggttttccgctgccaattgtttacacgaaaactataaacaaagcaaacacacgacgtccgtcttcgcgctgattcctgcctgctcccattgatgttatttttggccagtgggcatgaggctgcaccaaatcttccatcctctccagccgaccatactatatgcgttccacatagcagtaccagccggtcagatgaagatgtaaatgctggggacccatatgatggagctggagaaggggacggtattgggaatgggcatggggatgggcccggaggtggagatggaggtgggatggttggatgagcagggctgaatacttaaaggtggcacatacgcatcgttcgattcggatgcggtccgattcctggcatt

SEQ ID NO: 15899 - DNA, 441 bp, DROSOPHILA
atgtttaagattctcatcgtcgccctgtccctttgcacggccgtcgtgctgagtgctccagtggaccacgtcacatccaccacccagccaccggtggccattctcgaatcatctcacgaaaagcacgaggatggatcgtacaacttctcttacctcggcgaggacggcacccacagaagggaggaggccgtggtcagaaaccaaggcaccgagaacgagtacctggagatcagcggctcctactcctacttcgatgccaacggacaggaggtgaccgtcacctacaaggccgatgaccacggatttgtaccagagggcggagcaatcctgccccagatttcgctggccgccaagcaggtcagcgagcaggtgccccaaccagatcttgactatgctaagcctcctaaggtctaataaacgaggcactgaaatggaatctaa

SEQ ID NO: 15900 - protein, 137 aa, DROSOPHILA
MFKILIVALSLCTAVVLSAPVDHVTSTTQPPVAILESSHEKHEDGSYNFSYLGEDGTHRREEAVVRNQGTENEYLEISGSYSYFDANGQEVTVTYKADDHGFVPEGGAILPQISLAAKQVSEQVPQPDLDYAKPPKV

SEQ ID NO: 15901 - DNA, 6205 bp, DROSOPHILA
cggcttcagcggagcactgtgcttcttgaggagcatactatagtgctgactcaggccttcgcagccggtgttaaacaaactggtgacattctccagctccacgctctgggaattgttgtgccggaagtaatcgttggcatcgcgcagtttggctagtgcgtcgaggaacaccgagatgtttccctccaccgggccttgatgaatcaactggcagacctcttgggagacatcgtagtgggacaggacgctttccagacaattgagagtagcttccagatctaaaaaaaaaaagaggcggtgacacattagttttttttttttgaaatcccattgagtttattttcatactctgctgccgtttctggagctgctccgtctcctggtagacgggcaatatggtctgctccaggtttcccaggcgcttctcgaagattgttagaatactggacatttgcgtggacagatcatggtatttatccactcgatctttcagcagagctaaattggtggcttcctatgaggaaaatgggtaagtatggaggttttgagcatgacaactagacataccttctccaatttattgtgcgcctgcaatgaactgtccaaattgttcattttcaagcgtatatgtagctaaaatcctttaaaaacaaacaatagttctgatataaaaaacaattctattttattttgttttgacgaaactaggcatttatgcacactggctttggtcatactgtcaattaccgcgttgccaactactttgcacgaaaaaaaaaattataacggtcatttcagatagtaatagaaactttttttaaatattgtacacttagacaattaggtaaacgataatgaggctatgttttaaataaattgtttttactactagtactagtttattagtcaagtcctagttttaaaagccaaaactaacggaaaaacccgccaaactgccatctccagccaagacgccaacttttgttgtggttggttgccatggaatctgtgtgtaaacaacgcacctgcatttaggaatttctaccaactatgcaggattagccaattcgacttctgcaacaatgaggggtgttctcaagtggctggaacgcatagagtttcccaatagcaaagacaatgagatcaggtaaagctttctcattcgtggaaaacaacaacctgttgcttgctataacgccataacggtatttgcaaaacccaattttccagtgtccacaatgtgtgctacgcacccgatggcagccaattggtggtggctgcgggggatcggttgctcatctacgatccaaacgatggctccttgctgaacaccttgaaggcgcacaaggatacggtcaattgtgtggcctactcgcgggatggcaagcggttcgccagcggagcctccgataaaatggtcatcgtgtggtcacctcagcttgagggactgctcaagtattcgtgagttctcagcacacttgcaataaattctagttttttatataaatataaaaatatatttacattcataggcacggtgactccatacagtgcatgagcttcaatcctgtttcgcaccacctggcctcgtgctccttgtcggattttgccttttggtcggctgatcagaaggcggtgcaaaagtacaagatatccgcgcgtgtcaatggctgctcgtggaccaatgatggacagtacctgatcctgggcctggccaatggcaccatatccattaggaacaagttgggcgaggagaaggggagaatcgatcggcctggtgggcccaacagcaacgtcttcagtgtccaatgttgtccggccagcggtcctggcagtgtggacaccatcggtgtggtggactggagccaaacgctatcctttcacactctgagcggccagatgattggcaaggagcgaaccctgggctttgatcccttgtgcctgcagtactttcccaatggggagttctgcctggtgggcggctgcactggaggtctacacttcttcaccagggagggcattcggctgggtacgttgggcgatacctttgacacctggatctggacagttgccctacatcccaatggtcaatcctacaccattgggtgtcaagatggaaccctggcctgcttcaacattgcgtctagtaccgtgcatgccctctaccgcgagcgctatgccttccgggaaaacatgtgcgacgtgatcattcagcacctgatctctggccaaaaggtgcgcatcaagtgtcgagatttagttcagaaaatagccatttatcggaatcgactggcggttcagttgccggaacgtgtggttctctatgagctgagctctggagaggatcaacccatgcactataaagtgcgcgagaagatccagcaaaagttcgactgcagcttgctggttgtttgtggccgtcacattgtcctgtgccaggagaagcgtctccaatgtctggatttcatgggtgtcctgcagcgcgagtggatcatggactcgttcataagatacatcaaagtcaccggtggccccgtgggaagagaaggactaatggtgggcttgaagaacggccaagtgttccgaatctttctcaacaactcactaccactgctcatcaccactgcggtgtcagcggttcgctgcctggatatcaattcgaagcgcagcaagatcgcagttgtggacgatgtgggtcgcttggttgtgcgggacgtaatcaacgatacaattttgtaccaggatacgggtgtaaacagcgtcacttggaacacgcacctggattcgatgctctgctatacccacacaacaggcggattaagcgttcgcgtggggaatctgccgccgagggcaccacagaacatgcatggcgtggtggtggggctttgcggagccactgccttctgcctgcgcggaaatattatgcacaatacgcctttggctctcggttccaccatgtggcagttcatcgaagctggattgtttgagtaagacatattccaattctgcttggaatctcctaataaaagatgttatattttatttcagcgaagcctaccaggtcgcctgcctgggcgtgaccaccagcgactgggagggattagctcaatccgctctggaggcactgcacataaatatcgctcgcgatgcctacgtcaaggtgaggaatcttccgtggctcaaactcatcggtgagctacgagatcagcaacagcgatcggcggttcctaaggaggtacttctcgcagagaattgcgcctttgccggcaagttcaaggaggcagctcgtctatttctcaaatgcggccagtcctcaagagcacttgaaatgtacacagatctacgtatgttcgatttagcccaggagtatattaaggacggcaccgaccaggagaagaaggaactggtacgcaagcgagcggaatgggcatattcggttaaggagccacgagctgctgcggaactattgctttcagctggcgaaaatcagaaggccattgatattgtcgcagagcaaggatgggccgatgtgtaaggaaatcaagaaaattgcacacatatcgtttataataaacctaacttcttacaggctttacgatatcggacgacgactgagtcttacggaacgcgattccctggaatcggtggcccagaacctaaagaccctcaaagctcttcccctggctgctgagattttcaagaagctgggcgatgaagcccaggtggtgcaactgcacatcgaggtacgcgactggccggaagcatttcgtttggcggaatcgctgccggaacttctgcccacggtgcactaccagcatgggcaatggctggccgaaacggatcagtttatagaggcgcatcagggtgagtttataacttttgttatgtttatttaatataaaagttttacttttcagcctacataaaggcaggacgcaccaaggaagccaatcgtttgcttaagcaactgagcaatacggccatcgtggaggagcgctacttggatgcgagctacttttattggctgctggccaagcaacatttagatgtatatcacgccaaggagtaagtgaaatattacaatcagtgcacttcttaatttctaaaacttttgttttatagagaacaaaatcctgttgatcaccaccttacggagtacaaaaatcatttacgtgttgccaaggtttattacgcctacagtgtcatatactcatatatgaaagaaccattcaccacacattccccagttagcctatttaacgtaagccgctttatactaaacgaagtggagcacaaaggtgtccccaaaggtgtcagcatgttgtaagttaagagctcaaatcgcaaaagtagaacgtgaatcgacagaaatcctatcttccagttcggttctcttcactctggccaagcaagctaagtttttgcaggccaacaagttatgccttcttattaacaagagactgcagtcgttgaagccaccagctggagtccaagagcagattgatgtgagtgatgtgaaaacattaatcatccaaatgatatgcttatgaagtaccttttcagctaaattttctaaatagcaaggcttgcaaaagtggcttcaatgatccggaggagcttttgccactatgttacaagtgctccaactacagtcaacatttgaatagcaattgctgtcccacttgccggcaggattatattttctctttcgtttccttcggtatggaattttgtctattagcttagatatctgataatgatgatgcctctttttagaaattctacccctagtacaattttatccagaagtggatatctctgatgccgaggcggagcgcttgctgctggctcctgcaaagcacgccgaggattcggatccatttaacgaggatgtggccagtgcattgcctttgagcttggatcgcaatggcctgcgtgccatagatcccaatcatgtgctgattcttaaacggaggggaaagaatgtgcggaatgtgtactatcgtaatatattacccgatcttcaggttacctattgtcctcaatgtctgctggtaaggttatacaaaccacatcatttcatttcgtatattaagtaaccctttttagcttttctatgcggaggactttgagctgcaagtgctgcaaaaaggtcactgtcccttttgtcacacatcctccgaaaagctgatggaagacttttgaaatcgacataagaagtgtgtgcaaatatataatttccgtccaaaactgtacaaataggaactatacgcaaataaatacggtgttacgcccaggtttcctcctgatatcgtcgctgttttatcattagttccacgtaatcggcatcgccatctagtatctcgataaaggcctctttgacagactttggcatattattggagttgccagccacgtagatataggcattcaggtcttttataagcctcgccagatgagcaccattcttggcgattaaatgctggacatagaccttctgatcctgatccctcgagaaggcagtatgggcctctacctgtttcgcatcggtccaggtggagaagtcatttccaaagtggaaatcggcagctttgttccgacagccaaagaaaacaaccaagggaccaattgtggcaccttttgattgagcatacaatcggttttggataatgctacggaatggagcgatgcctgtgccaggtcctaccattataagtggtatacttaagtcttttggccagaccatggttcctcttttgacaactccgctcaactcagtacccgatttcaaagtcttcagccagttggagcataagcccagacgtggagtatgcattatggttttgtactccacaacggccaccagcaagtccaaacttaaggcggaaacatccgaggcaatggaaaaactgcgtggctggatcagtggcatcatctcaaagagctgttgcagagttaagctagaggtggcgtgccggaaatcctccagaacctccaaaagattacgacgcggcctgttcacataagccactaagtcatcaattccctccgcggaggagaattcgagcagcttttccttttccatttcatcgcagcaattctgtgctagtacctcgaggaaacgttgccgtggcttagcactcaagtcccaaacgaatttggcggcctggaggaggcttaagggattggaataggctatgggaag

SEQ ID NO: 15902 - DNA, 3238 bp, DROSOPHILA
tggaatctgtgtgtaaacaacgcacctgcatttaggaatttctaccaactatgcaggattagccaattcgacttctgcaacaatgaggggtgttctcaagtggctggaacgcatagagtttcccaatagcaaagacaatgagatcagtgtccacaatgtgtgctacgcacccgatggcagccaattggtggtggctgcgggggatcggttgctcatctacgatccaaacgatggctccttgctgaacaccttgaaggcgcacaaggatacggtcaattgtgtggcctactcgcgggatggcaagcggttcgccagcggagcctccgataaaatggtcatcgtgtggtcacctcagcttgagggactgctcaagtattcgcacggtgactccatacagtgcatgagcttcaatcctgtttcgcaccacctggcctcgtgctccttgtcggattttgccttttggtcggctgatcagaaggcggtgcaaaagtacaagatatccgcgcgtgtcaatggctgctcgtggaccaatgatggacagtacctgatcctgggcctggccaatggcaccatatccattaggaacaagttgggcgaggagaaggggagaatcgatcggcctggtgggcccaacagcaacgtcttcagtgtccaatgttgtccggccagcggtcctggcagtgtggacaccatcggtgtggtggactggagccaaacgctatcctttcacactctgagcggccagatgattggcaaggagcgaaccctgggctttgatcccttgtgcctgcagtactttcccaatggggagttctgcctggtgggcggctgcactggaggtctacacttcttcaccagggagggcattcggctgggtacgttgggcgatacctttgacacctggatctggacagttgccctacatcccaatggtcaatcctacaccattgggtgtcaagatggaaccctggcctgcttcaacattgcgtctagtaccgtgcatgccctctaccgcgagcgctatgccttccgggaaaacatgtgcgacgtgatcattcagcacctgatctctggccaaaaggtgcgcatcaagtgtcgagatttagttcagaaaatagccatttatcggaatcgactggcggttcagttgccggaacgtgtggttctctatgagctgagctctggagaggatcaacccatgcactataaagtgcgcgagaagatccagcaaaagttcgactgcagcttgctggttgtttgtggccgtcacattgtcctgtgccaggagaagcgtctccaatgtctggatttcatgggtgtcctgcagcgcgagtggatcatggactcgttcataagatacatcaaagtcaccggtggccccgtgggaagagaaggactaatggtgggcttgaagaacggccaagtgttccgaatctttctcaacaactcactaccactgctcatcaccactgcggtgtcagcggttcgctgcctggatatcaattcgaagcgcagcaagatcgcagttgtggacgatgtgggtcgcttggttgtgcgggacgtaatcaacgatacaattttgtaccaggatacgggtgtaaacagcgtcacttggaacacgcacctggattcgatgctctgctatacccacacaacaggcggattaagcgttcgcgtggggaatctgccgccgagggcaccacagaacatgcatggcgtggtggtggggctttgcggagccactgccttctgcctgcgcggaaatattatgcacaatacgcctttggctctcggttccaccatgtggcagttcatcgaagctggattgtttgacgaagcctaccaggtcgcctgcctgggcgtgaccaccagcgactgggagggattagctcaatccgctctggaggcactgcacataaatatcgctcgcgatgcctacgtcaaggtgaggaatcttccgtggctcaaactcatcggtgagctacgagatcagcaacagcgatcggcggttcctaaggaggtacttctcgcagagaattgcgcctttgccggcaagttcaaggaggcagctcgtctatttctcaaatgcggccagtcctcaagagcacttgaaatgtacacagatctacgtatgttcgatttagcccaggagtatattaaggacggcaccgaccaggagaagaaggaactggtacgcaagcgagcggaatgggcatattcggttaaggagccacgagctgctgcggaactattgctttcagctggcgaaaatcagaaggccattgatattgtcgcagagcaaggatgggccgatgtgctttacgatatcggacgacgactgagtcttacggaacgcgattccctggaatcggtggcccagaacctaaagaccctcaaagctcttcccctggctgctgagattttcaagaagctgggcgatgaagcccaggtggtgcaactgcacatcgaggtacgcgactggccggaagcatttcgtttggcggaatcgctgccggaacttctgcccacggtgcactaccagcatgggcaatggctggccgaaacggatcagtttatagaggcgcatcaggcctacataaaggcaggacgcaccaaggaagccaatcgtttgcttaagcaactgagcaatacggccatcgtggaggagcgctacttggatgcgagctacttttattggctgctggccaagcaacatttagatgtatatcacgccaaggattcggttctcttcactctggccaagcaagctaagtttttgcaggccaacaagttatgccttcttattaacaagagactgcagtcgttgaagccaccagctggagtccaagagcagattgatgtgaaaattctacccctagtacaattttatccagaagtggatatctctgatgccgaggcggagcgcttgctgctggctcctgcaaagcacgccgaggattcggatccatttaacgaggatgtggccagtgcattgcctttgagcttggatcgcaatggcctgcgtgccatagatcccaatcatgtgctgattcttaaacggaggggaaagaatgtgcggaatgtgtactatcgtaatatattacccgatcttcaggttacctattgtcctcaatgtctgctgcttttctatgcggaggactttgagctgcaagtgctgcaaaaaggtcactgtcccttttgtcacacatcctccgaaaagctgatggaagacttttga

SEQ ID NO: 15903 - protein, 968 aa, DROSOPHILA
MVIVWSPQLEGLLKYSHGDSIQCMSFNPVSHHLASCSLSDFAFWSADQKAVQKYKISARVNGCSWTNDGQYLILGLANGTISIRNKLGEEKGRIDRPGGPNSNVFSVQCCPASGPGSVDTIGVVDWSQTLSFHTLSGQMIGKERTLGFDPLCLQYFPNGEFCLVGGCTGGLHFFTREGIRLGTLGDTFDTWIWTVALHPNGQSYTIGCQDGTLACFNIASSTVHALYRERYAFRENMCDVIIQHLISGQKVRIKCRDLVQKIAIYRNRLAVQLPERVVLYELSSGEDQPMHYKVREKIQQKFDCSLLVVCGRHIVLCQEKRLQCLDFMGVLQREWIMDSFIRYIKVTGGPVGREGLMVGLKNGQVFRIFLNNSLPLLITTAVSAVRCLDINSKRSKIAVVDDVGRLVVRDVINDTILYQDTGVNSVTWNTHLDSMLCYTHTTGGLSVRVGNLPPRAPQNMHGVVVGLCGATAFCLRGNIMHNTPLALGSTMWQFIEAGLFDEAYQVACLGVTTSDWEGLAQSALEALHINIARDAYVKVRNLPWLKLIGELRDQQQRSAVPKEVLLAENCAFAGKFKEAARLFLKCGQSSRALEMYTDLRMFDLAQEYIKDGTDQEKKELVRKRAEWAYSVKEPRAAAELLLSAGENQKAIDIVAEQGWADVLYDIGRRLSLTERDSLESVAQNLKTLKALPLAAEIFKKLGDEAQVVQLHIEVRDWPEAFRLAESLPELLPTVHYQHGQWLAETDQFIEAHQAYIKAGRTKEANRLLKQLSNTAIVEERYLDASYFYWLLAKQHLDVYHAKDSVLFTLAKQAKFLQANKLCLLINKRLQSLKPPAGVQEQIDVKILPLVQFYPEVDISDAEAERLLLAPAKHAEDSDPFNEDVASALPLSLDRNGLRAIDPNHVLILKRRGKNVRNVYYRNILPDLQVTYCPQCLLLFYAEDFELQVLQKGHCPFCHTSSEKLMEDF

SEQ ID NO: 15904 - DNA, 1539 bp, DROSOPHILA
tctcgatttctcttactttcagtaaccaaaaacacaaatcaaaatggctgatgatgagaagaaacccgactggtccaagggcaagcccggagatgccaaggtgaaggaggaggttgaggccgaagcttaagtgtccacacgtccactagtgtccactgacccgtgactcccgccctaaacaataattgaaattatttacaacaattatctgaagcaatataatttatatgaatctattaatatatatatatatccgcaaatatatatgcatgtatatatctcgccatatatatgtgtccacaatggatttgatcagaaatgaagtcaataaacaacaacagcaacaactaaattaactcaaaatcaaaatcaaactcagactcaaactcaaactcaactgcttataaataattcagatcaacgattcaaaacaacagccaaacatctgaacgccttgatgaattatttattatatttcattatttacaaattatattttttaatgtaaattaaattaaattacaaaaaaaaaaaacgaacattctttctaccttgccatgcccaaaatcatcttttgcacacaaacactgagcgaaataatctttaaaatggttgagattttcaggaggggatcgaaatctcacgatctcgaatatcataaatacagtatagttttgaatgaaaagacagcgatattgaaaatgtatgccaaaaagtttattgcatattgtattgtaatggtattatcgtgcatttttaaggggtatctgatagtcacgacactaatctacatcgtgcttttttgtttataatagaatgggttttggtttgattggaacatgctttgcaacatgtacaaattcaacaaggcctttataatttatttgaaaatagacaaaaaaaaaatgtgtttacgaactatgtatataccgcctagtcgaacagtttcaactcgtccagacgtttcaaggtgcacttgaggctctccagcgtgcgagtgtttccttcgaacatgagctgcaccttctgcctggcgaatgtctcgtcgtgaaagttcttcagtgagttgtcctcggagtccacaccgatcatgctcatcagcgggaagaatccgaaagccacaaagaaaccgtaggcttcgcgctttctgatttcatccatgatatcctcatagctgggcagctccttggaccagggcagatgcttcaggcagtccaccagggacctgtagtagatgtcgacaagctcctgccgccggtcacgtagcacctccagttccaagctggtgttcaggaagtagttgatgtcgaagcccaggctgccgtagaagcacagctggaagtcaatctgaaggggcagtaaaaagggcattaaaggatcagtcaattctgatataaacactagctactagctgctagttcttagttggtttatgaagaaataaataatctaatattggagattgctggaagcctcaatttttgtggccaaccttttggtacttacaatcttcacctgctgcaccgtgtactccgcatc

SEQ ID NO: 15905 - DNA, 1262 bp, DROSOPHILA
tttctcttactttcagtaaccaaaaacacaaatcaaaatggctgatgatgagaaaaaggcagcagctccggccgcagctccagcggcggcggccaaaccggcggctccggcagcagccccggcggccaatggcaaggctgctccggcggccaatggaaaggctgctccggcagctgccgccgctcccgccggtccgcccaaggatcccaacgaccccaaagtgaaggccgaggaggctaagaaggctaaacaggctgagatcgagcgcaagcgtgctgaggtgcgcaagcgcatggaggaagcctccaaggccaagaaggccaagaagggtttcatgaccccagagaggaagaagaaactcaggttgctgctgcgtaagaaagccgctgaggagctgaagaaagaacaggaacgcaaagcggctgaacgtagacgcatcatcgaagaacgttgcggcagtcccaggaatctcagcgatgccagcgaaggtgagtgcgaattgcaagagatttgcgaagagtattacgagcgtatgtatatttgtgaaggccagaaatgggatctggaatacgaagtcaggaaaaaagactgggagatcaacgatctcaatgcccaagttaacgatcttcgcggcaagttcgtcaagccagccctgaagaaggtctccaaatacgaaaacaaattcgccaagctgcagaagaaggccgctgagttcaacttccgcaaccagctcaaggtggtgaagaagaaggagttcacgctggaggaggaggagaaggagaagaaacccgactggtccaagggcaagcccggagatgccaaggtgaaggaggaggttgaggccgaagcttaagtgtccacacgtccactagtgtccactgacccgtgactcccgccctaaacaataattgaaattatttacaacaattatctgaagcaatataatttatatgaatctattaatatatatatatatccgcaaatatatatgcatgtatatatctcgccatatatatgtgtccacaatggatttgatcagaaatgaagtcaataaacaacaacagcaacaactaaattaactcaaaatcaaaatcaaactcagactcaaactcaaactcaactgcttataaataattcagatcaacgattcaaaacaacagccaaacatctgaacgccttgatgaattatttattatatttcattatttacaaattatattttttaatgtaaattaaattaaattacaaaaaaaaaaaacgaa

SEQ ID NO: 15906 - protein, 271 aa, DROSOPHILA
MADDEKKAAAPAAAPAAAAKPAAPAAAPAANGKAAPAANGKAAPAAAAAPAGPPKDPNDPKVKAEEAKKAKQAEIERKRAEVRKRMEEASKAKKAKKGFMTPERKKKLRLLLRKKAAEELKKEQERKAAERRRIIEERCGSPRNLSDASEGECELQEICEEYYERMYICEGQKWDLEYEVRKKDWEINDLNAQVNDLRGKFVKPALKKVSKYENKFAKLQKKAAEFNFRNQLKVVKKKEFTLEEEEKEKKPDWSKGKPGDAKVKEEVEAEA

SEQ ID NO: 15907 - DNA, 1539 bp, DROSOPHILA; identical to SEQ ID NO: 15904

SEQ ID NO: 15908 - DNA, 1262 bp, DROSOPHILA
tttctcttactttcagtaaccaaaaacacaaatcaaaatggctgatgatgagaaaaaggcagcagctccggccgcagctccagcggcggcggccaaaccggcggctccggcagcagccccggcggccaatggcaaggctgctccggcggccaatggaaaggctgctccggcagctgccgccgctcccgccggtccgcccaaggatcccaacgaccccaaagtgaaggccgaggaggctaagaaggctaaacaggctgagatcgagcgcaagcgtgctgaggtgcgcaagcgcatggaggaagcctccaaggccaagaaggccaagaagggtttcatgaccccagagaggaagaagaaactcaggttgctgctgcgtaagaaagccgctgaggagctgaagaaagaacaggaacgcaaagcggctgaacgtagacgcatcatcgaagaacgttgcggcagtcccaggaatctcagcgatgccagcgaaggtgagtccgaactgcaaacaatatgcaaacaatattggcaacgcgtatacagtttggagggcgataagtttgatttagaacacgtgcagaaagtcaaggcccaagagatcaacgatctcaatgcccaagttaacgatcttcgcggcaagttcgtcaagccagccctgaagaaggtctccaaatacgaaaacaaattcgccaagctgcagaagaaggccgctgagttcaacttccgcaaccagctcaaggtggtgaagaagaaggagttcacgctggaggaggaggagaaggagaagaaacccgactggtccaagggcaagcccggagatgccaaggtgaaggaggaggttgaggccgaagcttaagtgtccacacgtccactagtgtccactgacccgtgactcccgccctaaacaataattgaaattatttacaacaattatctgaagcaatataatttatatgaatctattaatatatatatatatccgcaaatatatatgcatgtatatatctcgccatatatatgtgtccacaatggatttgatcagaaatgaagtcaataaacaacaacagcaacaactaaattaactcaaaatcaaaatcaaactcagactcaaactcaaactcaactgcttataaataattcagatcaacgattcaaaacaacagccaaacatctgaacgccttgatgaattatttattatatttcattatttacaaattatattttttaatgtaaattaaattaaattacaaaaaaaaaaaacgaa

SEQ ID NO: 15909 - protein, 271 aa, DROSOPHILA
MADDEKKAAAPAAAPAAAAKPAAPAAAPAANGKAAPAANGKAAPAAAAAPAGPPKDPNDPKVKAEEAKKAKQAEIERKRAEVRKRMEEASKAKKAKKGFMTPERKKKLRLLLRKKAAEELKKEQERKAAERRRIIEERCGSPRNLSDASEGESELQTICKQYWQRVYSLEGDKFDLEHVQKVKAQEINDLNAQVNDLRGKFVKPALKKVSKYENKFAKLQKKAAEFNFRNQLKVVKKKEFTLEEEEKEKKPDWSKGKPGDAKVKEEVEAEA

SEQ ID NO: 15910 - DNA, 7934 bp, DROSOPHILA
tggtgaactcctcgtggaccgagaatcatattctgcaactgtgggatgtgcccttcaaaacacaccgggtttaccctccgtgcgaggttagtcacctaaagagccttcagcacacggaaaaaggcgacgaattcatcatactgtctgtcggacagttccgcccggagaaagaccatcccctccagctgcaagccatatacgagctccgaactctcttggcccaagacgaggccctttggaaccaaattaagttggttattgtgggctcctgccgaaatgaagatgactacgagcggttgaaaaacatgcaggacctgacaaagcatctgtcgctagaaaacaatgtgcaatttagtgtgaatgtcccttacgaagaccttcttaagttgtatcaaactgcccacattggcattcacactatgtggaacgaacattttggcatcggcatcgtcgagtccatggctgctggccttataatggtggcccacaagtcagggggtcctttgcttgacattgtcgaaacttccgcgggaagtcagaacggattcctggctactgacgccgttgaatacgcagaaaacatattaaatattattgttaacaactcagaaatgaacggcattcgaaacgcagccaggtaactagataaacatttacagtttgcacactttaatatattttggttcgcttttagggcctccgtggaacggttttctgagcaagagtttgaaaaaaactttcttcgagctgtttcaacgctatttaccaacaattaaaaaataatagtacgcccgcacctaaataaatatgcaaagcccaaaaatctccaactgaatacatttattatactctacaacatatttagagcgattttatcgtacatatcgcatcgctttccttaagatttacctaatgcatttttaaagcataaggtgatttcggtttgatcgacttaacagaatcgggaataatctctgagattttgtaccaaattcgccatcgtgttgtaaaattttatttatttcctttggagttttaaatcatttttctgccaataaagttaagaaattgcctaataagatccttagtttctatgcatcataaaacaaaatcgtgtaactaatggctttaaactaactcactatgctagctttaagagaaaatcgcatagagcaacaggaatatctcatgacggctgtctttcttctgtcattcgccagccaggctagccaaaagctcctcatctatcccatccgccgatggtgtacccgccgtgctgctaagattgagcagtccttcattgccagactgcgaaggaggcaccggcggcttcgcttccggctccgtcagtccagtagagctggcaataggtcctaatatcgaagatgatgttcccgctaaagccggttctgaactgccacttggcgtgctgcgtccactggttgtattgcctccgcttcctctctgcgataactttgggatctggaatttgttgtggagccccttgatgaagccttccatgcttgcggccattgtcggagaagcgtattggaggatggtcatcatatccgtgtggtgatcgaatcgcggcggtggctgcgacattgagccgctaagggccggcgataccgaccccgaagatccgctgcctcctcccgaagcggagcctaactttcgctgcccgctgcctcctccactgctgccgctagccaaggctcccatgctgggacgccgcctgggggcattgtgctcttggaaggagttagtgctgttgctcttagtcagcggaattccgccacctgatcccgacccactgagcttgctgctgagattgcccgaggagtttgccttctggaagaaatgcttgctggatgatgccgtggcggacgagaccgctgcggtggccttcttggaagcgggtccgctgttaacgcccggcttgagtccggtatgctgcttcttcgtggatccagtggacccagcgaagctcgtggcgccgctgctgctgctctttgccttcgcttggaggccagaggaggaactagagccggagccggtgccggagctcttgctgcttcccgtcttgttgatggtcagcttgaggccctcttggctgctgggcttcaccatgtattccgtggaggctccggccggattgatgctcccggcggagtcgctgctgcccccgctggtggttaagcagctactagttggcgctgctcccggctgtggctgctgctgcagaattgttgctgttgccagcgttgctgctgccgctgctcccgctgtttcctgcccctgacccactaccgctgagactggagacaccaatgacgctgccgagcccgctgccactgttgttgttggtgccggaattgttggcgctaaagctgccgtcgacgtcatcaaactaacctgacaaagtaagcatgtggttgtgtgtgtgttagggaccaaagaaaccaaaaataaaccagaaaagaaattataacaatcaaaaaggggaacatcacgtgtagcaaaagaaaaaattgtgggatttcacaaccattggtagtgtaggaagggaatacaaacaggaagaaagaagaatggaccccgttaataattagctttatagttaagtcggatacgaaatatatttttgaggagaaaatgtatgaggcaaacgcttgtggagctactttcaaagtgtacatcataagcacattaaacactaattttaaacgtagtaaatatttaagtgagaaggaactcttgtaactaaatctagaaaaggggaaacaatcaaattataatactcgtagagtcaagatgccaagcactactaatttacacattatttactgatgttcttaacaaagcttaaaagtcatatgcatacacattcttataaatccagcaatactgtagacactataaacttggtgaaccagtacgccatggttttctacatgccacatgctggccaaacaactatacaaatcaaacagattaactaataataaaaacatacgttctcaatgcagaaaaagaggtttaagctggtgttttggggataagccccattaccatacgagttttgggtttggtcgaaaataaaacggatgcagcagtatatatgacaaataattgaatcatatgtatttacaaaaattagaaaaggcaaaacgaaacactaacaaaaataataatcatagtactaaatataatcattttcaactacagcagaggtaggcaaattacaaatcgttttatagctaaagtaaatacagcatttgcattagtttaaagataggttcgctctgagtttgattctgcattggttaggagaggtggcagagagtcaactacgtgttaggcttccagtgggagatgctgggggtgggttggtgtggtgtggagtggagcacttataatgaaaacggacttaccgcacctcccgccatgcccttgcgcagggcactcagctccagtccggaggcccccgctccagcgccagctcctgctcccaccaccactgcggctgcaccagatgctcccgctcccgacggggccgcatagctacccagtcccccgcccgccgccagatgcgaaagactggcgactgacttcatctgctgttgtgaggatttcagggcagctactgcagcagccacacttgccggtgaaatacctccgccagatgcgacacctgcagttgccgaggatgatgtggaactggaaccggatgccgaagaggttttctccttctttaaactctggctgctgctgatagatccgctcgagctcgctaatggaggaattggaggtggtggaggcggagctccaacgctggcaaatgacctcaccaggccagtagctccgctggatcctgaggaggcggatggtcccgaagatgtgttacccacagctgacgaggacttatcgcccttgggacttaagatggtggcagctgtagctgcacttttaagcgttgacatgctcggctttccggaagagccgtgtttgggtgagtgtgtgccaaacggcgacttcgggctgttggaggcggtgttgtgcttgggactgctatacacgggagagtgcttggggctgggacgggcagtcggcactccggccattagaccctgtccaccgccaccagctttgggtgacgacgagggagaggaaaacttgcgaaccactccaccagttgcggaagcatctgcgccacctgcaggcgagttttgcctagaatagatcttctccggcggtcccatgggcgaatcgtcgcgctttttcttgcgcttcttttccttctgcgtatctgaagagccgctgctggctgaagacgacatggagctgccagaaccactacaaccggacgtagacgaactacttgtgctactttcgtggggacgctttgcggccacacctactccagctgaagcagcggtactttttttggttgagtccttactgggatccttgccagttattggggtaatagttatagtcgtgggagtggcactggatgaggctgtaacacctcctccggctatagccgcctgggcattcaatggaataatttcgataccacccgttcgctgtacctcgaccccggacactcccccagctgatccagactttccatctcctgggatgggggtgatgctgacgcaatgcttcaaatttggagtcttgtccttccagatatttttgtacttgtcagcaatgtcatggtcactcgtcttggcggagccggatgagctggagctgccgctgaccgtggtgccactggccgaactaccagactgtggatcggtttcccgcttaagattgatcaaacccgctatggccgctgctgccgaagtagaagcggcaaaagcatccgctagagatcgcgacttcgcatccattttaaggttgttaatgttggcgaagccacctccgggtaggcttccatcggaaggcgtcggcgtatccattgaaaactggctaaagttattgcctactcctgagacaggtccaccaccactcatgcctccacctccgattgctccagaaccagatccaggtccaatcgcgccatgcagtttgaattcgtgctcctcatcccagcacttaagcaacttgtagattaccatcggaatggataccactttgcgcgcggtgcgggttaacttctgggacagcagctcgtattcgttggtcagacagtaaacgctgcacgtgggctgaccatcctcaagcagaaaatccacagtggccagcgactcttcgtacgggtgctgcagctcaaccgtgatttgattaaatgaaacggcggttacctccagtatcacagtgctgtccatatctgggacgaatgagcataaaaaaaatattattatcataaaacaggaatgtggggggaagtggagcacccaactcaccattatactgcttctgctgctcacgaacacagcttgcgagcagggtgtagaagagagcttgtttcttgaggaacgccacgattcgcggaacctgggcgggttcagtgaagggcagtgatgacaccagagttccctgcagtttgcggttgtcggtaaagaaatagcagtgcgtctctttaggtaaattcacatacaggccgcgctgtgtgttcttaatggcctgcttcgatgcagtttgtactatgagattaagcactgtggtgggcggaccaggaggagtggcaactgagtctagaccgggcagaccgagagcctttagtgattccaggcaaacaggcatgggtttgttcagccgaagcacaaacgtggccggcatcagcagcgagttgttctggttaagttgggcataggtgggaacctccaaccccgtttgggcatcgcggaccaaagtcaccgttggcaaagtctgcagtttgttggctgatgagccttcgagattgatagtggcactcagtccgtagctgcttcgcattacctggtcgatggtgaaatcgccgctggccagtttgggatccccttcgggaaggtggagcggcgggcagaaataagtaagcctcataggatggccaccgcgacggggcagcacaagacccaccgatgaacttgtcataagtgagtagctgtctccggagtgaccttgcaggtgcagttggtataggctctggatatccgtctccatggcctgaagcgctacaaacgccttctttttcaccttgggctcggcattcagctggtaaatggaggacagaccctcgagttgaaccgtaaagtctgcaaagtcgccagacttgaggcaggccactagctcgctggactgttgctcgatcttgcactcgtggtgcaccttgacgtccgacagactgccggcggcgtccagcaggatctctacgtagaacatgtccgttgatatgaagagaagctgctggtcctccatgaacttgaggcccaactggcgcgagaggctctccaaacgctccacaaggccgtggcgtgacgtgaccttgatgtagtgctgcaacttgtccagcgccgactgcagcgtggccttgcacagggggtccagagggtagtgcttctcgataaagtacatacgcaccgacttcttgatctcctcgtagctctttggcttgttccggtacttggcccgcagcttctccatcatggtttcctgctggatctgcttgttcttttcctcgatgctgggaatgtggctgccgaagcctgtgcagatttgtgtcagtggtgctccggacatcttagttatgggggtatatattagtacttaccagtccccgaggactttgcattggatccgctcatatctatgcgttcctaagtaaactgtatttacttaatgatgctgtggcatttttgacaaagaattgcggcaaatgaaaaagttctcgatctaaatagctcagaaccttttttctatgccttcatcatggcaaaaaaatttcaacgccaaaacaacaaaatggctgatccttcacagtggctggtcacgctataataaaatactggaatataaaacggaactatgatatttccactgcgtcatttgatattcgatgtattctgattcaaagcttgtatcaattgcctgttcaattatgtatgttatattttttagtatgaggggtaaatataatgaagcaattaacatctatattctatacatccttctggtacttttacattctattttttatgatgtaattgtgcctcatttcctactcgaattttctcttaagctacaagggtattgtaatgaacagaaaagctcaaacattctttcgttaaaaaataaattacaggcctcataatttaataccgatgatttaatatttatttaaaatttccaatgatttctaaatgtcttattggcataaagtttaatttggggtttctgttccaagaaaccgaaaatgattatttaaagtttcttgagatttgaaagaaactataatcctataaaaataaatatcagctaaaaaaaactttaaggactaatcaaataagtaaacaaatacagcttacgacttaaacaaattttatttcgctaaattcatgataagtcttaagcgttcctctcttcctcgtacttacctaaactacgacagatatacggattatattgaatataggtttggtccgacaaatcaaaagtagtcataacctttactaaaggtagatgttatatttcatagaaaattgcaaaagcttaaattcaaattttattaaacatttaaagtatttcaaatttctgttttctctaaattattttggtatatttattatcatcaaagtgcagagcgatatttgtatgcatgcgcggtcacattgagcgtaaatgataaatatttgttattaaagtgtttcggaaccaaaggttaacaattcagccacatgacgtccattgcgggaggccacggcgaggcgaatccaaacagctcc

SEQ ID NO: 15911 - DNA, 4714 bp, DROSOPHILA
atttttttgccatgatgaaggcatagaaaaaaggttctgagctatttagatcgagaactttttcatttgccgcaattctttgtcaaaaatgccacagcatcattaagtaaatacagtttacttaggaacgcatagatatgagcggatccaatgcaaagtcctcggggactggcttcggcagccacattcccagcatcgaggaaaagaacaagcagatccagcaggaaaccatgatggagaagctgcgggccaagtaccggaacaagccaaagagctacgaggagatcaagaagtcggtgcgtatgtactttatcgagaagcactaccctctggaccccctgtgcaaggccacgctgcagtcggcgctggacaagttgcagcactacatcaaggtcacgtcacgccacggccttgtggagcgtttggagagcctctcgcgccagttgggcctcaagttcatggaggaccagcagcttctcttcatatcaacggacatgttctacgtagagatcctgctggacgccgccggcagtctgtcggacgtcaaggtgcaccacgagtgcaagatcgagcaacagtccagcgagctagtggcctgcctcaagtctggcgactttgcagactttacggttcaactcgagggtctgtcctccatttaccagctgaatgccgagcccaaggtgaaaaagaaggcgtttgtagcgcttcaggccatggagacggatatccagagcctataccaactgcacctgcaaggtcactccggagacagctactcacttatgacaagttcatcggtgggtcttgtgctgccccgtcgcggtggccatcctatgaggcttacttatttctgcccgccgctccaccttcccgaaggggatcccaaactggccagcggcgatttcaccatcgaccaggtaatgcgaagcagctacggactgagtgccactatcaatctcgaaggctcatcagccaacaaactgcagactttgccaacggtgactttggtccgcgatgcccaaacggggttggaggttcccacctatgcccaacttaaccagaacaactcgctgctgatgccggccacgtttgtgcttcggctgaacaaacccatgcctgtttgcctggaatcactaaaggctctcggtctgcccggtctagactcagttgccactcctcctggtccgcccaccacagtgcttaatctcatagtacaaactgcatcgaagcaggccattaagaacacacagcgcggcctgtatgtgaatttacctaaagagacgcactgctatttctttaccgacaaccgcaaactgcagggaactctggtgtcatcactgcccttcactgaacccgcccaggttccgcgaatcgtggcgttcctcaagaaacaagctctcttctacaccctgctcgcaagctgtgttcgtgagcagcagaagcagtataatgatatggacagcactgtgatactggaggtaaccgccgtttcatttaatcaaatcacggttgagctgcagcacccgtacgaagagtcgctggccactgtggattttctgcttgaggatggtcagcccacgtgcagcgtttactgtctgaccaacgaatacgagctgctgtcccagaagttaacccgcaccgcgcgcaaagtggtatccattccgatggtaatctacaagttgcttaagtgctgggatgaggagcacgaattcaaactgcatggcgcgattggacctggatctggttctggagcaatcggaggtggaggcatgagtggtggtggacctgtctcaggagtaggcaataactttagccagttttcaatggatacgccgacgccttccgatggaagcctacccggaggtggcttcgccaacattaacaaccttaaaatggatgcgaagtcgcgatctctagcggatgcttttgccgcttctacttcggcagcagcggccatagcgggtttgatcaatcttaagcgggaaaccgatccacagtctggtagttcggccagtggcaccacggtcagcggcagctccagctcatccggctccgccaagacgagtgaccatgacattgctgacaagtacaaaaatatctggaaggacaagactccaaatttgaagcattgcgtcagcatcacccccatcccaggagatggaaagtctggatcagctgggggagtgtccggggtcgaggtacagcgaacgggtggtatcgaaattattccattgaatgcccaggcggctatagccggaggaggtgttacagcctcatccagtgccactcccacgactataactattaccccaataactggcaaggatcccagtaaggactcaaccaaaaaaagtaccgctgcttcagctggagtaggtgtggccgcaaagcgtccccacgaaagtagcacaagtagttcgtctacgtccggttgtagtggttctggcagctccatgtcgtcttcagccagcagcggctcttcagatacgcagaaggaaaagaagcgcaagaaaaagcgcgacgattcgcccatgggaccgccggagaagatctattctaggcaaaactcgcctgcaggtggcgcagatgcttccgcaactggtggagtggttcgcaagttttcctctccctcgtcgtcacccaaagctggtggcggtggacagggtctaatggccggagtgccgactgcccgtcccagccccaagcactctcccgtgtatagcagtcccaagcacaacaccgcctccaacagcccgaagtcgccgtttggcacacactcacccaaacacggctcttccggaaagccgagcatgtcaacgcttaaaagtgcagctacagctgccaccatcttaagtcccaagggcgataagtcctcgtcagctgtgggtaacacatcttcgggaccatccgcctcctcaggatccagcggagctactggcctggtgaggtcatttgccagcgttggagctccgcctccaccacctccaattcctccattagcgagctcgagcggatctatcagcagcagccagagtttaaagaaggagaaaacctcttcggcatccggttccagttccacatcatcctcggcaactgcaggtgtcgcatctggcggaggtatttcaccggcaagtgtggctgctgcagtagctgccctgaaatcctcacaacagcagatgaagtcagtcgccagtctttcgcatctggcggcgggcgggggactgggtagctatgcggccccgtcgggagcgggagcatctggtgcagccgcagtggtggtgggagcaggagctggcgctggagcgggggcctccggactggagctgagtgccctgcgcaagggcatggcgggaggtgcggttagtttgatgacgtcgacggcagctttagcgccaacaattccggcaccaacaacaacagtggcagcgggctcggcagcgtcattggtgtctccagtctcagcggtagtgggtcaggggcaggaaacagcgggagcagcggcagcagcaacgctggcaacagcaacaattctgcagcagcagccacagccgggagcagcgccaactagtagctgcttaaccaccagcgggggcagcagcgactccgccgggagcatcaatccggccggagcctccacggaatacatggtgaagcccagcagccaagagggcctcaagctgaccatcaacaagacgggaagcagcaagagctccggcaccggctccggctctagttcctcctctggcctccaagcgaaggcaaagagcagcagcagcggcgccacgagcttcgctgggtccactggatccacgaagaagcagcataccggactcaagccgggcgttaacagcggacccgcttccaagaaggccaccgcagcggtctcgtccgccacggcatcatccagcaagcatttcttccagaaggcaaactcctcgggcaatctcagcagcaagctcagtgggtcgggatcaggtggcggaattccgctgactaagagcaacagcactaactccttccaagagcacaatgcccccaggcggcgtcccagcatgggagccttggctagcggcagcagtggaggaggcagcgggcagcgaaacggctcaatgtcgcagccaccgccgcgattcgatcaccacacggatatgatgaccatcctccaatacgcttctccgacaatggccgcaagcatggaaggcttcatcaaggggctccacaacaaattccagatcccaaagttatcgcagagaggaagcggaggcaatacaaccagtggacgcagcacgccaagtggcagttcagaaccggctttagcgggaacatcatcttcgatattaggacctattgccagctctactggactgacggagccggaagcgaagccgccggtgcctccttcgcagtctggcaatgaaggactgctcaatcttagcagcacggcgggtacaccatcggcggatgggatagatgaggagcttttggctagcctggctggcgaatgacagaagaaagacagccgtcatgagatattcctgttgctctatgcgattttctcttaaagctagcatagtgagttagtttaaagccattagttacacgattttgttttatgatgcatagaaactaaggatcttattaggcaatttcttaactttattggcagaaaaatgatttaaaactccaaaggaaataaataaaattttacaacacg

SEQ ID NO: 15912 - protein, 1455 aa, DROSOPHILA
MSGSNAKSSGTGFGSHIPSIEEKNKQIQQETMMEKLRAKYRNKPKSYEEIKKSVRMYFIEKHYPLDPLCKATLQSALDKLQHYIKVTSRHGLVERLESLSRQLGLKFMEDQQLLFISTDMFYVEILLDAAGSLSDVKVHHECKIEQQSSELVACLKSGDFADFTVQLEGLSSIYQLNAEPKVKKKAFVALQAMETDIQSLYQLHLQGHSGDSYSLMTSSSVGLVLPRRGGHPMRLTYFCPPLHLPEGDPKLASGDFTIDQVMRSSYGLSATINLEGSSANKLQTLPTVTLVRDAQTGLEVPTYAQLNQNNSLLMPATFVLRLNKPMPVCLESLKALGLPGLDSVATPPGPPTTVLNLIVQTASKQAIKNTQRGLYVNLPKETHCYFFTDNRKLQGTLVSSLPFTEPAQVPRIVAFLKKQALFYTLLASCVREQQKQYNDMDSTVILEVTAVSFNQITVELQHPYEESLATVDFLLEDGQPTCSVYCLTNEYELLSQKLTRTARKVVSIPMVIYKLLKCWDEEHEFKLHGAIGPGSGSGAIGGGGMSGGGPVSGVGNNFSQFSMDTPTPSDGSLPGGGFANINNLKMDAKSRSLADAFAASTSAAAAIAGLINLKRETDPQSGSSASGTTVSGSSSSSGSAKTSDHDIADKYKNIWKDKTPNLKHCVSITPIPGDGKSGSAGGVSGVEVQRTGGIEIIPLNAQAAIAGGGVTASSSATPTTITITPITGKDPSKDSTKKSTAASAGVGVAAKRPHESSTSSSSTSGCSGSGSSMSSSASSGSSDTQKEKKRKKKRDDSPMGPPEKIYSRQNSPAGGADASATGGVVRKFSSPSSSPKAGGGGQGLMAGVPTARPSPKHSPVYSSPKHNTASNSPKSPFGTHSPKHGSSGKPSMSTLKSAATAATILSPKGDKSSSAVGNTSSGPSASSGSSGATGLVRSFASVGAPPPPPPIPPLASSSGSISSSQSLKKEKTSSASGSSSTSSSATAGVASGGGISPASVAAAVAALKSSQQQMKSVASLSHLAAGGGLGSYAAPSGAGASGAAAVVVGAGAGAGAGASGLELSALRKGMAGGAVSLMTSTAALAPTIPAPTTTVAAGSAASLVSPVSAVVGQGQETAGAAAAATLATATILQQQPQPGAAPTSSCLTTSGGSSDSAGSINPAGASTEYMVKPSSQEGLKLTINKTGSSKSSGTGSGSSSSSGLQAKAKSSSSGATSFAGSTGSTKKQHTGLKPGVNSGPASKKATAAVSSATASSSKHFFQKANSSGNLSSKLSGSGSGGGIPLTKSNSTNSFQEHNAPRRRPSMGALASGSSGGGSGQRNGSMSQPPPRFDHHTDMMTILQYASPTMAASMEGFIKGLHNKFQIPKLSQRGSGGNTTSGRSTPSGSSEPALAGTSSSILGPIASSTGLTEPEAKPPVPPSQSGNEGLLNLSSTAGTPSADGIDEELLASLAGE

SEQ ID NO: 15913 - DNA, 7883 bp, DROSOPHILA
tgcatttacaaataagtaggtcagatgatagagagtggtatttagaaattttttcacgttcatcattgtattaccatgaaaaatggtcaactaagaatatgcaacatcctttccattttacctccaaaggttcagttcttttctgttggctattattaaaaactactacatacagtaaactaccatatagaaaataagtcccaatcgcccatttgcatattcccaattaggagctagtcatgaaaccgactcttagattctgtttagtgcaaattcatgagcgacttaagtattcgagcagccaccgctgcttttgccccattaattcccgatgccggccacaggaatcggattcggattacttctgaggaggagtccacgggctaatttaatatatatgatccggttggtcgggtcacacggaaatcccgcagcaaagccgcttggcaattgtaaactgtagtaggcacctaatttgcgaactgttgagccattagggggcacaaggtgccggcagatcccttctgcccaccagaaccccaaagtcacccaaaacccccgcagaacgggcacttaagtacacaactaccctctccagagttctggacggattcccttcaaacactgggaaaaaagtgcggaatcatgcataataatgttccttcctttcatttagatatactatttgacactattatttcttaaagaatgaaccaattttagcggcttagtgaaatgaaaatgtcttttcttgacgtagttttcgcgcagtgtacttttccccacccattgtcccactgcacatgtttatggctaagccaacaaagcgttgactgcggttgaccccagtagctcgaacaataaagttggtgcgggaaagcgacggggacagaagggacgcctcatcagcgactaaatccccatgtaagctccataaaggataccaacccacggccgagagccggggaccaaggacgaaggagcgttcaactaattagcattaaatcagctgtaacagcacgcttaccttgccgaaaatggtgaggccgccgtgcttcatgttgaaggtcggcgcgtccgcatagctcgagtccgcccacggggtgtggcaggttgaagtcagcgtcatatagcggacgccaatggcatatagggtgcgtagtacggccagggatcccccgagggaatgaccaccctccacgccggtcagggagcacaattgctggttcttgtgggcatcgataatgtctgtaaagtgattaaaagatacaagggcgcatttaattactcgaatagggacgatcattagttaaggctttaaatttaatgtgagaattgagaatttattacttataagcttataagggctagaaaagaactctgaacttaagatcataaatatccatttttccctgcatagatttggtatatcaagctttctagaaaggaaccttattcagtatagtttaaaacagctattcacttcaagattacaattgattccttgatataactatatacttgctccagtagagcaaaattgtaaatattttctaatttacagtcttttgtaattttgccttagttgcgttcaaacagatatgtggctaaaatgtttttgctgttttgtggttgggcgcaacgtaaacttcaaacttggctcggccctgttttttttggccatgagtaacatttgttgttctgtggcctgtcatttgctcggctgcacccattgagcactcagtgcattgtggttggtcctggattctggattgtaggtcctgtgacttagtagtcctccctgccctcgcaatgccagtttatccctggtcaacaaaacatttcgctgggccatgcaatattcacgcttgtcttggcccggctggctttgatctgtttcttgacattttatttggttgccaacgagcacttgtcaaaatacttgtgctctgttcattcatttattaccattgttttagggcagccaggcttaaagcatgtttgcgtaagatttttgtgaaagttaagtggagctttgcgaaaatccggacccagtggtcggtagcaatgccgaaatgtcttaaaacaataattttgactggcaagttcgtcaagaggttgaaggacctaaaagttttggtaagctttaatttatttctcaaggaattgaattaattgcaatacgaataatattgatatgtagtttatatctgctgtcctcctcttatttcaataataaacatattagttccaaatatctcattgaatgttatgaaaagcatttctatgttaatggatttgtcaatcaataaacagccctttcgatttatctgcaactaattggggaaacatgttcccgaaaccttttccatttgccagctattcaaatcaagcattttgtgtgcccaattttgataacatttcgaatgtatcgaccacatttacaagtacaggtacagaaaaggcaaacggaaagcgggttaataaattttcccacaaaacgaaggccaaaaggcattatttgcctgccaagggagagaaacccggcaacaggaaaaggactcaagacacaggtcctgcgaagttttcatggctataagcaaataagctgcgcaaaatcaaacgcaacggcaggtgaaaggaaacgggaattgttctcgatgctgttttctattgcgtgcactggaaaaatatatgcagtaagtttacaagaaggcagaatgttaagtcacaggaaaagtataccattgggttggtttctttacggccttgacatgatttctaatgtataagaataaggtaattatttttcattacttcatggcaaaaagcaactgttaaatgtatttttcctcgacatttccctgccatactcctcttcgtatttttggaaagggccaaaatacctgcccagaacctggtcgatgtcggaaacgtcgtaaaaccctaaaatatgaagcaaataaacaaatgcacagggccaataccaaaagcaataccaagcgaatccttccaggacgaagaggcactaaaatgcgccacgtgagctgaagttcaatttcggagccaggacttggactctgactcgcttctttggggctgcatgtaattgtctgtgactggaattggaactgtgactgctactgttttcgatttctggtgaccagggccgtaatgtataatagatggccccggatcggatgcgaattgaggcagtggccgtggagtaccctcctgcacacaagagcacacgggaaatgctgcaatacatttcagaatgaaaatcccaaccaaatgccacttgacgcaataaaccaaaggcaatggcagaacaagttccagaaaagggagcactaagggatgggaaatggtggtgctggaaacacagataccctgaaggtccaacgtcagaaaagttttatttgagagaagtatttttatatataaatatttaaaaatcttccaactctgaattattttgtgacaaactcgttaagtatagttttccatccacactggccactttggggttagcttatatttatttcctggccacttctgcggaatataccctattgtgcttggaaagcattagagcgcccatgctgatgcgaaaagcttcattcaattcttattcttctttctgctgctgcagaatgcaattttctcaatatcctttccctccaactgaagctccctctgttcggattgttgtgctggagcagtgtaaattgaagtttacacttttgaaggtgaaaattgaaaactgcaaataaaaacgattcgcacatggggagagccaaatgtaaagtagctggctactggcaggtgacagttgagagggatgccgccacaaggatattccaggatatatatatcccaggcgtcctttgtgtgcgtctgttgtgcttatgcagcgctcatttgtttagtacgagagtacggaatattttggtgcacttataaaaattaaaaagtctataaggggaggtatatatttaaaaagcgaagatggcagaagaataacaattactaaatatattacaacattgctaagcatagcggtttaaatttaagaattttctgatatttaaagtcaacgtttatgcagaataaatgctcgctgtgcaaatacttctgaccacctcagtatcctgcacaaaggaccgtttctatagcaggactcccatttgtatctggacttcaacgtgcacttccatccggacagggacttggacttggatttggatttggtttcgcattccggagcggactgagtgacgtggcccgtcactcgacgcgttgtgtttcggttcgttaggtttgcattttttacaatcactttggcagcagctcctccggaggagaaccgagtgcagtccaggggatcgtagtgggaacagcacgccctgctgcacttgctcaatagtcacttggattcgcattttatttacacgacatgtgagcgagagcggacaacaattttgactgaatttatttgcagtagttaaaataaaatgctcggttttattttttgcagcggcagctgggacttcacaaaaaaaaaaagaaacaaataaaaacgagtaatgctgagggccacagtgaaggcgaggatgtttattttgattccccttttattttggtactttgcagctcaccaaggtaggtcagttttgtttcacttcgggattttggtttgatttctgcgcttgggcctttgaatcgcagcttgtttacagccagctcaaaggggatttcgcttgagtatatggcaattggtcgaatttccctggcaaacgattggaaatgtttatgatcagtttgcatatggatatttcgtgtatcgtagtcggttaacaattttgcgaatttaaatcgtttcaatggattaagcactacaaggattgttatttagctttatattactttaggtattcgtattttattttaaattagtttgcacatgatttcatcgttctcttttttaagattttacaaataaattatggtaacatgcaaaactatcaaaaatatttgatttcatagagttgttttatttaattttatttattttcagcttttggccaaaattgatacatatgagactttatgaaatgcaaggctatcgaacatatcctttattattcctcttagttatgaatttcccattgccaagtccttgttcccttatttttccatccatgctctgctccgattttaatcaaatttattgctcaatttgccacttcacccgcttcactcaatccaattttctgatcggaaaaaaaatgaccacaacaattaaaagaaaaagatcctgctgactcggacagagggagtgaaaaaaaaacaaaaaactaaaaccatcaagatgattgcaaattgctcaatccagtgctctcgtttgatttctacgttgctgtccatatgggcttcagttcaaagttttctttggcaattcacctgtcaaaaatatgcattggcatctgaaaaataaataaaaaaaaacatccttatccattcctcacccatcgagttcacgcaattgtgtagtaatatttctttgctacaagttttcctgcttcatatttctcgtgttttgtcgatgatttttcttagtcatgatttattgacatttccatttacggctacataaatgtttcaacgcaaatgccggaagcgatttgttggttttcccagttttttttcgtttttttttttttagccatttttcgtgtgtgtgtatgtgcagctgcagtctcagctgcaacactaaaatattgccacgaccccagaaccgagtaagtgcaaatcaaaatgcaaaacggaaaaccaacaaggaaactcaaatgctggccggggagtcggagcataagtcaaaagttgctacttgcactgctgctctgttgatttcagctttgttttctcctgttttcgaacactgaaatataaatatttctataaagtatcacctaaaaaaattttatcgaaaatatgataactaaaatttattgggaaacttgtatcttttaacggaaagtggttatagagttcgaggaaaatattcaaataaatcgggagaatagtgtagaggagagtaaaatgcacaatttgtaagtctggataaaaacataaaaatagatcggtaaatgtttaaaaccagaaaagattaatttattgtcgttctttacgattgcgtggcacttaagattcccaatctcactaagtgagtttttctaagtgcttggttgcttgctatttggcaagcggaataccgttgactaccccgccccccctttttttcactttggccaccaagcccacgctaacacaaagaaatatgaactgttttcctttcgcttaaacgaggcctctccggttggcaactaggtgagtgagcagcgtatcaaaggaaatggtgcaaaaatatggcacgcggtaagcagctgccccaaaagccgcctcaagggccgccttctactccgacaaactgctttttggtagctggccaagatacttttcaacaactttagcccaagactcgcgagtcaaagttttccggcgtaaccagcgcacacaaaaaatataaaaaaaagccgaacaaaaaaactagtggaaacggagtaggaacagtcgaatgtctggcgtgcatttttgcagttcccggaatactttcggtactttgccgacttgaggaattcagctggcccacgcggcgtatgtgcgatattttggttaacttaccctgtgcggaagtgcaagtggtaagctgcggcgaataccgatccgtcaggcgctttattacatcgatctgctccagagtcagctgcactgcatctcgatgttgagcctcgcaggggacataggccgcccagaactgaaatatagaatataacacttattttttgcacttaatttattaattaatatttctttcatgatggtcgttagtaaattacatagctattgcttaaaatattattttttaaactagtaaaataattcttcattcccttttcataagctcactccataaaaatatgttgtaaacagtaagaaactttagaatttttaaaaatgaagtttgtttgtacaacaaccgcatataccatacttggagaaagttttcttcttaagtctgagcgatttattgtcattttttccggtatctgaaagttttttgttaattgcacattattacgaagggtgatatacaaccgccaataaacagaaactcctcaagagagtgcccaaaaaggagtacggaaggaaaactgagcaaaacagtttcatcacgttatatcattaaaggaaaataaaagcacgtacgtgtctccgtggaacagaaaccagggtgaggaacgagctggaagctggaaagtggcaaaaagcgattcggaaaaaagagcaattaaaaagttttggcttttggctcggcgcactcgcacaaaagcaaaaactgagcaagtcccgtaataaataatttttaatataaattcgtgagaggcctgaaccagaaaaccggaagaaggaagctgggaaacataacctatttccccacaccacttttttcccactcttgtgctaagcacgtagtttaaaaccatttctctgaaccgaggcagtaaattaaaacctaaacaaccagcactctaaatgttcatttattctatttcggctgcagttcctgatggccgtgatgatgatgataaagtttggcgtaattcatggaactaaattcggtttgctcccaggttggacgatgtgcatatgaaatatgtaaaacttttcaataaacgagtcacagaaaaacaattacggccagagacgaactgctgtgttagttgtgcaattggatttgtgctcccgttctcgaggga

SEQ ID NO: 15914 - DNA, 384 bp, DROSOPHILA
cagttctgggcggcctatgtcccctgcgaggctcaacatcgagatgcagtgcagctgactctggagcagatcgatgtaataaagcgcctgacggatcggtattcgccgcagcttaccacttgcacttccgcacaggacattatcgatgcccacaagaaccagcaattgtgctccctgaccggcgtggagggtggtcattccctcgggggatccctggccgtactacgcaccctatatgccattggcgtccgctatatgacgctgacttcaacctgccacaccccgtgggcggactcgagctatgcggacgcgccgaccttcaacatgaagcacggcggcctcaccattttcggcaaggtaagcgtgctgttacagctgatttaa

SEQ ID NO: 15915 - protein, 127 aa, DROSOPHILA
QFWAAYVPCEAQHRDAVQLTLEQIDVIKRLTDRYSPQLTTCTSAQDIIDAHKNQQLCSLTGVEGGHSLGGSLAVLRTLYAIGVRYMTLTSTCHTPWADSSYADAPTFNMKHGGLTIFGKVSVLLQLI

SEQ ID NO: 15916 - DNA, 1523 bp, DROSOPHILA
tctcgatttctcttactttcagtaaccaaaaacacaaatcaaaatggctgatgatgagaagaaacccgactggtccaagggcaagcccggagatgccaaggtgaaggaggaggttgaggccgaagcttaagtgtccacacgtccactagtgtccactgacccgtgactcccgccctaaacaataattgaaattatttacaacaattatctgaagcaatataatttatatgaatctattaatatatatatatatccgcaaatatatatgcatgtatatatctcgccatatatatgtgtccacaatggatttgatcagaaatgaagtcaataaacaacaacagcaacaactaaattaactcaaaatcaaaatcaaactcagactcaaactcaaactcaactgcttataaataattcagatcaacgattcaaaacaacagccaaacatctgaacgccttgatgaattatttattatatttcattatttacaaattatattttttaatgtaaattaaattaaattacaaaaaaaaaaaacgaacattctttctaccttgccatgcccaaaatcatcttttgcacacaaacactgagcgaaataatctttaaaatggttgagattttcaggaggggatcgaaatctcacgatctcgaatatcataaatacagtatagttttgaatgaaaagacagcgatattgaaaatgtatgccaaaaagtttattgcatattgtattgtaatggtattatcgtgcatttttaaggggtatctgatagtcacgacactaatctacatcgtgcttttttgtttataatagaatgggttttggtttgattggaacatgctttgcaacatgtacaaattcaacaaggcctttataatttatttgaaaatagacaaaaaaaaaatgtgtttacgaactatgtatataccgcctagtcgaacagtttcaactcgtccagacgtttcaaggtgcacttgaggctctccagcgtgcgagtgtttccttcgaacatgagctgcaccttctgcctggcgaatgtctcgtcgtgaaagttcttcagtgagttgtcctcggagtccacaccgatcatgctcatcagcgggaagaatccgaaagccacaaagaaaccgtaggcttcgcgctttctgatttcatccatgatatcctcatagctgggcagctccttggaccagggcagatgcttcaggcagtccaccagggacctgtagtagatgtcgacaagctcctgccgccggtcacgtagcacctccagttccaagctggtgttcaggaagtagttgatgtcgaagcccaggctgccgtagaagcacagctggaagtcaatctgaaggggcagtaaaaagggcattaaaggatcagtcaattctgatataaacactagctactagctgctagttcttagttggtttatgaagaaataaataatctaatattggagattgctggaagcctcaatttttgtggccaaccttttggtacttacaatcttcacctgctgca

SEQ ID NO: 15917 - DNA, 1387 bp, DROSOPHILA
tttctcttactttcagtaaccaaaaacacaaatcaaaatggctgatgatgagaaaaaggcagcagctccggccgcagctccagcggcggcggccaaaccggcggctccggcagcagccccggcggccaatggcaaggctgctccggcggccaatggaaaggctgctccggcagctgccgccgctcccgccggtccgcccaaggatcccaacgaccccaaagtgaaggccgaggaggctaagaaggctaaacaggctgagatcgagcgcaagcgtgctgaggtgcgcaagcgcatggaggaagcctccaaggccaagaaggccaagaagggtttcatgaccccagagaggaagaagaaactcaggttgctgctgcgtaagaaagccgctgaggagctgaagaaagaacaggaacgcaaagcggctgaacgtagacgcatcatcgaagaacgttgcggcagtcccaggaatctcagcgatgccagcgaaggtgagttctcacaaaaacacactcacccactcccacaccaagaaataccagcgcactcacacacacacacacacgcacagtcaaacaacacctccaaatatccagatacagttcgaaccgttttgataaccacacttcgttccgcagatactattcagagtgtttgtaaggactaccacagtaagatactgaaactggagtccgaaaagtacgatttcgagtacgatgtagccagaaaggattatgagatcaacgatctcaatgcccaagttaacgatcttcgcggcaagttcgtcaagccagccctgaagaaggtctccaaatacgaaaacaaattcgccaagctgcagaagaaggccgctgagttcaacttccgcaaccagctcaaggtggtgaagaagaaggagttcacgctggaggaggaggagaaggagaagaaacccgactggtccaagggcaagcccggagatgccaaggtgaaggaggaggttgaggccgaagcttaagtgtccacacgtccactagtgtccactgacccgtgactcccgccctaaacaataattgaaattatttacaacaattatctgaagcaatataatttatatgaatctattaatatatatatatatccgcaaatatatatgcatgtatatatctcgccatatatatgtgtccacaatggatttgatcagaaatgaagtcaataaacaacaacagcaacaactaaattaactcaaaatcaaaatcaaactcagactcaaactcaaactcaactgcttataaataattcagatcaacgattcaaaacaacagccaaacatctgaacgccttgatgaattatttattatatttcattatttacaaattatattttttaatgtaaattaaattaaattac

SEQ ID NO: 15918 - protein, 318 aa, DROSOPHILA
MADDEKKAAAPAAAPAAAAKPAAPAAAPAANGKAAPAANGKAAPAAAAAPAGPPKDPNDPKVKAEEAKKAKQAEIERKRAEVRKRMEEASKAKKAKKGFMTPERKKKLRLLLRKKAAEELKKEQERKAAERRRIIEERCGSPRNLSDASEGEFSQKHTHPLPHQEIPAHSHTHTHAQSNNTSKYPDTVRTVLITTLRSADTIQSVCKDYHSKILKLESEKYDFEYDVARKDYEINDLNAQVNDLRGKFVKPALKKVSKYENKFAKLQKKAAEFNFRNQLKVVKKKEFTLEEEEKEKKPDWSKGKPGDAKVKEEVEAEA

SEQ ID NO: 15919 - DNA, 4796 bp, DROSOPHILA
catcgctgttttgcggctgaacatcgagtacatcgccgggttcccagctaagatcttcagtctgacactgcagccttaggaagcgtacatcctgaaagtgatccaccgccgttgttctttggttatccagaattttgaaagagtgggcagtttgtttttggctccagagcagattgtccatcggagcaatttgggaatccttaggcagctcctttactgaccactttacagtagtttggtggctgttgctaagtttactttcgtcaagaccagagatgcctttcagagctgtccacaaatcctttgtccagctaagggatacacccaaatgcccgtagtcatgctgatcatcacacagacccactggacacacgctatttgctcccagattctgtagtctcttgctcagtttcttggcggcatagttaaacttcggatagctggagtccccgagtccaaggcacgcgaactgcatgccttgcaaggattgggcgggtaagctgcgcttcaggagaaatcgccaggccagcttcatgttatccggctccactccgtcacccgtagtggccaccacaaagaccacgaggcgctcctcaataagtttggtcatatcgtactcgtcgaaaggcagcacgggtccttggaagcccagttgatgcgactcccgccagatctgttccgccacatcctgggcggtgccggtttgactcccgtagagcactaacagccgcattttctacaattcagaattttcgaataaaatttactgattaccgtatttcatatgttacaatttgcgcataacagcctggtcctcaaacttaacagcacgctgttacgctgcactgttatgttatagaaactacgggtgccgaaataccaaaataattgaaattgaaattagtatttcattcattcgtttctagtagcgttgtagctcttcttctttttcttcgaatagtgatgaacctaaaaacatcgatagtcttaaatgtcgatgcatcgccacctctaatagaaacgcaattaaacatattgcattgttttgcgtaaataaaagtaagtttcgcaggcaatggcctcgaatcagcaaatcaatacgcagctaagcaaaaagctatcctggctgttgcggcacggtgcgaaaacggagggaatcacgatccgtgctgatggatttgttagcgttcccgatttgcagaagcacccacgctacttgtgcttcaccttagaaaaactgaaggagattgccgccgcggatgccaagcaacgatatactcttcgctggaatccagaactcggagtccatgagattcgcgccaatcagggacactcattggcggtgctggaaggcgaagctggcggtctcgagaatattacccatgtgagccaggtacccctggcagttcatggcacctattacagacattggggggcaattagaagccaagggctaagtaggatgaaccgcaaccatgtgcactttgcatgcagcgatgagaccaattccactctgagtggattccgcagcgattgccagattttgatatatctaaacgtggaaaaggtgctggcggacggcatacccatctatcgatccagcaataatgtactgctctgtccgggaattgaaggcttcatacatagttcctactttcagcgtgtagtggacaagaaaacggggcaacccttacaaattgatcattgttattgaatagaataaacctggccgttaagcagtaattaaaacgattttttacagaaatgccggcccctgcctcggaatcaacttctccgcctggggatggtgacggtaatcttgtgctttgcatggtatgcgctgctcccttccggagtatgcaggattgccttgcccacgagctgatcaagcacgccagcaagccacaaaagcaactgcgacagcgattgaacgccattaccaagctatttaacagcgcacaaagccaatccgagcgtcaagagctgcgggaggctctcgaatggtccgagtccggcgggcacttgtgcaccgtattgaatttctttgcttgtgatctcgaaaatatgaaaacctgcttcgggcacgtccggaactgcatagagaaggagatgaggggcagggttagggtgttcccctttggttcactggttacgggtttagcactgaagggtaagtgatcaccagtacaagaaaagcacataatccgaatccttttccgcagagagcgacatcgatttgtttctggagcccaacggcaaccagccaccattgttccataatcagctatacaacaagacctcacactttttacgaagatccaaatgctttgcggatgtcttcaccattcgtcatgccagcgtgcccatcattagatgtaagcatcagctcaccggactcaacatagacatcaatatgtcaaatccgaatagcatatataactcccgatttgtgggcgaactgatgtttcgcaatgagcggatacgcgagctctgcctgtttttgaaaatttgggccaagaagctaaaattgattagtcatggcggcatgacaagctattgcttaatatccttgatcatcgttaacttgcaagtgaatcgactagtgccctccgtcaaagagctccagtcactctgtccaccggttattttgtcgggcgttaactatgcctacagcctggacctaacgccgccgatcccagcacggctcaccacgctggatttacttaaaaacttcttcatatactactgcactgtcaactttgacaaaagtgtattgagtccgtttctgggcggctgtgtggacaaggagacaacactgggcatgccgggaggttttcccgagtacgatgagcaacaaaagctcgtgcatgatgcaataggtgcgccgccagacgctttccagctggatagggccatgtgcgtacaggatcccttcgagctcagtcgcaacgtggccaaatcagtgtccatttcaaatttatgttactttagacaatgcctagtcctggcagctcaagcgtgcagcgatcaggaactaacttcgcaaccagagaagctatacgactacctattatttggcctggcggataagttagtagccgacaaaatagtggcagataaaagatcagaaagggctacgccgcgaaagcaacaaaaaattgaaaacgcccatgtgcaaccgccaatcgtcgatgagacacaagaaacaaaagtcgccgaagtcggagtttgtgggacaccgcccttagtgcgatcacacgtcatcacgcccaccacaaacgatgtcaaatgcctgcgctccattgtgctggtcaagaacacggagaacgatcagagcatatattactactggttgatctgctacgtggacactataaaggatgtgctaactcaactgtatgctttgaatgtggaacttaaagaatcgaaggagccgaaacactacaagtggctaatcagcatttcttacgacacttggacaggacgctctttccaacgtggcgccggtcaatctttcttcgcccaccagttgcagcagacgattgagtttacgaagacgagaatgggaaatccgcagtacgcagtcaatttgcgcggctatttcacgctgcaggccagcgaggattacaaagagttgcgcctggatgtgcagcctcttcaaggagatctcctcggactgcagcgcaatagtccgctaacaaggctttttaaggcgtttaagaatctcctgggcaactatagtttcaaagagaaggtcagcacctggaagttttgcgccacaactgaccaaatatgaatatcaacatgtcatgctttatgtacatactttttgaattcaatggcaaattgaaaacacaccttaatgacattattaacattattttatttgaatgtacaatatcactataggctaaactaataccttaaattataagtgtaacgacgactaatcatatgtaaagttgactaaacgatttcttggcaaaagtctcttggagcagggagaaattatttacaagggcgacaacaaagcttatctaaatcatttacaagtgtgtgtctgaaactccccaagaataataaagaggttataattgtgtaaagtaatcacaaaagtctttgaagcgtagggagttcaattttgagtatactttctactgggggctaatccagatacttttaggcatagagagaggaagaatttctattgtatagtattaagttaattgtacttttagatcgtaatctgagtaacggcacttgggcactagccttagttataatcctgatatatctatcccttcttctttcggcaataacaatattttttggcagcaaaatcattcatgcaatccgcctctccgctgtagacattcaatcggctcaccgatccggtcacctttacggagtcatccgtgtgattgtgtcgcaacgtggcttcgtactggcccttattgggcgacgtgacaaagatcagtcgataggtgtgcacctcatccggatcgagggcgttgtgatgcgcccggaacgcggatttgatgctgtgcagggagaggggggcacatagcttggcaaaggtgccgtttcggaactcggccacatagttattgagatagctgaccacacgcttgcctagcatccgcgactccttcgaggtgctcgatatggtgtcgtattcccaacaggtgcaccagtgatccgcgatgcccacatcggagcaactcctttgcggcgagacgggggtcagtaaactctggcattgcgggcaatcgggtgccggacctaacgattccatt

SEQ ID NO: 15920 - DNA, 2643 bp, DROSOPHILA
catcgccacctctaatagaaacgcaattaaacatattgcattgttttgcgtaaataaaagtaagtttcgcaggcaatggcctcgaatcagcaaatcaatacgcagctaagcaaaaagctatcctggctgttgcggcacggtgcgaaaacggagggaatcacgatccgtgctgatggatttgttagcgttcccgatttgcagaagcacccacgctacttgtgcttcaccttagaaaaactgaaggagattgccgccgcggatgccaagcaacgatatactcttcgctggaatccagaactcggagtccatgagattcgcgccaatcagggacactcattggcggtgctggaaggcgaagctggcggtctcgagaatattacccatgtgagccaggtacccctggcagttcatggcacctattacagacattggggggcaattagaagccaagggctaagtaggatgaaccgcaaccatgtgcactttgcatgcagcgatgagaccaattccactctgagtggattccgcagcgattgccagattttgatatatctaaacgtggaaaaggtgctggcggacggcatacccatctatcgatccagcaataatgtactgctctgtccgggaattgaaggcttcatacatagttcctactttcagcaaatgccggcccctgcctcggaatcaacttctccgcctggggatggtgacggtaatcttgtgctttgcatggtatgcgctgctcccttccggagtatgcaggattgccttgcccacgagctgatcaagcacgccagcaagccacaaaagcaactgcgacagcgattgaacgccattaccaagctatttaacagcgcacaaagccaatccgagcgtcaagagctgcgggaggctctcgaatggtccgagtccggcgggcacttgtgcaccgtattgaatttctttgcttgtgatctcgaaaatatgaaaacctgcttcgggcacgtccggaactgcatagagaaggagatgaggggcagggttagggtgttcccctttggttcactggttacgggtttagcactgaaggagagcgacatcgatttgtttctggagcccaacggcaaccagccaccattgttccataatcagctatacaacaagacctcacactttttacgaagatccaaatgctttgcggatgtcttcaccattcgtcatgccagcgtgcccatcattagatgtaagcatcagctcaccggactcaacatagacatcaatatgtcaaatccgaatagcatatataactcccgatttgtgggcgaactgatgtttcgcaatgagcggatacgcgagctctgcctgtttttgaaaatttgggccaagaagctaaaattgattagtcatggcggcatgacaagctattgcttaatatccttgatcatcgttaacttgcaagtgaatcgactagtgccctccgtcaaagagctccagtcactctgtccaccggttattttgtcgggcgttaactatgcctacagcctggacctaacgccgccgatcccagcacggctcaccacgctggatttacttaaaaacttcttcatatactactgcactgtcaactttgacaaaagtgtattgagtccgtttctgggcggctgtgtggacaaggagacaacactgggcatgccgggaggttttcccgagtacgatgagcaacaaaagctcgtgcatgatgcaataggtgcgccgccagacgctttccagctggatagggccatgtgcgtacaggatcccttcgagctcagtcgcaacgtggccaaatcagtgtccatttcaaatttatgttactttagacaatgcctagtcctggcagctcaagcgtgcagcgatcaggaactaacttcgcaaccagagaagctatacgactacctattatttggcctggcggataagttagtagccgacaaaatagtggcagataaaagatcagaaagggctacgccgcgaaagcaacaaaaaattgaaaacgcccatgtgcaaccgccaatcgtcgatgagacacaagaaacaaaagtcgccgaagtcggagtttgtgggacaccgcccttagtgcgatcacacgtcatcacgcccaccacaaacgatgtcaaatgcctgcgctccattgtgctggtcaagaacacggagaacgatcagagcatatattactactggttgatctgctacgtggacactataaaggatgtgctaactcaactgtatgctttgaatgtggaacttaaagaatcgaaggagccgaaacactacaagtggctaatcagcatttcttacgacacttggacaggacgctctttccaacgtggcgccggtcaatctttcttcgcccaccagttgcagcagacgattgagtttacgaagacgagaatgggaaatccgcagtacgcagtcaatttgcgcggctatttcacgctgcaggccagcgaggattacaaagagttgcgcctggatgtgcagcctcttcaaggagatctcctcggactgcagcgcaatagtccgctaacaaggctttttaaggcgtttaagaatctcctgggcaactatagtttcaaagagaaggtcagcacctggaagttttgcgccacaactgaccaaatatga

SEQ ID NO: 15921 - protein, 855 aa, DROSOPHILA
MASNQQINTQLSKKLSWLLRHGAKTEGITIRADGFVSVPDLQKHPRYLCFTLEKLKEIAAADAKQRYTLRWNPELGVHEIRANQGHSLAVLEGEAGGLENITHVSQVPLAVHGTYYRHWGAIRSQGLSRMNRNHVHFACSDETNSTLSGFRSDCQILIYLNVEKVLADGIPIYRSSNNVLLCPGIEGFIHSSYFQQMPAPASESTSPPGDGDGNLVLCMVCAAPFRSMQDCLAHELIKHASKPQKQLRQRLNAITKLFNSAQSQSERQELREALEWSESGGHLCTVLNFFACDLENMKTCFGHVRNCIEKEMRGRVRVFPFGSLVTGLALKESDIDLFLEPNGNQPPLFHNQLYNKTSHFLRRSKCFADVFTIRHASVPIIRCKHQLTGLNIDINMSNPNSIYNSRFVGELMFRNERIRELCLFLKIWAKKLKLISHGGMTSYCLISLIIVNLQVNRLVPSVKELQSLCPPVILSGVNYAYSLDLTPPIPARLTTLDLLKNFFIYYCTVNFDKSVLSPFLGGCVDKETTLGMPGGFPEYDEQQKLVHDAIGAPPDAFQLDRAMCVQDPFELSRNVAKSVSISNLCYFRQCLVLAAQACSDQELTSQPEKLYDYLLFGLADKLVADKIVADKRSERATPRKQQKIENAHVQPPIVDETQETKVAEVGVCGTPPLVRSHVITPTTNDVKCLRSIVLVKNTENDQSIYYYWLICYVDTIKDVLTQLYALNVELKESKEPKHYKWLISISYDTWTGRSFQRGAGQSFFAHQLQQTIEFTKTRMGNPQYAVNLRGYFTLQASEDYKELRLDVQPLQGDLLGLQRNSPLTRLFKAFKNLLGNYSFKEKVSTWKFCATTDQI

SEQ ID NO: 15922 - DNA, 5892 bp, DROSOPHILA
cgatattgcaatatgtatttatgtattttatgattacaggagggtatatactgtattccttaaagtttctatatgaagttggtaagcttttttcagctttgaattttaatggtgatctataatgttgtgaatgttctttaggttttgcatatatccactaccaataatgggagaaaaatagtggttccatttaacaaaggggttcaatttacaataaaatacaaattttttttcctttcaggtgaactggtttttgtaccacgatgaatgaattcccaaatcggacgagaattataaaggttagctagtaaactatccaactcagaaatgaataaaatgaatgtgtacccaacatgggagatatagggatatgcatcgtataaacgtggtatatgttttaatctgctttgagatattaactccgccaatcagaatatgtttgaaactacgagtacttgtgcttatgtacatatgtatatctttgtgccaatatacgaatttttcgtatgtactattcgatttaattcgccgatcgtatttggataagtgtattctaatcaatgacctactcttgcatctattatttcttatcaatcagctgctcgttcaggctgacttattatatcatttcgagagagtaattatgatataatccggtactcagttcatggatcgggcaaatgggatgctgagcttaacaattttcccagattcatttccttctttaaaacactaaggctaacgttatttggatttggatgagataccaaaataattttaaatgattaaacacaattgtttcataactccaaaatattcatacatgactctagtacataatgcaaaccgaataaattgattgatgatttgttgttctgataacaaatcactcttttggtaatatttgtgaaaaaaaataataaaaagttaagatccgtttcttatcttaaaccattgcggaagtacattcattaattttctattgagagaagtattctattaagattttaatacatttaatacgatttcttaatgtacatacatgtaaatttaattatttgctaaagttttagtaaggcaccatttaaattatatttgcaaataaaccctactacttgttgttccttaaacactaatgatgggatagagtactaaaataaatgcagacaaaattattccggagacagttggagatattctaatattgcttgaaatgcccattttgtattccatgtcgatatctaggagtagatcatgatttcgcgtgtagaactggtggatatcgcttatctagaggaagtttacaaggatgtttaaaggacacacctataccaaagaaccatttacgcacctcgttccatccgtatttgtttttagcctgaacaatcgcttcatagacagcgttgtgttccaagtttttgacgagatacgacattagaaagtgggatccatcagttctgattggcgttggcttgatatgatactcgtgccatttgccagggtgctggtaggtttcattcatctggaatgataatagagtgatttttaacagctaataagtattatctaattacttaacttaccaacaaacggcgatacaacagcttaatctcatcaagcggcggtattgactcaattgtccacgtcaagttgtagtgatctaggaatccactcaacgcgggagatatgaagtcagcaggaccaggtcgtccagacacttcaatatacttttttgttctccccaaagcattatccgcaacacagctataatttccgaaatccgttggctggaagttccggataatcaggctgtacctatcatctcgtggatacatagatctccgatcggtagcatcaagtagaaatgagttctggtaccacagcatcttagaagagtaatttttttttttaattttacaattaatataagtctaagcagtataattgcgtatttgtacttacttctgagtttacatctccatgaactatgcaaacgagctccacatcgtatccctcagatgcgtggacccaagatttctctaccgttatttcggggggcgctataagaaatatgttattattaaaaattaaaatcgttaatggcttagctgtggagtatgctgcttacagagaatggtcaactgaatgtccatggatacgcgatctttaaccccgttgtcggctgagcattgatatgtgcctgcgtggtgcctgtccacgttttccaatatgagtgtagagctatccgacaggtgtgttggcccggaaaacacatccttcttgaaccaaaatatggtgggcaccgggttaccagacgccttgcattccagggtgacggtgcttcccttccgggcagtcacttggccgttatgaggcagagccctcagggtgggcggaactatagggatacatccagcatgggcaaatactctcaaggtacagaatgaaatataaattacccaagatttccaccgtgtgaacttggtcacggttctcctgatctcccagctggcatatataatctccagcgtcttgagtctttactccattgatctgcaagttatagtcgcccactatcttaaagcgctgatcccttgttattttcaaatgtccggctgtgagcacggatgagccctttcgccacaggagcacaaaggagccgaggttctgtactttgcagggcagctcgatggtctcccccacgatgaccttgtacaagtgacctctggataagaactttggcgccgttgtgggagggtcattctctggcaatatgaaggagccgcctgaaatgaggttcgcattggtgtcatatttgaaattttgttctttaaaatcatcgtctctgcgattgtgtttttagcaatattaccgaataattttcataagagtgttttaaatatttattttccccttaaccatacttaccgatcaaggaaagtgaaaaagaaaagaggtagagtacaagtgtccagtatttccttgtataggtagtctgtaatgaatattcaaataaaatatattagtgctgtcgatttaatgcaaacttctagtaagaactactaaaatgtattcatataaaatgttatagctttttatgctactatttttattttttattaaatatgttttaatgtgaaattaaactaacaaagcgtttagtaaggaatctctatatataattataacaatattaattacaatatataaagataatttttcacttaatgggatcacgttttctaacggttaatatacagattgtttcgatttatagttatttatttaataaattattaaatttcaaaataaattaaatttttcagagatttaaaagttctcttttccattttttttaattcttgggtgaccgccaatgtgtgatcgatatacacatgaaataaatacaaaataaaaaagaatgcctgagctgtggtggtaacacagatgagtttcacaaatatattgtaacgtaaagaaaatatatatattcgtattagaaaataaccgtcacctgcgcttaagaatgcgaactttcttctatataaatattatttccaaaatacttgatcgaatacaataaatatacccaatatattatataacaaatattattttaatttattcatatttttgtttatggttatcttaatgataatctgtaagctttaaaagtacaagtatattactttgttttttaactctgacgcccttgccaggcaatgagttttggatctaattttattataacttttcaaatcataatacgaataaaataaataaataaataataaataatatattttaaaaaatcatcattctgttcaaaaatatatatcatcaaagtgaattaagcctgaatcgtgagatacatcgagataatcgtttcagtttgggtaaaaaaccaggtgatggaatatttcattttgaatctaagatattaatcagtccttaacatattttaagctcagtaaaattgatattagacgagaagagacaaacaacgaaatcagttttcgtcctttaattcagaaaaaccggttatttgaatgcgccaactcgcttttgatcgtttcacgtacttaacaagagtacgcattttagttccacaattttaatgttgaatttttgagtacgcttaaaataaaaactgtttgtaattaagcaaatttaaaattaaatttttattaaggacaataaagcttttaaaggtaaactagttagcccgccccaattttcgttaattgtgaatctcaacaaactgcttaatactacaatatacactatataattgaaaggattcgtatatatgtatgtacctatgatacaagttacatctgttattataggcgaacatacacataggcgaactaaacgaattggaaactaatatatataatataatataatatactttgtatattgtatgtattagttagtctgtattttgcattattattttttcagacttatcacgaatacataagtgtgtctatataaataggcggtatatatacacgcacatacataatatatgtatcttatttcaagcattaaacaatcgtatctcatagattgcagcatttctagtggttgatcaaccaatatatacatatctatatccttttccgaggcaagaaaaactttctttctttttgttccacactttttataatttctaatgtgcagcacccattttcatccttaccattttaatatgtatgtatggcttgcaattatttcgtttttcctctgataaattaagacgttctttgctttgagttgccctttgaaatactgccgattcacttgcacagaccacttaattgtttatcagattaatatcatttttccaggtttcttataaaatagtctcgaatttaagactggcgagtataattgtatttatccttaaaagttccattaattgagcgcatgctcagtgcaacattattttgtgtcaaaagctttcccgagctttaaacgcagagcagtgtcacaaggcaaacttcgtctttgcgcatttactgattctaaaagacaccactctaaatctgctttaaaaatgtaaaagttggttaaaaacttaaatctatcaaattgttactgatgctaaaatgtcgaagtaggaagtactcatagccgcgttagaaattatgaaacaagtggaaataataatgaaaatattttacaggtttgacgtacgtattttcgaatactcggatgtcgaaacaacttcgtagttattttatacgaaataagtgctcattcattaaaactagtctgattttttaactatcaattattttattgggttactaataaatcattgataacatttgcaatgaatattgtgaatggcgcatttatggttcattgttgtttaaattaatatctttatatcatgtactgaaaaaaactaaaaattttaattcgatattcttatcgataaatattacttttaaaatactttcccaaagcgcagatatcggcttttattgatgaagttgataccgaacggccatccctaattcgagataatgcagtattgtcaatttacgtgtaataataatgcatcgttgaagaacagccgataatgtttctgtttctgtttctgtaagaatagttacccttttcccgccagatatactgactcttgttgtccgcagtctctggttgttgttatcgcttgtgttggtggcagtactctctttccttttcctgaggcaatggttgcttggccggaagaataagttgcacacatcgtcggaaaatggcatcaacgtgggcatttttcacccgtattgcaacgcgggtggcggcggagaacgcgtcttgtggtgcgccgtgagagcactacaggtaatattggaaaaactgcaaaacctacat

SEQ ID NO: 15923 - DNA, 1710 bp, DROSOPHILA
cgccagtcttaaattcgagactattttataagaaacctggaaaaatgatattaatctgataaacaattaagtggtctgtgcaagtgaatcggcagtatttcaaagggcaactcaaagcaaagaacgtcttaatttatcagaggaaaaacgaaataattgcaagccatacatacatattaaaatgactacctatacaaggaaatactggacacttgtactctacctcttttctttttcactttccttgatcggcggctccttcatattgccagagaatgaccctcccacaacggcgccaaagttcttatccagaggtcacttgtacaaggtcatcgtgggggagaccatcgagctgccctgcaaagtacagaacctcggctcctttgtgctcctgtggcgaaagggctcatccgtgctcacagccggacatttgaaaataacaagggatcagcgctttaagatagtgggcgactataacttgcagatcaatggagtaaagactcaagacgctggagattatatatgccagctgggagatcaggagaaccgtgaccaagttcacacggtggaaatcttggttccgcccaccctgagggctctgcctcataacggccaagtgactgcccggaagggaagcaccgtcaccctggaatgcaaggcgtctggtaacccggtgcccaccatattttggttcaagaaggatgtgttttccgggccaacacacctgtcggatagctctacactcatattggaaaacgtggacaggcaccacgcaggcacatatcaatgctcagccgacaacggggttaaagatcgcgtatccatggacattcagttgaccattctctcgccccccgaaataacggtagagaaatcttgggtccacgcatctgagggatacgatgtggagctcgtttgcatagttcatggagatgtaaactcagaaatgctgtggtaccagaactcatttctacttgatgctaccgatcggagatctatgtatccacgagatgataggtacagcctgattatccggaacttccagccaacggatttcggaaattatagctgtgttgcggataatgctttggggagaacaaaaaagtatattgaagtgtctggacgacctggtcctgctgacttcatatctcccgcgttgagtggattcctagatcactacaacttgacgtggacaattgagtcaataccgccgcttgatgagattaagctgttgtatcgccgtttgttgatgaatgaaacctaccagcaccctggcaaatggcacgagtatcatatcaagccaacgccaatcagaactgatggatcccactttctaatgtcgtatctcgtcaaaaacttggaacacaacgctgtctatgaagcgattgttcaggctaaaaacaaatacggatggaacgagataagcgatatccaccagttctacacgcgaaatcatgatctactcctagatatcgacatggaatacaaaatgggcatttcaagcaatattagaatatctccaactgtctccggaataattttgtctgcatttattttagtactctatcccatcattagtgtttaaggaacaacaagtagtagggtttatttgcaaatataatttaaatggtgccttactaaaactttagcaaataattaaatttacatgtatgtacattaagaaatcgtattaaatgtattaaaatctta

SEQ ID NO: 15924 - protein, 467 aa, DROSOPHILA
MTTYTRKYWTLVLYLFSFSLSLIGGSFILPENDPPTTAPKFLSRGHLYKVIVGETIELPCKVQNLGSFVLLWRKGSSVLTAGHLKITRDQRFKIVGDYNLQINGVKTQDAGDYICQLGDQENRDQVHTVEILVPPTLRALPHNGQVTARKGSTVTLECKASGNPVPTIFWFKKDVFSGPTHLSDSSTLILENVDRHHAGTYQCSADNGVKDRVSMDIQLTILSPPEITVEKSWVHASEGYDVELVCIVHGDVNSEMLWYQNSFLLDATDRRSMYPRDDRYSLIIRNFQPTDFGNYSCVADNALGRTKKYIEVSGRPGPADFISPALSGFLDHYNLTWTIESIPPLDEIKLLYRRLLMNETYQHPGKWHEYHIKPTPIRTDGSHFLMSYLVKNLEHNAVYEAIVQAKNKYGWNEISDIHQFYTRNHDLLLDIDMEYKMGISSNIRISPTVSGIILSAFILVLYPIISV

SEQ ID NO: 15925 - DNA, 2789 bp, DROSOPHILA
aatacaaaaccatgtttaagatgtttttaagcatatataaaatttatagtgttccaataaaatgatatttaaaatataaatataatataatataaaatatatgaaaagaataatcgcggcggatagcactacaaattaactaaatacgtttcctaatgctatatttaaaacacttaaatttaaatccgtaagactcatataatctatttaaataaaacaaaatactaaaaccaatatcttatcttttctaattgcaatcacttaagctaatgaaagtgtcgcgaatatttactggtgtcatatatagctaatgaataatctatgaacttctgaatggggaaaaacactttgactctttttgatactcacatattcacatccgaaagacattgtaaatatttaaatctaatcaaatgttgcctgtttttaaatgtttagataagattctagggaatcgtaaattaaaacaaatcattttcggtatattaaatttatattaaacataattaagaaaagtaattatttgtgccacgatgaactttttctataaaaaactttttttttagttttctataaaaactattatgaataaagtgaattctgagaacaatagtttgtgtacctatcataccacttttcaagccttttattgttcagtaaataaaaggtctaatgataagaaccgtaactcataattgaatcatcgcatcttgaaagttacatataacaattccatattggtcatagttttgctgtgattaaagtttaatatgaatttaagtcatatggatttgttatctcatttgcttccattaaacatttcacacggctccattcatgagcacttttagccaagttagacttttaataatatattaccattattctttatcgcctgtttgtcggaacgggcattttatatgacccaccatctagccagatacgattaaggtataaatactccgtgggcattcccaagttttcaagcttttccagcaacatgaaagcattcatagctatcctggctttggctgtggcctcggcctctggcgccaccatgccccgtttggccaccgagaaactgaccccggtccacaccaaggacatgcagggtcgcatcaccaacggctatccggctgaggagggcaaggctccctacaccgtcggtctgggcttcagcggcggctggtggtgcggtggttcgatcatcgcacacgattgggtgctcaccgccgagcactgcatcggagatgctgactccgtaactgtctacttcggagccacctggcgcaccaacgcccagttcacccactgggttggcaacggtaactttatcaagcactcatccgccgatattgccctcatccgcattccccacgtggacttctggcacatggtgaacaaggtggagctgcccagctacaacgatcgctacaacgactacaacgaatggtgggctgttgcctgcggctggggaggcacctatgacggcagcccactgcccgactacctgcagtgtgtcgatctccagatcatccacaactccgagtgctccggatactatggaagcgtgggagacaacatcctctgtgtcaggactcccgacggcaagtccacctgcggtggtgactccggcggccccctggtcacccatgacggtaccaagcttgtgggggtcaccaactttggttccgtcgccggctgccagtcgggtgctcccgctggattccagcgtgtcacctaccacctggactggattcgcgaccataccggcattgcttactactaatcgactatatctgattaaaaaaaaacttcttgaagcgtaaatttaaatttttgtactttactcggagtattactgtggacatgacggcttttatttttagttagtattcaatattaaatttaagaataatatttacggattgtttgaaaattacatttttaaatggtatataaagtgctcatggactataatgtgattctacagagtctttaaacatattatatatatatgttaaggttgtgtcatttaaattatatagatgtggtcttttataggtaaagaaagatcttagatcttataatgggattgctcttaagtcttagttgcggttttttgttttacaggatgtgtagtaacaggattaaaacgattggggattcttaaagcttgctgaaatacttaaaattatttcaataatattattatttcaatgatattaatgaccaaattcaacccatagttataaaacaatttaaatttgcactttaaatatttttattcaatcgaaaatcgttgcttagtagtaagcaatgccggtgtggtcacggatccagtccaagtggtaggtcacacgctggaagccagcggggtggccagcctggcaaccggctcccgacacccagttggtgactcccacaagcttgctgccgtcatgggtgaccagaggaccgccggagtcgccaccgcaggtgcccttgccatcgaccacgcgcacgcagatgatgttgtcgccgacggtgccggttccgtagtagctggcgcactcggagttgtggatgatctggagatcgacacactgcaggtagtcgggcagtgggctgccgtcataggtgcctccccagccgcaggcaacagcccaccattcgttgtagtcgttgtagcgatcgttgtagctgggcagctccaccttgttcaccatgtgccagaagtccacgtggggaatgcggatgagggcgatgtcagcagatccgtgggtgatgaagttgccgcttccaaccca

SEQ ID NO: 15926 - DNA, 789 bp, DROSOPHILA
atgaaagcattcatagctatcctggctttggctgtggcctcggcctctggcgccaccatgccccgtttggccaccgagaaactgaccccggtccacaccaaggacatgcagggtcgcatcaccaacggctatccggctgaggagggcaaggctccctacaccgtcggtctgggcttcagcggcggctggtggtgcggtggttcgatcatcgcacacgattgggtgctcaccgccgagcactgcatcggagatgctgactccgtaactgtctacttcggagccacctggcgcaccaacgcccagttcacccactgggttggcaacggtaactttatcaagcactcatccgccgatattgccctcatccgcattccccacgtggacttctggcacatggtgaacaaggtggagctgcccagctacaacgatcgctacaacgactacaacgaatggtgggctgttgcctgcggctggggaggcacctatgacggcagcccactgcccgactacctgcagtgtgtcgatctccagatcatccacaactccgagtgctccggatactatggaagcgtgggagacaacatcctctgtgtcaggactcccgacggcaagtccacctgcggtggtgactccggcggccccctggtcacccatgacggtaccaagcttgtgggggtcaccaactttggttccgtcgccggctgccagtcgggtgctcccgctggattccagcgtgtcacctaccacctggactggattcgcgaccataccggcattgcttactactaa

SEQ ID NO: 15927 - protein, 262 aa, DROSOPHILA
MKAFIAILALAVASASGATMPRLATEKLTPVHTKDMQGRITNGYPAEEGKAPYTVGLGFSGGWWCGGSIIAHDWVLTAEHCIGDADSVTVYFGATWRTNAQFTHWVGNGNFIKHSSADIALIRIPHVDFWHMVNKVELPSYNDRYNDYNEWWAVACGWGGTYDGSPLPDYLQCVDLQIIHNSECSGYYGSVGDNILCVRTPDGKSTCGGDSGGPLVTHDGTKLVGVTNFGSVAGCQSGAPAGFQRVTYHLDWIRDHTGIAYY

SEQ ID NO: 15928 - DNA, 3051 bp, DROSOPHILA
tgtttttggacggaaggaagtgcggcggcaatgtgaagctgtgcatgaaggacctgcaggcgctgaagaagccgctggttaaagtgctgaaccgcaaaaacgacattaccccctttgacgatccctcatctctggagttgtaagtttggacaaagcaaacaactaaaatgtagtgtatttaattgtaaacatcattcgaatcaccagcttgaccatgaagaacgatgctgctttgttcacgttcggttccacgtccaagaagcgacccgataacattatactgggcaggatcttcgagaacgaggtgctggacatgtttgaactgggcatcaagcggtatcaggcgatttccgagtttaagaacgagaaaatcggagcctgcgtcaagccctgcctggtgttcaatggtccgaaatgggcacagaccgaggaactgaggcgccttcgcaacctgttcatcgacaccttccagcgcgagaaggtggattcgatccggctgcagggcatcgaacacgttctgagtttcacggttaccgatgacatgaacatactgatgcgttcctaccggatactgctgaagaaatctggccagaggacgccgcgcatagagcttgaagagatcggaccctcggccgacttctccattcgccgcaccaagatcgccagcgaggatctgtacaaacaggcacgcaaacagcccaagcagttgaaggtgggcaagaagaagaacattagcacagacgccctgggcaacaccaagggacgtgtccatctgggcaagcagcaaacgggctccattcaaacgcgtcgcgtcaaggcgctgcgtaagacgccggaggagaagaaggagaaccgacagcgcaagaaggttgctctgaaggcggccgccgccgaagcactggcctcacaaggaaacaatcccttctctagttaattttagttgtaataaattggtcctgattaaattagctttaacaagtgtatgagttctggagtcgtatcagtgtattccgtcgacaatattgcgaatgcgccgcgtcttggactcggccaacgcgtcctccagcgttttgatcatgtgcaccagactgcagacatccgtctgcactagcaaatcctttcgatgcagccgctcgtcctcctgcatggccttcagctcctgttcgctgcgcccggagatgtccaccgccagcagctctcggttttcattcttcggttcggtgtgcagatatagcttcatagtcaccaccacctgacactgatccagcaggctccgcgacgcggtgcgcacctccagtcgccagtccaggttgaccagccgataggcacgtatgttggccgacttgattgagccctccacaaagtttcgtttgctggtgacgaactgctcgagaacttctatcacatcgtcgccgagttcggggaatgtctggcgcagtatggcctccatgtcgacggaactgctccccactcgggtggtcacgctgatgagcagggatatcagcgcctccaccgcctgctgcactgcctcaggactgcccaaatcggaggactttttggctagcatctcgtaacggctgggattgggtccatttattaggtaatcaaaggcggacttgcacagctccaccacagcgctggcgggtttttggagcaggctcaaatgattgcgctgttgttgagttaagcgcagagatgacatctttgtggttggttgcctcactaagttagttaaatagtattggaagtattcataggtaaacaggtatgcgatatattcatttaatcgcagacgattaccttaaaaagtttgatgtgttgacttcttgagacttacgtcctgcggctgtacttcagctgtaaatatcagaacttagttaatttaaaaacataaacaataaactggagctcagctatactatttaccgtatcccttagagtttgaaatgcatacttggaaactaccaaaatagttcaattatgatcatcatcatcattttgattgcattctccagtagcaccttattttagctgcataaacttaacatttattgggacaaaccaaaataaataaatctggttgctatcgaatatcgataggtcgatacgattctgcggctcaattgaacatggcttgcaactgagttagcagctccatttgatttgtatcgatatgcaggctcaaatttaaatttgctgcatctaaatatgctgcactgcaactgcaatttaaatatttccatacgaaagtatgcttttccttaatattgcaagcatatggccaacaaatatctagttcatatgcacataaaatgttccccccaaatcaaaacccaacgaaaagctttcattcaagtaaaagctccctcagcgaaagcaaccctgttctcccccgcccccacggcaacaacaacaacaacatggattcgcaaatctgtttcattggcccgtgggattttgctggcagaactgctctcgtttaattgttttaaccaatacattttgtaaccaaaacccgtgcaaatatgctgaagcaagtgacgaagcaattggccctgcagggagtgcgcaccttctcggttggccagcaggtaagcattgttgttaccctccaaaatcccggccagaatcgtgcccattccactgcaactgtttacgtaacagtggcggctaatacactgcatccgctagcaataactacacagcctgacataacatcggcactctcgccatatctttgcattctcgatctagaacaactacaaggtgaccgtttgcggtgccgctggaggaatcggccagccgctgtcgctgctcctcaagcagaatcccctggtcaccgacttggcgctctacgatatcgttcatacgcccggtgtggccgccgatctgtcgcatatcgacaccaagagcaagaccgccggattcatcggagccgaccagctgggtgactccctgaagggtgagtagagggcaggggccgcgagtgaggttatgtgaccagcggataccagtggaaaatttgcctacgatgatggtggtggttccgca

SEQ ID NO: 15929 - DNA, 884 bp, DROSOPHILA
taaatgttaagtttatgcagctaaaataaggtgctactggagaatgcaatcaaaatgatgatgatgatcataattgaactattttggtagtttccaagtatgcatttcaaactctaagggatacgctgaagtacagccgcaggacgtaagtctcaagaagtcaacacatcaaactttttaagatgtcatctctgcgcttaactcaacaacagcgcaatcatttgagcctgctccaaaaacccgccagcgctgtggtggagctgtgcaagtccgcctttgattacctaataaatggacccaatcccagccgttacgagatgctagccaaaaagtcctccgatttgggcagtcctgaggcagtgcagcaggcggtggaggcgctgatatccctgctcatcagcgtgaccacccgagtggggagcagttccgtcgacatggaggccatactgcgccagacattccccgaactcggcgacgatgtgatagaagttctcgagcagttcgtcaccagcaaacgaaactttgtggagggctcaatcaagtcggccaacatacgtgcctatcggctggtcaacctggactggcgactggaggtgcgcaccgcgtcgcggagcctgctggatcagtgtcaggtggtggtgactatgaagctatatctgcacaccgaaccgaagaatgaaaaccgagagctgctggcggtggacatctccgggcgcagcgaacaggagctgaaggccatgcaggaggacgagcggctgcatcgaaaggatttgctagtgcagacggatgtctgcagtctggtgcacatgatcaaaacgctggaggacgcgttggccgagtccaagacgcggcgcattcgcaatattgtcgacggaatacactga

SEQ ID NO: 15930 - protein, 233 aa, DROSOPHILA
MSSLRLTQQQRNHLSLLQKPASAVVELCKSAFDYLINGPNPSRYEMLAKKSSDLGSPEAVQQAVEALISLLISVTTRVGSSSVDMEAILRQTFPELGDDVIEVLEQFVTSKRNFVEGSIKSANIRAYRLVNLDWRLEVRTASRSLLDQCQVVVTMKLYLHTEPKNENRELLAVDISGRSEQELKAMQEDERLHRKDLLVQTDVCSLVHMIKTLEDALAESKTRRIRNIVDGIH

SEQ ID NO: 15931 - DNA, 5332 bp, DROSOPHILA
acagattgaagcaagccgtactttaagattaactttccatacactaggcacaacattaataaaaattataaaattcctgtaaattaatttatttagttaagtgtaaattattggacattttgtatatctataactgtaatttgaatgtacaatattcaaatatattaaatacgtataatttatttaacttagaaaaatacatcgacattttgtgaaaagcacaaagctttttacaactaattcaaacaaaatctttacaaatacacttatttgtatgtagaaacgattgaaatgctctcatttttaattttttaagtaacttacaatttaaagattttaaaattatacaaatgaataaaatgtgtttttaaaactaaactcgataaatccgttaaaataaaggcatctggctaggtaggaataaaacaaatcgtcaagtaagtacaagtaaaatagggagatagtcgatttccttcacccttctgatcaagatgtgaggtgtgaatttgttgaaatatttagtgcaattagcaagaaaaacattcttgaaaattgtaggtctgacttatgaacaacaaactacaaatcaaaatatagtgtttgtagtgtagtgtttgcatagcgttttctgtcctctcgacgttcatacggacagacagacgaacaaagccagatcgatatacttaaatgattcggaaacgcttcctcccacctaatctggtataatttttaccgaatctggtatagcctggtataattatgttagttttaaatattgctattccctgagaaacccaggaaagatattttcgaagagttttaccgttttttaaaagtggaagtatttatttacaaaatgaatcgacgctttaaaaataaaacaaataacatgataacaattaggcttaatataattaagaatataattggagtcattagactatccgcggattgcattcctgttaaataatcattgttttgccctagttttgcgatctcctcacccaataaatttttgattaaatttatctcgtgttctgaaacaaacaaatatgagactttgtagttgaactaaatgtatataaataccttcattttccagtatggttacgtctattatagaagatttcctttcctcggcgttattttgcttcgtcggtgcaagccacttaaattgttcacaattattgtcctgtgaacgagattttataatactttgcgatatcctaaggggtaatggtgctctctctaatttgtgaaattcagttatacgatttagattctgcaataaacttgatttgtgcgagtttattgcaaaatctaaaaacgttattagcagccagtagcaagccttctccagatgcgtggagtcgaggcagttggagtccccatatacggcaatacgtccttcattcttagtttcatgattattgcttttcgcaaaactgatacttcgttgcttcgttcgcagtagcaaaacccggttcttaaatgtggagtaatctgtgggtatagcctctgccaaattgctttccgcattgaccacgatttcctcgttgctttgaatactgttcgccttggtttggaacataccaaaaataggtacatctagttttgctaccttgctgggtgttttagaattaataatctggaaaaggcaaagttgtattctgtggaaactaaaaaggattatattaaatttaccgaaagtccttggtcattcagttttgtgcccactataatatctcctggattcattggaaacttaacaattgtggctccactagcatagtacattgaatggtcgcccagtttgaaatgtccctcaccgacaaaatcgccaaaagcaattccaaatggcttcaataaatcattcaaggctggaatatttgcgccaccagtgtcgggtgtccaccattgtcgggtgttctcgtcaaagaatttaatttttttcatcacagtggtgttataccagtctccgaatacgacgacattcaagcctcttttatacacgttttcctgtaaagcgtttatttcctcgtcgccaaaccctctctcagggtcaacaatcaataacgcgccataatccgaggcattgaagcaggtgaagggttctcgcaaaacatcaatgtagtagccaacatttcgtaaatgtgtatacatgtccctaaagtttgtgtgtatatggtctgccctccagtccagaggatctagtttaactttgagatcatctcgtggaatatagcgcggtggataccttaggctgtggtactgatcccataaaatcctcttgtttcttggcggttttggagtaacctttattgttaaaggaaagtcgacttctgtaacatgagtttcgttggtggtctgtttaaagctttccaaaactagggtgatacttcctttacaaacaccttcaaagttttctccttccttttttacagctggtaaacaaaaattgtttggtatagaatggcttagcactttcatatcaatatgtaccccatatatcctttatatagcgtttgctattttcatactcaccaataaaaactgacatccaaccggtccacggccaaacgataggcgaaacttgtgcagatacttgaagaaactgaccttggttttcgaaatcgggaatccatttagggatgccaactatatgacttgtgacagagataccattgagtatggtaacgtttgcaatagcgacggagcttccatagtacagaggttgggagctataaggccacatatagttttgggtgaagtcaaggtatgccggaataagggttatctttggtttgtatgacagcaatagctgcatactcttcagcaaattcagttttccagctccctgctcaaacatgttataatgcggcagtttctcggcaccttcaatgagtacctgcttaagagatgctgggtttatgtagtcgattttctgaaatgcaccgcttataagcagtgcagcagcccctgcaacaactggagaggacacggatgttccagagagtcgtctgcaccccttgcgcacatcactgccttccacttgacttccgtacgtgacaatatcgagtcccatacgtccgtagcctaagggaagttcccacgttgtcattcctctcgaactaaacttggcgattttatcatcaaactgaatgccaccaacgccaactacatcgctctgatcgccaggattgtttagcgtgccgtacaagggaccatcatttcctgctgccgatatcattatgacattattagccgacagttccaacaccttttcaacgaacggcgagtccataaagtcgggacccccaatgctaaggttgagaatgtttattttcctatatatcgcgtagttgaatgcatccaggaaccaggaagtgtaagaaacctgccgatgtagggctaattagattggcttagttaatttcagttctacgtttgctcacttgggagttcgtaaaaactttaaatatgtaaagatcggcgtcgggagcgaagcctaggcattccctggaagaagcgattaccccggcgacgaaggtgccatgactgactctgtcgtcaagtgacttttcattcgtccagtttgttcgttcctttacatttcgaaagtgtggatggtttttggttaggccagtgtcgaaaatggccactttaactcccttgcctgtgatacccagcttccaaaggatgttggcgtggagtacggagcacaattgtcggtggcgatcgttgtttgggtttctgttccttagcactccttggggatggcggtgaatatacgttaggttgctataggcgtcatagtttaggatccttcgtacgcttcgctggggaactactgcctttactgatgggtgagtctgaagcctttctataataaactctgatgatgattcataaccgtcgcaaactcgtaagatatcaaaatcacttggatattgccaagccaaatttagacggggaacaattctccagttcgttacctaaaaatggaaagggatataaaagagcttgtgaaaagtgtttaaaactttaaaaaggtacttttctgtcagaaaagatgcgtttgtgtctttcaaaagaagcaggctcaatccgtttgaaataaacaggagaatagacatttaaggtataaatataaccatttgaatacaaacttacgtttgaaccaagaagttttgctgcgatgtaggattctcggaccggggcaaagtattttgaatggaagtgaacgatgaactcatttggaacaacggctgttttaaaggcgtcgaggctgcaaattgcgcttattataaataagaaagtaaacacattcatttaactttgcgaaaggaataatttttacgaaaagttcaacaggcttcgtctgtgtagaaaaataaataaacaaaccgtaatcagctgttagcatgaacgaaaacgtttatatgaaaaataccatgaaattcggaaatgggagatactaacctgtaaacgtgtaagaaataagattcatttcaaaaacttatatttttaccccatagaatattaatgcaacaacattcagttacttttaacaaaaaaaaaaaaacgtttacgttagtttagttcgaacatgttttgtatgtttggtgtatcagcaatgtttattcccacattcctgcacattgaagttctggtcacactgcgtctcgtccggcaaagtttttaatcaagtttaagtaagatatgaaaagctaattaaaatagatcaggaactgcgaaccagcggagtctctgcatttcaacaataagtgatttataattcctttgcaaaagaaatgcgaatagttaactggggcgttcagtagtaggttttacaccttagaaaaaattattgcaattcggttatacttaaagcggcatattcacaggtaccgaaaacacaaagtctaggcgccaaaattgccgtattttctattttttagggcacttcaattcaagttgtacagtcaattcacttgccatttgccttcgggtaatgtattgagttgtccaacatcatagaactactcactactctttatttaaatttattcggaacccattttaattgcatttgaaaagtatattcgcctacgaatacctgctaaccaatatttctatcctacaaataacttgcatgaaaactccacataagaactgataacaccagcgaagcaatataatcatcggctagctgctagctcgatttatcatatactaataagttaatcaaacagaagcatttactttaaagaagatctaaatatgaaatgtaaagagttatcaacaacgagttagttatattaatggaact

SEQ ID NO: 15932 - DNA, 2859 bp, DROSOPHILA
atgaatgtgtttactttcttatttataataagcgcaatttgcagcctcgacgcctttaaaacagccgttgttccaaatgagttcatcgttcacttccattcaaaatactttgccccggtccgagaatcctacatcgcagcaaaacttcttggttcaaacgtaacgaactggagaattgttccccgtctaaatttggcttggcaatatccaagtgattttgatatcttacgagtttgcgacggttatgaatcatcatcagagtttattatagaaaggcttcagactcacccatcagtaaaggcagtagttccccagcgaagcgtacgaaggatcctaaactatgacgcctatagcaacctaacgtatattcaccgccatccccaaggagtgctaaggaacagaaacccaaacaacgatcgccaccgacaattgtgctccgtactccacgccaacatcctttggaagctgggtatcacaggcaagggagttaaagtggccattttcgacactggcctaaccaaaaaccatccacactttcgaaatgtaaaggaacgaacaaactggacgaatgaaaagtcacttgacgacagagtcagtcatggcaccttcgtcgccggggtttcttacacttcctggttcctggatgcattcaactacgcgatatataggaaaataaacattctcaaccttagcattgggggtcccgactttatggactcgccgttcgttgaaaaggtgttggaactgtcggctaataatgtcataatgatatcggcagcaggaaatgatggtcccttgtacggcacgctaaacaatcctggcgatcagagcgatgtagttggcgttggtggcattcagtttgatgataaaatcgccaagtttagttcgagaggaatgacaacgtgggaacttcccttaggctacggacgtatgggactcgatattgtcacgtacggaagtcaagtggaaggcagtgatgtgcgcaaggggtgcagacgactctctggaacatccgtgtcctctccagttgttgcaggggctgctgcactgcttataagcggtgcatttcagaaaatcgactacataaacccagcatctcttaagcaggtactcattgaaggtgccgagaaactgccgcattataacatgtttgagcagggagctggaaaactgaatttgctgaagagtatgcagctattgctgtcatacaaaccaaagataacccttattccggcataccttgacttcacccaaaactatatgtggccttatagctcccaacctctgtactatggaagctccgtcgctattgcaaacgttaccatactcaatggtatctctgtcacaagtcatatagttggcatccctaaatggattcccgatttcgaaaaccaaggtcagtttcttcaagtatctgcacaagtttcgcctatcgtttggccgtggaccggttggatgtcagtttttattgctgtaaaaaaggaaggagaaaactttgaaggtgtttgtaaaggaagtatcaccctagttttggaaagctttaaacagaccaccaacgaaactcatgttacagaagtcgactttcctttaacaataaaggttactccaaaaccgccaagaaacaagaggattttatgggatcagtaccacagcctaaggtatccaccgcgctatattccacgagatgatctcaaagttaaactagatcctctggactggagggcagaccatatacacacaaactttagggacatgtatacacatttacgaaatgttggctactacattgatgttttgcgagaacccttcacctgcttcaatgcctcggattatggcgcgttattgattgttgaccctgagagagggtttggcgacgaggaaataaacgctttacaggaaaacgtgtataaaagaggcttgaatgtcgtcgtattcggagactggtataacaccactgtgatgaaaaaaattaaattctttgacgagaacacccgacaatggtggacacccgacactggtggcgcaaatattccagccttgaatgatttattgaagccatttggaattgcttttggcgattttgtcggtgagggacatttcaaactgggcgaccattcaatgtactatgctagtggagccacaattgttaagtttccaatgaatccaggagatattatagtgggcacaaaactgaatgaccaaggactttcgattattaattctaaaacacccagcaaggtagcaaaactagatgtacctatttttggtatgttccaaaccaaggcgaacagtattcaaagcaacgaggaaatcgtggtcaatgcggaaagcaatttggcagaggctatacccacagattactccacatttaagaaccgggttttgctactgcgaacgaagcaacgaagtatcagttttgcgaaaagcaataatcatgaaactaagaatgaaggacgtattgccgtatatggggactccaactgcctcgactccacgcatctggagaaggcttgctactggctgctaataacgtttttagattttgcaataaactcgcacaaatcaagtttattgcagaatctaaatcgtataactgaatttcacaaattagagagagcaccattaccccttaggatatcgcaaagtattataaaatctcgttcacaggacaataattgtgaacaatttaagtggcttgcaccgacgaagcaaaataacgccgaggaaaggaaatcttctataatagacgtaaccatactggaaaatgaaggtatttatatacatttagttcaactacaaagtctcatatttgtttgtttcagaacacgagataaatttaatcaaaaatttattgggtga

SEQ ID NO: 15933 - protein, 952 aa, DROSOPHILA
MNVFTFLFIISAICSLDAFKTAVVPNEFIVHFHSKYFAPVRESYIAAKLLGSNVTNWRIVPRLNLAWQYPSDFDILRVCDGYESSSEFIIERLQTHPSVKAVVPQRSVRRILNYDAYSNLTYIHRHPQGVLRNRNPNNDRHRQLCSVLHANILWKLGITGKGVKVAIFDTGLTKNHPHFRNVKERTNWTNEKSLDDRVSHGTFVAGVSYTSWFLDAFNYAIYRKINILNLSIGGPDFMDSPFVEKVLELSANNVIMISAAGNDGPLYGTLNNPGDQSDVVGVGGIQFDDKIAKFSSRGMTTWELPLGYGRMGLDIVTYGSQVEGSDVRKGCRRLSGTSVSSPVVAGAAALLISGAFQKIDYINPASLKQVLIEGAEKLPHYNMFEQGAGKLNLLKSMQLLLSYKPKITLIPAYLDFTQNYMWPYSSQPLYYGSSVAIANVTILNGISVTSHIVGIPKWIPDFENQGQFLQVSAQVSPIVWPWTGWMSVFIAVKKEGENFEGVCKGSITLVLESFKQTTNETHVTEVDFPLTIKVTPKPPRNKRILWDQYHSLRYPPRYIPRDDLKVKLDPLDWRADHIHTNFRDMYTHLRNVGYYIDVLREPFTCFNASDYGALLIVDPERGFGDEEINALQENVYKRGLNVVVFGDWYNTTVMKKIKFFDENTRQWWTPDTGGANIPALNDLLKPFGIAFGDFVGEGHFKLGDHSMYYASGATIVKFPMNPGDIIVGTKLNDQGLSIINSKTPSKVAKLDVPIFGMFQTKANSIQSNEEIVVNAESNLAEAIPTDYSTFKNRVLLLRTKQRSISFAKSNNHETKNEGRIAVYGDSNCLDSTHLEKACYWLLITFLDFAINSHKSSLLQNLNRITEFHKLERAPLPLRISQSIIKSRSQDNNCEQFKWLAPTKQNNAEERKSSIIDVTILENEGIYIHLVQLQSLIFVCFRTRDKFNQKFIG

SEQ ID NO: 15934 - DNA, 3128 bp, DROSOPHILA
cttatgacccactacataataaaattgttttgttttttaatagaataatggtttataaaaagtttagactcacacggaaatgataaactctttgcaaatacagctttcattttattacaaattgcactctttcagatctgcagttgctatgccaaccttttattccctttactaaaagggtatactaggcttactgaacagtatgtaactggtaaagtaaagcgtttccgattctataaattatatatctaaacttttgatcagtcgaatccatctgaacacattctgtcacattagattattccagaaactcaacttaaacatgtgtattttttaagaccattatcaaggatattaaaaatggtctcctaaaatttaataaacaaaagtgtcacatcaaatttaagacgtaaattaatattttttttctatggtgaaataattgttattttccaatgttgtgaaataataaatgtatcttttcaacgcacacattttcaaggttttaataataatagtgactcgtgcgtgaataagagagaaattaagattttaaaaaagaataaaattcagagatgtgatctgtaaaaattatttaccaattttcatttacccccgaaagtgatgctaatggttaaaacggcatttgcgacttatctcctacgtaatattgcaaaaataaggatttggttagatgagtgtgaagtaaacaagatgcaaagttttggagatagaaaacatagccttgagtcttggtcatgtttacttggcaccaggccgcgattatcagcgctactagtcgtaatttgagttagacctttaatactctaagtgagagtgatgatatacgatttcccagccacttgctttctacgaaatgcgctaaaaaaaatccctaactacacaaagatttgtgttgttatccaggtgttctgatataaaaggcggcaaggaaattgatggcatcatcagtatcaaagtgagagtgattgcagtcacaatgtttgccacgcccctcagacagccagctgcggctaaccaccagaccccaaagaattccgccggcatggatgagcatggtaagccgtatcagtacgagattaccgatcacggatacggcaaggatgcggtcaaggtgctgcatgtcagccgcaacggacccgtgcacgccatccaggaattcgaggtgggcactcacctgaagttgtacagcaaaaaggattactaccagggcaacaactcggacatcgtggccaccgattcgcagaagaacaccgtctatttgctggcgaaaaagcatggcattgaaagtcccgagaagtttgctctgctcctggccaggcactttattaacaaatactcgcacgtggaggaggcgcacgttcatgtggaggcgtatccctggcagcgagtttgccaggaggagaccaggaccaacgtcaatgggaagtgcgagaacggagtccaagggaactgcgacttcagctccattgacaacagatcactgcacaatcacgcttttatattcacgcccaccgctcttcactactgcgatgtggttataaggagaacaggttaagtcaaacataactaaagcaataatatttaaaactactaaattatcacctcctttactgttttagatcccaaacaaacggtcatcacgggcatcaagggtctccgggtgctgaagacgacccaatcctcgttcgtgaacttcgtgaacgatgagttcagatctctgccagatcagtatgatcgcatctttagcaccgtggtggattgctcctgggagtactccgataccgagaacttggacttcctcagggcctggcaaacggtcaaaaacataatcattcgtaactttgctggcgatccgcaggtgggcgtgtcctcgccctccgttcagcacaccctgtatctgagtgaaagacaggtcctggatgtcctgccgcaggtgtcggtcatttcgatgaccatgccaaacaagcactacttcaacttcgatacgaagcccttccagaagattgcacccggcgacaacaatgaagttttcatcccagtggacaagccacatggcaccatctatgcccaattggcccggaagaacatcaatagtcacctgtagatcgatctctgatgtagtaaatctaaatcaatctaaatcaatttagccaattcataattgcatgcggcgaagttatatatgtattttaaattatttaagcaaacgaatcatatgctgcgttcttcttatttaaacaataataaactaataaaaaataaagtgtaaaaatgaataaatcgattgcaaaaccatatttcgagatcacccttgccttggctgaataaatccaaattatatcagaactattttctaaaatcctaaaatgaggcatcgttcataaaaaaaaatatataaaataaattccacaattttcgaccactttggcagtcaaaattcgcaatctaaattcgaaattagcaaataaccatttagccacaaacagcgtgaccatgaccaatcgactggccttgcaccacatcctgaccacccagctgcgaagggactgggaacaggaggagagcgccaagaccaggctgtcgcagctgtccaggagggacaggatcaaggcctcgctaagatcgagtcagttgccaggacgttacctgttgcccgacaccagaaagacctacgacaatatggtggccaatattcactcgaccatgaagtgtaagctgttgtgctaaaaactaaccagaaactttcaaaaccaatcaatcatttacttagcggtacgagcaccacgaagaccacggccaacggggccgctgcccacatctggaactccgaatccagtaccagtagttgcaccaccactgccatcgaaactggtgtccaagcaaccgcaacgcaagtcggcggggcgcatcaagggtggcggcaactcttcgaaggcggacagtggccatggcattgccatcaaatcattggcgaaggtcaaggcctgcatcaaccagaagcagaagagatcgcgtggctttgagcagcacaatcgcatccgtgaagtcatccaacagaagaaagtgctggagaccatgttgcagcagcacaagaagctgcaaag

SEQ ID NO: 15935 - DNA, 1059 bp, DROSOPHILA
atgtttgccacgcccctcagacagccagctgcggctaaccaccagaccccaaagaattccgccggcatggatgagcatggtaagccgtatcagtacgagattaccgatcacggatacggcaaggatgcggtcaaggtgctgcatgtcagccgcaacggacccgtgcacgccatccaggaattcgaggtgggcactcacctgaagttgtacagcaaaaaggattactaccagggcaacaactcggacatcgtggccaccgattcgcagaagaacaccgtctatttgctggcgaaaaagcatggcattgaaagtcccgagaagtttgctctgctcctggccaggcactttattaacaaatactcgcacgtggaggaggcgcacgttcatgtggaggcgtatccctggcagcgagtttgccaggaggagaccaggaccaacgtcaatgggaagtgcgagaacggagtccaagggaactgcgacttcagctccattgacaacagatcactgcacaatcacgcttttatattcacgcccaccgctcttcactactgcgatgtggttataaggagaacagatcccaaacaaacggtcatcacgggcatcaagggtctccgggtgctgaagacgacccaatcctcgttcgtgaacttcgtgaacgatgagttcagatctctgccagatcagtatgatcgcatctttagcaccgtggtggattgctcctgggagtactccgataccgagaacttggacttcctcagggcctggcaaacggtcaaaaacataatcattcgtaactttgctggcgatccgcaggtgggcgtgtcctcgccctccgttcagcacaccctgtatctgagtgaaagacaggtcctggatgtcctgccgcaggtgtcggtcatttcgatgaccatgccaaacaagcactacttcaacttcgatacgaagcccttccagaagattgcacccggcgacaacaatgaagttttcatcccagtggacaagccacatggcaccatctatgcccaattggcccggaagaacatcaatagtcacctgtag

SEQ ID NO: 15936 - protein, 352 aa, DROSOPHILA
MFATPLRQPAAANHQTPKNSAGMDEHGKPYQYEITDHGYGKDAVKVLHVSRNGPVHAIQEFEVGTHLKLYSKKDYYQGNNSDIVATDSQKNTVYLLAKKHGIESPEKFALLLARHFINKYSHVEEAHVHVEAYPWQRVCQEETRTNVNGKCENGVQGNCDFSSIDNRSLHNHAFIFTPTALHYCDVVIRRTDPKQTVITGIKGLRVLKTTQSSFVNFVNDEFRSLPDQYDRIFSTVVDCSWEYSDTENLDFLRAWQTVKNIIIRNFAGDPQVGVSSPSVQHTLYLSERQVLDVLPQVSVISMTMPNKHYFNFDTKPFQKIAPGDNNEVFIPVDKPHGTIYAQLARKNINSHL

SEQ ID NO: 15937 - DNA, 2754 bp, DROSOPHILA
ctacgcaccaaggctcggaaacagtagatccggccttgacaaaatcacggtaactcgcagtcgagataaaaattctattttaatttattttgttttcagtctaatgggaaaccgactcgagaaccgtatgaatttcgcaaagtaccctatagagaagtcctacctacttcaccaaatggcagagattcatcttaaatcacacaggtttgacgaatgctgttttagtgcccgaaagtctattgaaggtttggtccattagtgctatactattaaacggttatggaaatacctatatatctatctttttagaggcaaaaaaatgcaatagctacatttggcagtttctgtgctacctactgataataaaggcgaatgctgcactccacaaagtcgagcgaaccagtgaagctctagatctggcactaaaaatttccaaggaattgaaagaaaagcatattcataacttcttgactgcctgtatacactgtaatgaggaggaattcatcgtgaagaagcagagcatttttgcgaatagccggcgcgaaagcgaaaaatcggtgtatagttccctgtccgtgcgccatagcaattagagctttgtattatttgtataaccaaaaatattgattaataaattctcagtgcaattataatagtgtagtgacctattagatacctatactcaagtacccctgcgtatttggaatttgcattcttattatcaacttgcaagctccttcatggctagatcgactcggctactgatcctcttttaaaaataatgcttgtgtaacgtatatattacacaaacatcgggcttacttttcactagtctaagcaaattcttgtcttaatttataaaaatataaaatattttgcaacactttaaaatattttatgggagtacagataataagtgctcttctttttgcagtgtttttattttagtgtaacatacaacagttcttcgcttaaatcgatggttttgatactacaaatattacactgatgctttctctaccagcttggccatcatcttctcctccttggcctttcgcttggcctccttctgcttcttcttgtcctccttctctttttgctctagcatttccttaaagcgttcgtcgcgtgtatccaccttgaacccgaagtgtcggcgcacctcctctaccaggcgttccttgcgttgtatggctgccgctgcatccgcctcccgcttagcgatcttcgcgtgcaggtccgccttccactgtgtcaacttctccatcttcttcgcaatgtcctcttcacgggcatttatccttgccagctcctctgccttctgcgcgcggttcttctccagcattttcaggagtgtttctagttgcataacctgcctgctgtctttctctccgtgggaatcgaagcaaatcttgggattcacattgctctgggccccataccggccgaatgcctgtctctggtacttctcggtcaaatgaatccaggagtgaggttcctggtatggcaatttgttaaggagcacatttttgtgttgtggttgcaggccggatctgtccaccgtctggggatatgttggttccacatccacgtcgccgaccaaggaagccggcagttccgctttcgcagcgctcgagtactgggcgcacgagcggagggcaggaagtctggtgacaacgcttatcttgcctacattcattttgaattgtattgtctaagcaaaatagtttattaatttccaatagagatgagagaaaatcgatagcgatgacaccaatgctggcaactaaacccttttggagctaaattcagatattttttaggccccgtcagaaagataagtaatagatattaattgttgtgacagtctggctgcatcccagctcaagctctatatatttcttttttccttgctatttatttctatcaatttgtaattatcgtttccacgatttgttactgacattttacttgtcagtttttattccgaaaatagatttctgaggcttaaaattatcatttttatgttgtcagctcaaaatataaaagaaacataaattgattatacatacgggcggcgcacaagtgtacccttaatataccaatcgttatcgacaacaatggtacgtgcacatatgccctaatgcaaaactaaattcttgaaagcgcggaattgcatttaaaacaactcgttttacttaagttgaaataagcatttgctcggataaaagcctacgccacgacatggcgggggatcgtgccttaagttccaagcaattggcggggcgcatacattccgtgtactgcaaagatttcgtgtaggtttatttccatcaaaggcgcaaattgacaatttcgcggctcatttgattatttccaacaacagatcctacagcgagatcacattccatccgaagcactacctgaacgttctgaccggtcccaatggcagtggcaagtccaccatcgtgtcggccataattttgggcctcggaggggaaccgattctccttgatcgctccgccagcgttgccgactacatacagagcaacaaaacctcggccaccataattgtccgggtgtatggacgcacgcccaacaccacggaaacctttcggcgcataataaactctaatggcttgtctaccttctctgtgaacgacaaagacacctccaagaagaactttttggctgctgtatcctcctttaacatacaagtcagcaatttgtgtcagttcctcccgcaggatcggg

SEQ ID NO: 15938 - DNA, 754 bp, DROSOPHILA
ctctcatctctattggaaattaataaactattttgcttagacaatacaattcaaaatgaatgtaggcaagataagcgttgtcaccagacttcctgccctccgctcgtgcgcccagtactcgagcgctgcgaaagcggaactgccggcttccttggtcggcgacgtggatgtggaaccaacatatccccagacggtggacagatccggcctgcaaccacaacacaaaaatgtgctccttaacaaattgccataccaggaacctcactcctggattcatttgaccgagaagtaccagagacaggcattcggccggtatggggcccagagcaatgtgaatcccaagatttgcttcgattcccacggagagaaagacagcaggcaggttatgcaactagaaacactcctgaaaatgctggagaagaaccgcgcgcagaaggcagaggagctggcaaggataaatgcccgtgaagaggacattgcgaagaagatggagaagttgacacagtggaaggcggacctgcacgcgaagatcgctaagcgggaggcggatgcagcggcagccatacaacgcaaggaacgcctggtagaggaggtgcgccgacacttcgggttcaaggtggatacacgcgacgaacgctttaaggaaatgctagagcaaaaagagaaggaggacaagaagaagcagaaggaggccaagcgaaaggccaaggaggagaagatgatggccaagctggtagagaaagcatcagtgtaa

SEQ ID NO: 15939 - protein, 232 aa, DROSOPHILA
MNVGKISVVTRLPALRSCAQYSSAAKAELPASLVGDVDVEPTYPQTVDRSGLQPQHKNVLLNKLPYQEPHSWIHLTEKYQRQAFGRYGAQSNVNPKICFDSHGEKDSRQVMQLETLLKMLEKNRAQKAEELARINAREEDIAKKMEKLTQWKADLHAKIAKREADAAAAIQRKERLVEEVRRHFGFKVDTRDERFKEMLEQKEKEDKKKQKEAKRKAKEEKMMAKLVEKASV

SEQ ID NO: 15940 - DNA, 4148 bp, DROSOPHILA
taatttctacacatgtagattggtttatacaaagaataaaatggacagacgcacatttatacacaatgtaaaaaaaaaattaattagagttacaacaataaatgtaggtaggtttgtgtttcgaatgcataaatgcgaaaatagaggaaaatcatgatgcgaaatcatatacatacatgggtatgtatttctgtttgagtgttttgtgagttttataaataagcatatataaataagtacaaagtttgttcacttcagcacgttgaagtttcccctttatgtggctcaataaatatttgttctttaacatgaataaaaaataaagttctgtcaacagtagtggaaaacgtagcgagttcccatttacaacagtatataacattcatatatatatatatatatatatatatgcatatgtatttatgtataaatagattcataataggtatatgtagttagatatatatcaacaattgcccaggtagcaaggtttaagagtaaacgtaataataactacagatataaatataaattttaatggtaatagttctctgttcctatcaattcatttcattacttcaatctatactcataatcctcatcacacatatcgtatcgtcctgtttataacaacaacaactagggttacaaatggcacatacatttcagatcaaaaagcttatacattatgtagtagtatcattgttttatgctcgaaaaacaagtaaaaagtatcttttcagtggcgtgaaattacatttcgacgctcgtaacaacaaaattcattccttctctggcttttgtggacaacaaaaatactcagtattattgctttaaggcggtgcccggaattataaagaagaaatccaggcatcatcaaatgtggaccacaagtatttcggatcattgttaaccattgtcgaagcaccagctccagaaaaaaagtagcaacaaaccagtttgcaaatagtacgctccatggcctcgtccgtgtcccacttcactccttcttgttgaggaagtggaggacatagtggagcaccagatcgtagcagtacttgtactccgtcatattctcgactagctgaggacgatgccggcgcacagtcttcaccgcttggaagacatcgacctcgccgtgctggatgacctgctcgatgcacgcattcgcggcacagtaaacaccggcacgactgcgaccatcgggcgagacaacgcacacaggcccgtagtcgaccttgttccgccagatctcgaccatgttcatcaggtagaccagcgagttcgtcgagctgggcaccttgtgacccatgggccagcaggtcagctggaacagttggacggttcgtgtcggggccttcaccccggccatcatttcggtcagcgagacgatcttcttgttgatcttgaactcccattgcttgatgttcgtatagctcttggacatcacatagtgcacggagaacaccggtccgtacttctccatcttcgatttgttgggccagaacgagggatactgctgcgattgcgagggcggctggcacaagactacaacggccgagcactcctggtcgtagaccagggaccagaactcacccagcgtatgcttcatgggccattcagtgactatgtactccctgggcttggtatacccgtccacgaacaccgagtttatgtagtccgtaaaggcattgccctggaaggaggtcaggtagggccggaagttatcgggtggtacgcacaggacatccctgttcttctcgcgattatccgcccggtgaccgccggcgcaatcgcctatggtgaatcgtggggtttgcttgcagatctgatcgtactccgcctgatattcgttcattttagtgcccgaattcctcctggccttggcctttaagcgatcggaaagttccgagaccgggaaccaggtcttgccgcaaataatgtgctcctccagggtgtcgtatataaacttatattgctccacattctccaccagacccttccgcgattgccttaacttcttgaggtagccgaagacattgaagcactcctcctcctccgccagctccaggttggcatcgatggacatatagactcccgatctgccgccgccatcgctgcagtggaccaagatgggacccctcatgtcgtcctcgtccttgatgatgttgcccacgacaaggcgaactctcctccggaactccaacagggcattggaaaagggacacgagtgggagtaccattcggtgtagtggaactgaaggatcaacctctcgtcggtcacctcctgcttttcgttcatcttgtagagcctgaaggttcgtatatggaaattggccagttgctcctccctgacgatattgatgaagatatcgccgtactgctcgtgaacctccatgttgggtggccagtactggtggcacattaccttggcgaagtcaaaggtcttcgtcagcataacaatggcactgatgttttcctgccaaaccattcgccagtaggcctggaccgtctcctcgacaggtccctgtgtcactatgtacgcgttcggcttgagcaggctgtccacataggaagcgttcacatagtccgagtcctgcaggccacccaccttctccagcaccacccgattgtagtcatagggaatgcacttgggattctggttcttctccaggttgttcttcttcaaggcatgccgacaggtgttactctccaccttggccgcagtttggaattccagtttgtagaggaccgggaactttctgcgcagatcgcagagcttgagaaaatgcctgatatcgatgggtccgttgggtatcgtcttggacagagaattgttctcatctcgtgcctcgagctttatcctttcaaacgacagcagtccgctgttgagcatactcagtttgatggtgttcggtatggagacgatggctcggcttttcctctgctgcttttccacatcgtcgtagcgggcagatgacctcgacctgtgctttccagtcttaccaccccccgccccactactcccaccacccgtggccgccgtcatatctgctcctgctcctgctgctgctgatgctgctgctggtgatttttcttcgttttccgctgcttctggctttcccacaagctgctgcgttgtcatcatcaaaatcacgatgccagaaagtgtcgtcgtcgtcgttgtcgatgttggtttttcgttatttttgttcgattcgtgtagaggaggaagtagtcgattagttcccttgcctctgcattttcagcgatttttcttttgggttagtacatattgcattccaaaaaaaacatgggcgggttagtactcgaatttgttagctaatttgttcacctttttgtggctttatgtgcgttgcgttgcgcgttttggttcgttataaaaagaatttcgtgtatattctgtgtatattcgtattttcttgcttttccgtcctccctctcgttccctcgattttccattcacttcacagaaataacgcgacgagtcgattttcagcagctgcctcctcgttgttggggcgaaaatcgttcggcgactgaatccgctgcgccccaaagagctgattcgcatcgaaactatccgtttcctaccgcaaatgccgagggaaactcgtggccagagcgagaaaaagccagccagagagccgccgagcgggaaaatgctcaccagagagcgcgttttcaccatggcccatgtgactggcgccacttgatgggcgcaacagcggtggggcgggtatttttagatggcgcgggtggacagcgctaagtggccaccgtgggttaatcgatatcgaaagtattataattttctattttccgacatttttaagaagcaaaaggtgaagtttagagtgcaatttcttatgagttagagttatgtttgatcctcatttctgatttttttcaaatgattttaaacagtaaaataagtgttttttctatatatattctatatcctcaccttgctacatagattctttaacatgggatttactcatatttttaaaaattcataatttccagctattttctatcctcttatagataattggaaaaacattttggttataaattttctgacactgtgccattcaccttatagtatgaatgaaaatttcgat

SEQ ID NO: 15941 - DNA, 2148 bp, DROSOPHILA
atgatgacaacgcagcagcttgtgggaaagccagaagcagcggaaaacgaagaaaaatcaccagcagcagcatcagcagcagcaggagcaggagcagatatgacggcggccacgggtggtgggagtagtggggcggggggtggtaagactggaaagcacaggtcgaggtcatctgcccgctacgacgatgtggaaaagcagcagaggaaaagccgagccatcgtctccataccgaacaccatcaaactgagtatgctcaacagcggactgctgtcgtttgaaaggataaagctcgaggcacgagatgagaacaattctctgtccaagacgatacccaacggacccatcgatatcaggcattttctcaagctctgcgatctgcgcagaaagttcccggtcctctacaaactggaattccaaactgcggccaaggtggagagtaacacctgtcggcatgccttgaagaagaacaacctggagaagaaccagaatcccaagtgcattccctatgactacaatcgggtggtgctggagaaggtgggtggcctgcaggactcggactatgtgaacgcttcctatgtggacagcctgctcaagccgaacgcgtacatagtgacacagggacctgtcgaggagacggtccaggcctactggcgaatggtttggcaggaaaacatcagtgccattgttatgctgacgaagacctttgacttcgccaaggtaatgtgccaccagtactggccacccaacatggaggttcacgagcagtacggcgatatcttcatcaatatcgtcagggaggagcaactggccaatttccatatacgaaccttcaggctctacaagatgaacgaaaagcaggaggtgaccgacgagaggttgatccttcagttccactacaccgaatggtactcccactcgtgtcccttttccaatgccctgttggagttccggaggagagttcgccttgtcgtgggcaacatcatcaaggacgaggacgacatgaggggtcccatcttggtccactgcagcgatggcggcggcagatcgggagtctatatgtccatcgatgccaacctggagctggcggaggaggaggagtgcttcaatgtcttcggctacctcaagaagttaaggcaatcgcggaagggtctggtggagaatgtggagcaatataagtttatatacgacaccctggaggagcacattatttgcggcaagacctggttcccggtctcggaactttccgatcgcttaaaggccaaggccaggaggaattcgggcactaaaatgaacgaatatcaggcggagtacgatcagatctgcaagcaaaccccacgattcaccataggcgattgcgccggcggtcaccgggcggataatcgcgagaagaacagggatgtcctgtgcgtaccacccgataacttccggccctacctgacctccttccagggcaatgcctttacggactacataaactcggtgttcgtggacgggtataccaagcccagggagtacatagtcactgaatggcccatgaagcatacgctgggtgagttctggtccctggtctacgaccaggagtgctcggccgttgtagtcttgtgccagccgccctcgcaatcgcagcagtatccctcgttctggcccaacaaatcgaagatggagaagtacggaccggtgttctccgtgcactatgtgatgtccaagagctatacgaacatcaagcaatgggagttcaagatcaacaagaagatcgtctcgctgaccgaaatgatggccggggtgaaggccccgacacgaaccgtccaactgttccagctgacctgctggcccatgggtcacaaggtgcccagctcgacgaactcgctggtctacctgatgaacatggtcgagatctggcggaacaaggtcgactacgggcctgtgtgcgttgtctcgcccgatggtcgcagtcgtgccggtgtttactgtgccgcgaatgcgtgcatcgagcaggtcatccagcacggcgaggtcgatgtcttccaagcggtgaagactgtgcgccggcatcgtcctcagctagtcgagaatatgacggagtacaagtactgctacgatctggtgctccactatgtcctccacttcctcaacaagaaggagtga

SEQ ID NO: 15942 - protein, 715 aa, DROSOPHILA
MMTTQQLVGKPEAAENEEKSPAAASAAAGAGADMTAATGGGSSGAGGGKTGKHRSRSSARYDDVEKQQRKSRAIVSIPNTIKLSMLNSGLLSFERIKLEARDENNSLSKTIPNGPIDIRHFLKLCDLRRKFPVLYKLEFQTAAKVESNTCRHALKKNNLEKNQNPKCIPYDYNRVVLEKVGGLQDSDYVNASYVDSLLKPNAYIVTQGPVEETVQAYWRMVWQENISAIVMLTKTFDFAKVMCHQYWPPNMEVHEQYGDIFINIVREEQLANFHIRTFRLYKMNEKQEVTDERLILQFHYTEWYSHSCPFSNALLEFRRRVRLVVGNIIKDEDDMRGPILVHCSDGGGRSGVYMSIDANLELAEEEECFNVFGYLKKLRQSRKGLVENVEQYKFIYDTLEEHIICGKTWFPVSELSDRLKAKARRNSGTKMNEYQAEYDQICKQTPRFTIGDCAGGHRADNREKNRDVLCVPPDNFRPYLTSFQGNAFTDYINSVFVDGYTKPREYIVTEWPMKHTLGEFWSLVYDQECSAVVVLCQPPSQSQQYPSFWPNKSKMEKYGPVFSVHYVMSKSYTNIKQWEFKINKKIVSLTEMMAGVKAPTRTVQLFQLTCWPMGHKVPSSTNSLVYLMNMVEIWRNKVDYGPVCVVSPDGRSRAGVYCAANACIEQVIQHGEVDVFQAVKTVRRHRPQLVENMTEYKYCYDLVLHYVLHFLNKKE

SEQ ID NO: 15943 - DNA, 16687 bp, DROSOPHILA
ccaaaactctgccttcgacacgatttcttttctatttcaacagcgagctgacatttttttgcatgttgttgtggctgcgaattaaaaattgcatacaaaaaatggcagcaaaaaactagtcgatctttactcgactttggaataccaactaatcggttttcactatatttgcttgatcaaaataaagcaagttagttatttatatatatttataatatatagatcatttccaatgcaaatgtgagaaaaacgattataatattggtaatttttaatgtagtgattgctttgatccttttgaattattttaataagaatcgcaaaacttgctttcaagttaattaattcaaaacttcaaatcgctagcagtaaacttacttcaataattaaagaaattcgatattgttttaacatacccctgtcctttagaaacacagggtgcaaatagcgaaatgaaattcctggcacagaacgtaatattattagcggggaagccttgtcgaccgcctccacttgactgcgagcaactcggggccataaatattgcattacaatcgctttacccccttttttttgggttggcgagttgtcgtgcagtcggtggttccacctccacgtggtgggtggtgacccctccaaccccatcccgtcgggatatgcaattgcgaattggatttcatgttaatgcagggtccttatcgccggtcatgtgcttggacggtcagcaatgggttcatttgtgttctatttggccggtaatttcacttaattgcgatgacgttgtgtgcaaaaagccatggcaagtgggggcgttttggggcgggggatggagacccagtggattgctgatttatatcgccatcgagcgaggtagcacggtccatcaaatattcagcggtccgtggcttattgaaaagcacaaatggcaatttcagcaagtgcgaatgcccagggagccgccagtttgccttccagaaaagcacttaatcggtgtttttttgtgtgtgtacatttaggttttattcttgtatttgaatgcaatcgtggtttacaatatatagagttttcatttcaacgttgccttgcacattcaatatataatatacgtaataaaaagtaattataaacaacagttgtaataaaaataataaacatgtagatgcattttctcgtagacggttgcggtaacggataattgggaatttatctttttatgtttcttagtgttatgtcatgtgggtcatcagctcgagctcaaatatacactcgtgtgtatatatatatatatttgtttaaattatatttagatataggttgtataaaaggtgtactgcaagtgctgcgtatgcgtgggctggtgttcatgtgtgtgagtgtgtgtgcgggtttacttagaaaatcatccgaatggtttaaaaataattataaaatctactgcgtttgctgctgaatttcaatcttctcgactgtcatgtccggattcatggccgtcgcttcctgtaatcgcgtaaaaaacaattggtatcagttaatgtatctactaacgttgaagttaatccattagatactcacttgtattgcctcggccaaggctttgtcatgatcgatcggatctccatcggactgaatggttatcttctgttccactcgggtctccacaatgccatcgcgttcggttttgtactgttcatttagagtagagtattaattaatgttattttataaatgtggtacaacctgaacccattcgaacaaggactatgcatggaatatacagtgtggtgcatacgttcacaggaaatatcttttggatagatagatagaaagcctacctctggctacttacgcaacctaatcgaacgggatcagttggattagttccggttacttacggtaatggtttccacagtgcgggttttgctgctcacggtttgggtggagatgatttcgccatgtccggagaatccgggtgtgtcctcaccgagaaccactcgggtgctttccacatggggtccagtggtggcggaggtcgtaaacagcggagatttctgtgcaagattcgagattattaagctttgaatgtaactttttttttttggaagcgcaactaattttagagggcctaattatcgattgcttattggaaagtagccatgcatgacccacctggttatctgtgcgcaccacactggcaccatcgtagggtccgtcgatgggcgtgcccgaatcgccggaactggtcgaggaaacgctatccctcctctgatactacacaacacataatataacataacatatcgaaatcataatgacaacaatcaactcatgcaattgggatgcagccatgcgatcttacctgatccccactggtgaccgtcgccgtcgtcttcacctcctgggtaacgacgcgctgctgctgcttgttgggatcgtgggtgcgggtggtggccaccgtcttctcctccagctgctccgtcttggcgttcttgcccagatcctcgtgcgtggtggcggtgcgggtggtgactgcggtggccgtgacataggcgccactcaggtcggtgggtgtagcatcagcctaggtggattgagtggcaagtgggtggttcagtgggttagtgcgtacggcataaaaatacaacagcaataatacaacaatttaagcaacaacatcaaatacaggcggaagttaggcaaaggcagagattaagattaatataactttggaaagcgaagcgcaaagagacagaaagatagacgtttccggttttcagagccctaggttttgatccaattcgattgcgatttaattaagattttctaaatattatattgtttgcgatgattggaaaaacctcaattgaataccaatatcttttatgccccattaattaaaatcgaattcgatcaaagcccttaagaagtgaattccagtttatccataagggacgcagtccctcgctaaccttgtgttcctgcgtagagtaggtgacctcgccggtgcccagattgcgcacctcctcttccacattgtgggtcacgccatcgatgttcttggtcagcacctgtttggtggtggtcttcaccaccgtgggcgtgctcactggcttgcccagcttgccacccgcctgtcccgccggactgccgatcaagatctcattgacctggtcggcgccatactgtgcggtcatgtcgtcatcggagctgccctcggaatcccgccgcagagcacccttgcttatgtgcttgactccgtcgaagaactgctggcgggtgatgggtaccgtttccgtggtggtttgcacctgcgcctgtttgccgaagtgggagggatcgatctgggcatagttcaggatcagttttccggtcacgggatccgtgacagccgtggcgggatcaatatctcccgtgttcggatcaatgtcgccatactcgctcttaatcctgccggtcacgggatcaatctctcctgtcagcgtcatcgtgtgggtgaccgtggtgcgggcgccagcgaaacgcgggtcattggggtccacctgaacaatttcaccggtcacaggatcaatcatattgtaaacataaacggtcttattgaagaacttaagaacgcggccggagacgggatcgatttcgcatgtggagggatcgatctcctccggtcgaccacgttcgtcggtcttcgagataagcaggatgcgcacgatcacgatcttgcccgtcttgggatcgacgcgggccagcttggtgtagacctcgccggattcgggatccacctgggtggccgcatacaacggctccccggtggcctgatccacctccccggtggcagtgtatatctttccggacgtgggttcgattttgattgtgttggggtcgagcttggtctgtttcttgatctcgttggtcttggggtccaggtagccatagatggtgatgacgtatcccgtcttggggtccacgctgctggagatgtactgctgctccttggtggcaggatcggtggctccagtgggcacccaaatctggttggacttgggatccaccacgatgtccttgtccttggaggcacttacttcagtgatgggcgccttagtggccggatccacgcgctgttgcacgatcctcaaagagataatcctggcataatccttgtcgggcttgttgttcttcggattgacctggttcttcagcacaatctgtccggtggttggttcaatcttaatgtccctagtaaccgtcttacctgatttcgggtcattgaacgtgatcgtatgcttaaccagatcaatctgtccatatttggtatcaatcttgccggccttcggatcgaactgacctccagaggtctccacctgcgccgtcttgggatcgatgatgttcctcttggaatcgaacttgcctgccaaggaagtgacctccacaattgggtcaatctgttggcccacctcaatgaggcgaccttggttcggatcgatcttgttcgttttgggatccacaatgcccaggatagtgatctggccagtacccggatccactttcacgttcttgctgactacaatcttgccagacttgggatcaatggccttaagttcgccggtgcgtgtgttaatctctccatacttggtatccagcaggccggtatccaagttcaggacgcccaaggaacgctcaacatctccgttaactgtgtcaatctttccggttgcaggatcaatgcgactggtgatcactgttagctccaccacaggattatcctggggtgtgatgcaaacgatctgaccaagggtgtcgtcaaggcgtccggtctttggatccgccacaccggataccaaatgaagattgccggtcttgccatcaacatcgccctggaacacttccttctttccggtcttggtattcagagcctccaatgttcccttcttgggatcaatcacgccatatttggtgtcaatgagtccggtggcggggtctagaatgccggtggagtgctcaatacttccgttctccgcatcaatgcgtttggtggaaggatcgaatttggaggtgatgaccatgatcttgactcgcctctttttcggcttggccgctgctgctgcagctcctgcggctccagctgctgccgcagcagcagctcctggagctccctttcctgtcttggtgggagaaccaggcttcttagagccagcagcacctgcaagaccagcagcaacatcagctttggagggaccaacgtaaccgggctctttgttgtagcgctgtgattccaggaaatcagccgtgggatctgagatgggcttgtagcttcctggagctccagaggagtagccttggggtcccttggtgggcgagtaggatcgcttctgggaatcgctcagaggaacagcagccgcatccacagcgctgccctggagcttagcacgagtggtgggcgagaggagtggatcctggagtagcttagcccgcgacttgggcgacaattgaccgcggttcagcttatcttgggtgcgtggagacagctgtcctgccttcagcttctcagccgtttccttcaaggcgttctcgttaccaggagcatagttaaaggccaaaccaatctttttttgctgcgaggtaggagacagctgctcctggccatcggcaccggatttcctagagttaggatcctgatcgtaacggaagccaccaggggtgtatgatttccttgtgggactggtattgccatcattatccacggcatactcatactgcctagtgacaccgggagtggtggatcctcggttcttagccgcattcctagccgcctcgtccaggttttgatcctgctgattatcgcccagaccagacgtaacgaccagaccaagtcgacccacctccttgtccttatcctttccggacttatccttgccatccttggatggggaaccgctcttgctcttgcgacccgaggagaatatgccaacgccctgtggatcgtcgttggatcgtttttttttcgaggatcaaatgaaaaggtcaaacataaaacgaaaagaaatgggaggtaaaaattaacaaaaggaaaccataataattattacacaaccaatgagttcaacttaagatcaattttcgggtttcactacaaactatcataacttacgggtgaaacttaagtgatttggtatgtggatttgggtgggttttgggtcgggggggttaagagtatttacacgagggcgggcgcattcggtgcggggatatcgcttagctcagtacacctagtcttgtgtgttcctatgatctagcttaagttggggatagtcagataggatacttacacgtctgcctgaggacttgtcagacttgttggaatcattcagctcgtcattgcctagataatattttcagggaggttagtaagattgcttctttagatactttatcctggggatacttaccattaacagccgctcctgcagcggcaccagcggcaagtgctgccttggcagccttttcggccttcttcttctcctccaactcccgcttctcccgctcctttcgctccttctcctccttctccttttgtttcttctcacgcaacttagcctccttatcagcatcctgagaaaacatcgatcattagttagttatagtttttagcgtataattcagaggaaacagatatttggggcgaaaaggcgacatgctacaaaatggctgagatgtacaatatatatttacaatacaagcaacaaaattataatatttcgttaattaggcattacagatgaaacttttttaatacaactgcatgttttgtgtggactgtactggtgtggccctaaatggtatttacagctcgagaaaggactcttacagacgtcacaaaataatcaaatcaaagttaaataaaacacgtaaaaaaagtcagatagttatgatgtaatgcacatttaacagacaattgacggcactgatttctttttttttacaaaaattaccatcagatcaaggtacagctcgttcgggttctatcacattggttagaggatagtcggttatgaaaacaaaaaatataaattaataggttcagaacattcataaattactggggtaaagtagccctaagctgaacaaataaacgaataactgagggagacttcaaatcaaatcgtttcatacgtaagctcacaacattcgaaaagcagagttcaaagccgataaaaaagttaggaaggatacattgtagaagattcgattcggaggatactttttttttggtttttttttttttcgatttttttttgagttgtaggtagtaaagtgttaacctgaacggggggctcagcctcgatggcctcaatctctaggttggtctcgtagtcaccctcgagggaactttgcgaggaggccgaagccgtgccggtgctcgactgtcgcatcaactggttagtgtaatggggggttaaggtgtgtttttttttttttttaggggacgaagggttaacattacgagcacatcatttcatattcagaatcacagagtggatgtgtgtgtggttgtttggtttgtgagtggttgtgagttagtaacaaaccgagaagaaagtacaaaaaactctggttaactccgaaatcatcgttaaacatgttcatctcaatagctatgtttcgtcaggcattagttggttaaaaactggatgggttaccttctccttcttgttcttgatgggactgcggctgtgggcatcgccatcggcattgcgatctccccgatgatccagggtgctgctcttcctagccaccttttccttttcggccaaggccagagctgaaaggatcaggtaattagaaacaattcaaaccacatagattcaaaactatcaggttatatataagcaagctctactcaagactaggtgtaattaccatccatgctcctggaagtgagacgagctccggacagagtcctattgaacttcggaggagtacgatccacgggtgtgttcgtgctctcggcctgagtgcgacccttgtagcgataggtggacccgaagactgggaacatcttggacttgctgaccggttcgggggtcatcaggcggaagaaggtgtggtgctccacgcaggatttccacagtttcttggcggcacgatggttggccagcttaaagccaatggtggattcgtactgctcgaattcacccggtcggatcttgatgtagaaatggtggcgcttgtaggagatcttcagaatcttgggccaggcaaagcggttgatgcgcaatctagttggatagtggtttaaatatattagcaattgtttaatttaaatatagtaagagctgctcacttatcgcggtagacgagcaaaccggaggcacaaacgcccagcatgatgtccacgccctcagaatccttagcgggatgcaagtccacgccgtacatggccagcttcttggcattctccaggtagtgtagctcagcctcggcgggcgattgtcccctagaatacaaaatattaaagtgagtataaatccttgatataatagtccaaaacttacttgtgggtcttgtgaagatccatgaccttatcctccaactcagccgtctgatttggagcgatcttgaagtccttcaggtaggccctggtgggcatttcctctgcatcgtagtcgcccatctccgactgcaccaagtaggatccgagcagagcgtgggtgacgaatgtgcagggcagtcgaccctccaggatgtcattgcgcacctgcaggcacaaatggtagcgcgtgatgtcctccttcagctgcgatggctccggcggatagaacttgacggcgaaggtgagaggccaagtgtccgtgcggaagaacttggataccggcttctccagatccagccaagtgcgcggatctgtgggcgtctcataggtcagaccaaagtagtccttttcgatgaggttcagaccggcgcagattgagttgatcacatcacggccaatggctttgcgctgtggaaatcaaattgaacaattcatcattgtaaatgtttttaatcataaccttaaagggtttgacttgtttaacacatcatcatccctgcttactcacatcaatggacacgtccagaagggagccatccagcagggtgactcgtgctagggcaggctttccgtgcgaggatgagctggacttgggtttgctcttggtcggcgtttccggctcagcgggcgcggatggtttaatttccgccggcatcttggattgggggacttggctacgccagcgacagcttggagttggctgcaagaatgtaaagactttagtaaattgcactggatcccagttaaatggccggaagtgtccactccgcggggtcatgtgtcccagtgtgtgtgtgtgtgtgtgtgtgggcgcctttcgctcattagaagtctgcagtctggacataaaacacgacataaactttctcaatttgcctggcgccactgcgcaaataaactcagcacacacacatttaagcacaggaccctcagccaggatgtgtacaactcctccttctccactcgctgatgactatgatgtcaccagttgcaattgcgtactcacttccaaagagctctagaatttctccggcaatgatttccagcgagctgtaagagaaatttcgccattaaaagctgaactgcaaattgaattaccattttactagcgaaagcagatagtaaaaaaaactttcaggtctgagaccattacaatgagttgaccataaaccgcacaacagtcagatttcgcagatctattattaagcagagtgaatacagataatgccccagtaattaaagtcattaaatatacaaaagtacatgggaataaaagttgggaacgtcctttgagtaagccgaaaagtcaagtgatcggcgacagctcacgttccagatctggattcaagttcagcagtgacataagtcttccatatatacatatatataaatatgtatatgtatgctccatatcggtgtgggttatataagccggcaagtcgaggcagcgtcatgttctcgcttttatccccttccgtttccatttgattccgtttgcggtcggaatttagcgggactgcaaattgcgcaaaataatgttgttttcttctgaaaagagacgatatcggcattttgccacggatgtggacacactgccccacccagaaaagagccttcaatcaacgctgattgggaatgtacttgggtgtagccatagttatgggtatggttaacgtgcgaggatcgagagtcaattgagcccagatgcgctgaccgattgcacagtgagttcaatttacaatcggagtgtttaattggctgggagtcatgagccaagagatgtgtccatcgatcccgcagaggaaactagctgaaccagtttgccacagacttcgtgatagaggtcttctatggcgctataatactgtttcagtttcggacacgacccccaaagcgaattaactctggtggcgtcatcgtgcgttcaaaattaaacaaaaacacacacatgaaatatgtatgctgagaaccagaacccgaaaaccaaaaaaaaaaaaagcagacaaacatctaatttatattattttatttattctcgcgtctttgtagcgcgcagaccatgtgtatatggactccatatagcattacttttggcagcgtgcttgttctcatagttgaaggttgcgcatacgcaatgttgacatcatcgacgggcggttgcaaccacctcgttattttcacttggccaaatgcagggccccatgagtagtgggaatgggtatgggaatacttgactaagatcggcggtgaatcagcggcattatcttgccgtgccgacttacaaattcgtttggctggcaaaccaaaacaaagtaaatcgctcgaattgtcgatagcgcatagcgattttacaatgcgggggcattcgtacatgatttattttcgatgacatcatcagctaagcgatcagcaccagctaaggcataatatcaagagctatttctagagtttatacaaatatatttgcagaagatgccgacacccaaaaacattttcagcacttggcgcattcgcctcaattgaaggaggtcgaggtgaaattcatcaagtggcgcgcgtctaatctttaggttacaatattgctggccaggcgagaataaatacgtccaaattgagcagagaagaagcagcctaaccaagtgagtagaatatatacatatatatgtatatatatatctggtattattgtgaaagtaacgaagttcttgtggcggacagaaggcagaagcacaaaagatggcaatcgcgtcgtttcaattgagattcggaatgagaacatgggcactcgtactttgggtgcagccggctcccctttaattaagtttcatttaatacaacttaaatcaaattcaattggcgacgggtctgcgccaggtttttcatatccgcggggatggctcatacatgtgtcatcgagttattactctgacatcaacatgggtcacctggtgggcggtggcgtcacttccccgggaacggcgtgccccccacacattgaatttctcccttgtatgtacataatacatatatagtacattccctctagtcattgtgactaaactttcgcttttatgcccattaacattaaaatttcccccggggctgtgaagtgcacaaaacttttcaaacttgccattttctgagctcaacgaagcgttgccaataaatcgcatttaaaatgtattatatactgacttcacatccgtttataaacatggccgcatttccgcaagggaagctgttacattttccgttgtggtgcataaattgaaatatgtacattaatttgacagacatctgagtgtcattttagctaattagagttatattattatatcaatttaagcttttaagaatactttcattctctttatcactttacccctttgaaccaatcattcactcgaatgaacaatggatttcatgcctggtgcgtcaggtcttccaagttattttgtatatttttcgaggaaatatggagtgggaaatacgtaaacattcgcgcattctggactgtgtgctaaagtgggaaagtgggtcaatcaatacagaacgattagaggagggtgtgtttcgctcttgcgaatccatagacttatcgacggagtggaaccgcctggcagtcgaggatggcgactctatggaacccgtcagtcgataagccagatccgttcccatttcccatcgcactggcagccctgagacagagatgaccactagctagtaactcagaagtggatcagccacttgaggggaactggtttctggtcaccagatgccacttttcgacagctcaagtgacggctctgtggagcagtgtgtcgcttgactaattaccgctatgatcgacgttcggatgacaaggcgacataaccgcactggatcacacccacacatagccatctgcaccaccatcgctccaccacccggcaccatcagttctccactgtcaatggctatttaaagcatttgacttcgcctggccaacgaactctgaaatgcatccacagttgctgctatttcaacaccataaaatataagctgaaccaaaatcattttagatgttgtatccgtatgcaagtctttttaaaataatatatataatatagaaaagggttgaaacaattttttggtttaaggaacataactattttatttagtagaacagaataagtggttttaggttaatatttttcactgtgttggtatgccgcacccacatgcacatcgcgttttgatttctgcccagaaggtgagggaaaaagtgtcgcgaagggcggagaaagtaaacaaacgaaccgccctcgaggagaattttgtccacttcagcgctttgcacattaatcatagacctatagacgccccatccgcacaagtaaaaatcgatgcgacaaggaataaaaatagaaaacggaaaatcgaatgggcatttaggaggagcgcaagagggaaactgattggctaaaaagggggctggaaaagctgccttccatccgattaagtttgttgaaagattagattggtttttcacctcgctgaaggagggtggaaatcttccggtgaactaagaatagctagcgattctaaagaggattcataaagatgaagatattaagtgctacacatagtaggtgagatccccaatcttaacaacgatctggccacgctggaaaatcgctggttggggcttagtctccgttttccgacgagagaatccgagagaatacggagagacgcgctctgggagcttctaacgctggaagacacacctagttggtaacgctcgaattcggagtcgtgttcgaattcaggttttcgagggggctctgattccgactcattttgttttttttttagccatgttcattcgcgtgctgccaagtcgttagccctccgaaactctctcactctccagatttttgtagtatagttttccactcgctggttgtacagttattggcattcagttggctggcactcctcgtttgctttgctcggctgctttatctgtttgtctgctgtgcagccaacttcttggccagcaacaaccggttttttttatttctttcttttctaatgcaagctcaacctcatgttagccagttcgtttccattcccactttgcatggcctggccaagaagacgaagtctacatgttaatgtttcttactatttgggtcaaagcccacacctcccggaaaaggtggaagaaaaaagacttcacgtaaacagcggttttcgaagaacggttttttggttgccaagtcaacgccccaggttttccggggatggtgaaaatcgtgccgtgactcagtggatgggggatgaggggacacctaaaatatcgccaccagtcacctgccattcataactggcctttgttgtggtggccttatcttatcttagccatgtttcctagtggctgggataaagaccgacgttgtttaccccagccgatatcaaacatatgaaaaatgccaatgcaaaaagcgctcaatgttgtgataagaaatgtggaaacctgctcgcaaacccaatggattctattttgggaacagtgacgtcttgatgcttggggaatttagccgccatatgaaactattatatatgccatatgaatgcgacgaaattccaaaattatatttaagcgagagaaggaaatgaaaggaatcggtttcataaagtgcgcagttctaggaattttgatttttcggttggtagttggccttctttaaaatataaattcaaagtataaattctactcaattgatatttacacttaagaagttttctattcataatcatcattatgaataaccttttcaatttgcgtagaattcaaaagtgattgtatgcctttccacatgcgtatctttgagatacatatacatacatacgttgtagttttaccgatactgagtaggttttataaagatataaagtatttgcccccttttttaaagttcactgctaaacgaaactacctttgagatacatttgtatccgatcggtgttgtggaacgtttccttgactaccgcgggcccaataagaatttcccaccctgcgccccgaaatgcgaagcaaacgaggaaaacacagaagaaggaaaattggagtaaggcaaagacagaggcaaaatcaaaagagagctggcgacaacaacaatgtgggccgagttgacaaaaacaagaagtcgaaagaataagaatatcgtgccaaaagatacactcgaaaagcttgacagctcacagatacagatacgcagatacaaatgccgcgtgagtgagtcgagctctcttttcgctcccgctcgcaaagctgctctcaattaactctgctttcgggtgtgtgtgtgtgtgtgtggtgtgtgctatgaagtcatactgcccaagtcattctgcgcttgtgttggtatcgaaaacataagccaccaaaaactcccgaccacagcccaaaagaaaaaaacttgaataaaaatgtaattaacctatgtcgcaatccccaaattgtactcacccttttaagacgcctctagaatcctttttaatccacagcaaggacacgcagttaccgttagtttggcggttggctgatttttactcctgtatttgtgttgttttcacttttctcccgtgggcactgcactcactcgctttcacactagtaaacaaattctttgccacttttttctattcgttcgcgaaaaaagacaatttgttgttgtcgtcgtcgtcgtcgttgaatacctgttgaaaatttgacgttgagtttctttgagtgagtaatagagaacgcaagagtgggagttgaaggggtgtgtgtgctgtgaggggggttgggctcaggggtataatagagagcggggtgggcgtgggcggaaaatgcgcgaatagtggttgctaataaattaatttcccattttatttataaacacactgctgccgaattgcgcgcttttcttttctatccgctcgtcgccgttttgcaattactttgctgctggccaaacaacaaatcttctcacaattctggcagcgcgatcacacaaaacgtaccgtcttcacaaatattcgatgtgctgtgcacgaagagcaaactggtactgaaaccgaaaactgaaactgagagccatccgcttgccgctgctcgatttggatttgagtcgatttcagttgagaccactgagttttgctgagaaaccaccaccgagtggttgcagtgctggcaaatgccgttggttcatctgagtgcttcggtttgcttttcaaatgtttatagcaatagcgctgtttgatatcgctacaaaatgtatataaatctatgttttcttaataaatgtatggtccgatttcaatcgttaaattttttaaaaattatatgacctctaatggaaattcgagtgattttttatcttttatacatttttgtcgcatatatcaaggcgctatgtattcgacatacatttttaatctgtgcccttttttgttgctaaattatcgcgccttattatcaatttgtatattttcgaccgaataataagagatcaaaacacatttgtaagaattccaaatttattgcggtttctcctacataaaattaatgtaactatctataattgcattcgctgtcttggtttctttaacagttcgcaaagtcggaaatctactaatctgaataggataacatcctatcgcttgcgatataagcaaggtttgagagagaaagctttcatcttggtgttcttgggcacatgacgcatcttcttgaattggaagaagtagaaatagttaacagccacatccttcttgttaagatcgaatccacatgcattgaggcaacgcacaaactcccgcacatcctggaatcgcgactgaatctccgcgatatagacagtgccgtgcagcttgagcactcgattggcctccaggaagaactcgttcagatccgtgcccattagtgagaggcagtatacggccacgtccagagttcgagcttggagtggagtatccgtgatgttgcaggcaatgatgtcgctacgagcagcgaccaagtccatggagtacaccttgttgggcacggattgtgccaatttgccctcgccgcaa

SEQ ID NO: 15944 - DNA, 2916 bp, DROSOPHILA
cagtaccagtttgctcttcgtgcacagcacatcgaatatttgtgaagacggtacgtattcaacgacgacgacgacgacaacaacaaattgtcttttttcgcgaacgaatagaaaaaagtggcaaagaatttgtttactagtgtgaaagcgagtgagtgcagtgcccacgggagaaaagtgaaaacaacacaaatacaggagtaaaaatcagccaaccgccaaactaacggtaactgcgtgtccttgctgtggattaaaaaggattctagaggcgtcttaaaaggctcgctggaaatcattgccggagaaattctagagctctttggaaccaactccaagctgtcgctggcgtagccaagtcccccaatccaagatgccggcggaaattaaaccatccgcgcccgctgagccggaaacgccgaccaagagcaaacccaagtccagctcatcctcgcacggaaagcctgccctagcacgagtcaccctgctggatggctcccttctggacgtgtccattgatcgcaaagccattggccgtgatgtgatcaactcaatctgcgccggtctgaacctcatcgaaaaggactactttggtctgacctatgagacgcccacagatccgcgcacttggctggatctggagaagccggtatccaagttcttccgcacggacacttggcctctcaccttcgccgtcaagttctatccgccggagccatcgcagctgaaggaggacatcacgcgctaccatttgtgcctgcaggtgcgcaatgacatcctggagggtcgactgccctgcacattcgtcacccacgctctgctcggatcctacttggtgcagtcggagatgggcgactacgatgcagaggaaatgcccaccagggcctacctgaaggacttcaagatcgctccaaatcagacggctgagttggaggataaggtcatggatcttcacaagacccacaagggacaatcgcccgccgaggctgagctacactacctggagaatgccaagaagctggccatgtacggcgtggacttgcatcccgctaaggattctgagggcgtggacatcatgctgggcgtttgtgcctccggtttgctcgtctaccgcgataaattgcgcatcaaccgctttgcctggcccaagattctgaagatctcctacaagcgccaccatttctacatcaagatccgaccgggtgaattcgagcagtacgaatccaccattggctttaagctggccaaccatcgtgccgccaagaaactgtggaaatcctgcgtggagcaccacaccttcttccgcctgatgacccccgaaccggtcagcaagtccaagatgttcccagtcttcgggtccacctatcgctacaagggtcgcactcaggccgagagcacgaacacacccgtggatcgtactcctccgaagttcaataggactctgtccggagctcgtctcacttccaggagcatggatgctctggccttggccgaaaaggaaaaggtggctaggaagagcagcaccctggatcatcggggagatcgcaatgccgatggcgatgcccacagccgcagtcccatcaagaacaagaaggagaagttgatgcgacagtcgagcaccggcacggcttcggcctcctcgcaaagttccctcgagggtgactacgagaccaacctagagattgaggccatcgaggctgagccccccgttcaggatgctgataaggaggctaagttgcgtgagaagaaacaaaaggagaaggaggagaaggagcgaaaggagcgggagaagcgggagttggaggagaagaagaaggccgaaaaggctgccaaggcagcacttgccgctggtgccgctgcaggagcggctgttaatggcaatgacgagctgaatgattccaacaagtctgacaagtcctcaggcagacgtgctgatgctacacccaccgacctgagtggcgcctatgtcacggccaccgcagtcaccacccgcaccgccaccacgcacgaggatctgggcaagaacgccaagacggagcagctggaggagaagacggtggccaccacccgcacccacgatcccaacaagcagcagcagcgcgtcgttacccaggaggtgaagacgacggcgacggtcaccagtggggatcagaaatctccgctgtttacgacctccgccaccactggaccccatgtggaaagcacccgagtggttctcggtgaggacacacccggattctccggacatggcgaaatcatctccacccaaaccgtgagcagcaaaacccgcactgtggaaaccattacctacaaaaccgaacgcgatggcattgtggagacccgagtggaacagaagataaccattcagtccgatggagatccgatcgatcatgacaaagccttggccgaggcaatacaagaagcgacggccatgaatccggacatgacagtcgagaagattgaaattcagcagcaaacgcagtagattttataattatttttaaaccattcggatgattttctaagtaaacccgcacacacactcacacacatgaacaccagcccacgcatacgcagcacttgcagtacaccttttatacaacctatatctaaatataatttaaacaaatatatatatatatacacacgagtgtatatttgagctcgagctgatgacccacatgacataacactaagaaacataaaaagataaattcccaattatccgttaccgcaaccgtctacgagaaaatgcatctacatgtttattatttttattacaactgttgtttataattactttttattacgtatattatatattgaatgtgcaaggcaacgttgaaatgaaaactctatatattgtaaaccacgattgcattcaaatacaagaataaaacctaaatgtacacacac

SEQ ID NO: 15945 - protein, 703 aa, DROSOPHILA
MPAEIKPSAPAEPETPTKSKPKSSSSSHGKPALARVTLLDGSLLDVSIDRKAIGRDVINSICAGLNLIEKDYFGLTYETPTDPRTWLDLEKPVSKFFRTDTWPLTFAVKFYPPEPSQLKEDITRYHLCLQVRNDILEGRLPCTFVTHALLGSYLVQSEMGDYDAEEMPTRAYLKDFKIAPNQTAELEDKVMDLHKTHKGQSPAEAELHYLENAKKLAMYGVDLHPAKDSEGVDIMLGVCASGLLVYRDKLRINRFAWPKILKISYKRHHFYIKIRPGEFEQYESTIGFKLANHRAAKKLWKSCVEHHTFFRLMTPEPVSKSKMFPVFGSTYRYKGRTQAESTNTPVDRTPPKFNRTLSGARLTSRSMDALALAEKEKVARKSSTLDHRGDRNADGDAHSRSPIKNKKEKLMRQSSTGTASASSQSSLEGDYETNLEIEAIEAEPPVQDADKEAKLREKKQKEKEEKERKEREKRELEEKKKAEKAAKAALAAGAAAGAAVNGNDELNDSNKSDKSSGRRADATPTDLSGAYVTATAVTTRTATTHEDLGKNAKTEQLEEKTVATTRTHDPNKQQQRVVTQEVKTTATVTSGDQKSPLFTTSATTGPHVESTRVVLGEDTPGFSGHGEIISTQTVSSKTRTVETITYKTERDGIVETRVEQKITIQSDGDPIDHDKALAEAIQEATAMNPDMTVEKIEIQQQTQ

SEQ ID NO: 15946 - DNA, 4003 bp, DROSOPHILA
ttatggcgtgttcggcgatcgcgccacctcaatatgttaattaggtacacatgtacctataaagacttagagatatttatattaaagtcagacaatggatctattaaatatgagaagaaaaatccaaaaaaacatcacgcaattgctattttaatttggaagtaaatggcattgactgagtagataagaatggtagacgtttcaagataatcagagcgagcctccttcgcaacaaaaaaaaaaaaagattggcgcccaagttcaaatattatctaagctttaacatgtcagttcgactatcgttatcgatagtaccgcacgtaccagctgattttgaattcgggtgaagttgaataaataagcttaatgccacgcgcttttctaatttgtattccttatcaaaacaagtcggccgtgaactttaaataaaagtggctagcccgcaatagtggaaaagtttttcgccagctgataaacgcaacagttgtcattcggaagagagggacaatgccacccgcaatgcgaaagcgattgacaagtcagccggcgataacgattacatgtttacgcgttcgccgagtgcttattgttttttatactctcgttacattattaattaaaacacttgcttttaagtgtgccgagtgttgtgagagcagcttatcaaagtccgaggttctaaatcttatctgactgggcatttagaacgttgtgattacgccgattgcgcaacaatttgacgattgtacgccacccaagagagtcggaaactgtagcgcttaacggcactttacagttatcagttacggttagagcgcgtctgacgcccacagcatttaattttgctttgtccgaaaattgttctctttcccgggactccagtgtcatattgtctcgtattgtttcacattggtgacaaacactatcgtctctcgtttccagtcgtcggtcggttcattcataataataatacccacatccacaccaatccggttgtaaaatgttcgccctgcgccgcacagccgcaatgatgacgtcggtccaccggcagccgcatctcagccaggccgtttttcgggccaatttcgccatcagcgccgcggtaggtcctccttgtatcctcgccctctgtcgctctaaatctctttgcttactaaatttcggaatagggtgggtcgatgagcaggagaaaaagatattttgaattttttgaagtcggtctcaatattaagattataaacaatcacgtagtcacctgtgctgctagcatccgataaataggattactatatttactgtttatacaaaaaaattgaacaattttttcttaaatttataacctatgaatgcaaagtagagatattaacttttaggcaagtaccttaataattacgtcgtcacgacgaaatattaaatattacaaagtaaagataagggattacttttgaaacacggtgtattttaatttccatccatcaatatcgacccaccctatcccaggctgatcaaagtttactttgctttgaccagttgtcagtttattatcgtcatacatataagtttcgcctgtatcgcctgtgcttaggaccccaaaacccataagatatccatggataatgaaaggatgtccgccgtgagcgaggtgaataccccaataccgcagcattcagacacaaatccatttttcatgtagctaataagattcccatcctgcccttcaagcactcaagtgtggtatgctctcccgaacagatggcccagaagatcaaagccggtcccgttgtggatgtcctcggtgacgagatgacccgcatcatttgggactccattaagagccaactgattctgcccttcctggacattgagctgcatacctacgatcttggtattgagaaccgcgataaaaccgaggaccaggtcaccattgactgtgctgaggccatcaagaagtacaacgtgggcatcaagtgcgccacaatcactcccgacgagaagcgcgtagaggagttcaacctgaagaagatgtggaagtcgcccaacggtaccatccgtaacatcttgggaggaaccgtcttccgtgaggcaatcatctgcaagaacgtgccccgtctggtgactggctggcagaagcctattgtgatcggtcgccatgcccacgccgatcagtacaaggccgtcgactacgtggttcccggacccggcaagctgaccctcacctggaagggaaccgacggtcaggtgatcgatgaggtcattaatgacttcaagggccccggtattgccctgggaatgttcaacacggacgattccattgtggactttgcccacgcctctttcaaatatgctctggaccgcaagctgccgctgtacatgagcaccaagaacaccattctgaagaagtacgatggacgcttcaaggacatattcgaggacctgtacaacaagcagtacaagaaggagtacgaggcggcgggcatctggtatgaacaccgtctcatcgacgatatggttgcttatgccatgaagtcggagggtggcttcgtgtgggcctgcaagaactacgacggtgatgtgcagtcggactccgttgcccagggctacggatctctgggtctgatgacctccgtgctgctatgccccgatggcaagaccgtggaggctgaagccgctcacggaacggtgacgcgtcacttccgcttctaccagcagggcaaggagacctccaccaaccccattgcctcgatattcgcctggacccgtggcctgctgcatcgtgccaagctggacaacaatgagccactgaagcagttcgccgacacccttgagcaggtgtgcatcgacacaattgagagcggcgccatgaccaaggatctggccatctgcattaaaggcaacatcaacgccgttactcgcagggactaccaggagacttttgagttcattaacacgctggccaagaacctggagggtgccctggccaagaatgccgttgctgccaaatgactatccggcactcagtccgagcagcaggcctcgcatctctagaaaactactcagcgatgccttgtcctcgtcaccatattcacaatatttccattcgtttttgtagatgtgcatgtcctaggctaaaaatccgtgtcctcgatgcatgtttcccactgtttcattgtctctgcgagacgcaaaaaaaaaccctgatttccctttaacgtctaacggaaaagaaatttcaaataaatgtatttttataccggactcgagaggtctttaacccagtcgagggtgggctcgttacgaggcccggtccacttgtgcggcttctgatggctctgggtttattggatttgccagcgaaatggccacagttgtgttctaacacttggcggcaccagaccgagacggttcaagcggaaggggctcaggatcctgttagaaggacgaaactatcgatgctagccgaagcattgggctatggctacctgctggcctacgtgatctgcctgctctgctggccaggagaggcgtatcccgccagcagtagctaccgggatctggatatatgcaatcattgggacggaagacgtcacttcctggaactgggaagtccagctggagaggtgcacgccaggaatgtgactactactgcctatagagtaagtgtatttacaagcttctccagacgggatttggtcagcaattatgaacttaaaaacagagctcgccgctggtttttaagaacgatgcagtggccggggatgtgtggtaccagtgcagcctggagctggtcacctgtgccgagtgcgtcatccgagtggccttcacctatgccaacttctccaaaagttgcggcaatacgggtggcaagtccagcatgtgtccctgcgagcatatccagttctcggagccgccctatgattccaccatttccggccaagagttctgtggagatggcaaggtgtttcggagcaaaaccaggacactgcagttgaaattcttctacaga

SEQ ID NO: 15947 - DNA, 1410 bp, DROSOPHILA
atgttcgccctgcgccgcacagccgcaatgatgacgtcggtccaccggcagccgcatctcagccaggccgtttttcgggccaatttcgccatcagcgccgcggaccccaaaacccataagatatccatggataatgaaaggatgtccgccgtgagcgagatggcccagaagatcaaagccggtcccgttgtggatgtcctcggtgacgagatgacccgcatcatttgggactccattaagagccaactgattctgcccttcctggacattgagctgcatacctacgatcttggtattgagaaccgcgataaaaccgaggaccaggtcaccattgactgtgctgaggccatcaagaagtacaacgtgggcatcaagtgcgccacaatcactcccgacgagaagcgcgtagaggagttcaacctgaagaagatgtggaagtcgcccaacggtaccatccgtaacatcttgggaggaaccgtcttccgtgaggcaatcatctgcaagaacgtgccccgtctggtgactggctggcagaagcctattgtgatcggtcgccatgcccacgccgatcagtacaaggccgtcgactacgtggttcccggacccggcaagctgaccctcacctggaagggaaccgacggtcaggtgatcgatgaggtcattaatgacttcaagggccccggtattgccctgggaatgttcaacacggacgattccattgtggactttgcccacgcctctttcaaatatgctctggaccgcaagctgccgctgtacatgagcaccaagaacaccattctgaagaagtacgatggacgcttcaaggacatattcgaggacctgtacaacaagcagtacaagaaggagtacgaggcggcgggcatctggtatgaacaccgtctcatcgacgatatggttgcttatgccatgaagtcggagggtggcttcgtgtgggcctgcaagaactacgacggtgatgtgcagtcggactccgttgcccagggctacggatctctgggtctgatgacctccgtgctgctatgccccgatggcaagaccgtggaggctgaagccgctcacggaacggtgacgcgtcacttccgcttctaccagcagggcaaggagacctccaccaaccccattgcctcgatattcgcctggacccgtggcctgctgcatcgtgccaagctggacaacaatgagccactgaagcagttcgccgacacccttgagcaggtgtgcatcgacacaattgagagcggcgccatgaccaaggatctggccatctgcattaaaggcaacatcaacgccgttactcgcagggactaccaggagacttttgagttcattaacacgctggccaagaacctggagggtgccctggccaagaatgccgttgctgccaaatga

SEQ ID NO: 15948 - protein, 469 aa, DROSOPHILA
MFALRRTAAMMTSVHRQPHLSQAVFRANFAISAADPKTHKISMDNERMSAVSEMAQKIKAGPVVDVLGDEMTRIIWDSIKSQLILPFLDIELHTYDLGIENRDKTEDQVTIDCAEAIKKYNVGIKCATITPDEKRVEEFNLKKMWKSPNGTIRNILGGTVFREAIICKNVPRLVTGWQKPIVIGRHAHADQYKAVDYVVPGPGKLTLTWKGTDGQVIDEVINDFKGPGIALGMFNTDDSIVDFAHASFKYALDRKLPLYMSTKNTILKKYDGRFKDIFEDLYNKQYKKEYEAAGIWYEHRLIDDMVAYAMKSEGGFVWACKNYDGDVQSDSVAQGYGSLGLMTSVLLCPDGKTVEAEAAHGTVTRHFRFYQQGKETSTNPIASIFAWTRGLLHRAKLDNNEPLKQFADTLEQVCIDTIESGAMTKDLAICIKGNINAVTRRDYQETFEFINTLAKNLEGALAKNAVAAK

SEQ ID NO: 15949 - DNA, 4133 bp, DROSOPHILA
gggatcgtgctcgagttggggatttacgaccgggacggggtctagggctcgcactgcgactgtcggatcgttcgcatcgaggatttcaatttgtgattgtggtgttcaaaggcaattcgagctagcaagctttcatattacggcacgggggattggtaagtctttcgggagatagtgtcacctccacaaggggggtcaattggattgaacgcgtgcgagagtcagcggaaaattgaagttatttcgccagaagttccctttactttcacaaaaaattttacaaagcaactgggtttacttgtgttcgtgatctatcgatagcgcatattgttacacaagtgttatcggcggtgatgccacccaagctaccagcttgcctaatatatatgttacgcattagcagagatgttacctggcctctgttaacttgaacagtagaccgttactcttcgaacgagttataacattgttaagaatactgtataacctttaagcattaagccacttttttaaatttcattttgcctgccataatgaaacagattacaaacagattacagctgtaaaaaccacacctaacaaagtcttaataaattccaaacccttatacaggtttcccttattcagcaagaagatgctcctgtctcttttgttttgcccctaaggcaaaaagcccagatagtctcttattttatatatataaatatgattttcgataatgttttcttgcaattcgttaatttatttattataactaacttctctgaatgatttttgagatacatacaaatatattgtagaacttaaatatacatgcactaatagtttataagttatcactttaatgaataggaaagctataagtgcacgatatttttatacgtgaacaacaaatcaaaatcactttttacaaaaccctacattttaccatttccactaaatttgcatattttgtaatcgctagaataaattaaattaaaacagttttttattttattttagtttaagagcaagatcctttactcttaatcgtcacacctggaatagaacatgttggtttaaaatatatacagacaatacatatattgggtatgaaactcttacttatattgaggcatgacgaatagcactgcagttgggtttcgcccgtgtacatgtatccgtcggatccacagattatttcatcgttttcatcgtacacattagcacatatcttctcgcagtagttttccgtgtcctttggatcgtcaggagtagctgaactcgtcacagtgggcacctttggaatatcttgctgaaatgggcaaatttaaaattaaaaatgtaagagctaaattcacagcaaaaagaatttgatcttattaggaaaaactgttactggtatttgatgagtcgtataatttttgtagcttgagttgatagaatcaactatttttttaagtttattttttcaaagaagagtactattttaaacccgtaaacgatttgatcgaaattaagtactcactaaatcgcgtaaaaatcattataaaatgccttaaaggttggaagtgcttgtttttgtggccactttttggccaacaaatatgctagcttatataagctacttgcggttttcacatttattgagaaacagaaccaacctgctttccactttcagtgtcggaactatcctctgggtcatcggtgtattccttaatgggcttgctgagttcaatcttcggggcaggagatttcgcgggctcgcggggagcttgggccacggtttcgtagtagtactgattggcttgcggggcttgggtgtacttcatcgatccccttatggcatcttgctcggtgaactcgaatcgcagaggctccggggtaaagctcttgtgggtcttggcgaggtgctggctcttcgacggcgattgagtggtggtctggaccgccatgggagtagagaccacatgcttaacggctttgttgccgtcggacttgacaacgaagacatcctgacctgcctggtaactgccgcgaaccactgcggaattcgcaggagcgggatcttgctggtagaacaagtcggacacttgtatgggctcattgtaactggaggagactgagttgtctaggccagcagttttgtagggaacatgttgctgcagcgcttgttgctgctgcggctgctggtgctgcggttgctgatgctgctgctgttgttgctgatacagttgctgctgctgctgctgtctgtattgctgtggatattggtggagcagcttctgctggtcccgctcggcgtccagtttcttgaagtcaggatccctcttgggcaggaagtactcgttggtgctcatgaattgcaggtagtcctgcgcctccctggactcctttggtggtggcactgcctggcgaaagtttaccgcctgcttcgcaggtatatcggtatcctcgtagacagagtagctatttggatcctggggaaactggctgttttggagagcagtttgctgggtagggacaacactgaaactgggagatccctgctgtccgaagagcttgggatagtgcaggtactgggaggcctggacgggaatcgcatgctgttggatgggtgcgtacactggcttggtgtccttcatgatcacattgccattgaagcgcggcgaggacttgaagttctgaatgtactgctcggagacatactggagtgggaactggtttttgcccacatctagcaccggagtgtcctttacgtgggcgaatctgccctgctgactctggtcgaactggtacctcctgagctggtcgttcgcaggaaagttcccgaactgctcgcgacgcatgatgtgctgcgcagtggcaggttgcggcgaccgcaagaacttgttggagccaccagaaagcatggccaggttatccgatcgcgatcttatccggggcagttgtccgggacccggcggccgattgtgcttgatatggtgctgggccaggggctggttctcactcagaaactgccttatgcgcgcttgtctcatatcattctcaccgcactgcacttggttgattaggaccactatcagaactagggcctccaaaatgggggccaacttaagcggactctgagtcatttttaaagctcgtcttcgttccacgacggtctattggtatttgacatttgtcagttccgcggccaaaagcaaaaaagtttctttcgaattaaccacgcacacatgcgaagcttcttttccattcgacgatccacgatcgcgcagacttgatctcactttctttgttatccggccagtcgtttaaataaaaatggaacgcctcgcggcactgcagccaaatacaatgtggtggcctcgtctctgggcccagatgcagctatctatgtatatctatttaaaaccgacttggttcgccatatcagcttaagatgggcactttttctagagcctgtggttccaacgccgcagcaccgttaatcaatggagggtctcgagcatccacatccatccgattactttcttcttgaatttcggcggtgccgtcggttggaaagcaactgagtggcaaatggaacgtttctgaactagctgtgctggaattcggagtgtcggaatggccactaaaccagttttgagatgctgcctctgctgccatagaggagctgctgtggatgtggatgtggatgtcgatgtcgatgtcgatgtttttggatttggatgtgcatgtggtgtccaccgagagatccccgagagatcatatcgcgacacgaagatggagcactcgagcctcggggcaccgtgacatcgctccagatgcgacagaaccattggccaggtatgctcattaatctggctatcttgagtgctggtgaaagtaaatcggagataagatcttttggagacctatgcgtaattggttcggagttcctcaaacatcagagattaatttgcttatacagaatgccagatggctggatgtctgagacttgtgaatgcagggttatttacctcatgtaaaagtgaaaatgtttttaattatagatactgggataatgggtacaactttcgcttttgtcgtcaatttggcactgctttttcgagagaacaagccatgaaaacgataatttggatcattgttat

SEQ ID NO: 15950 - DNA, 1718 bp, DROSOPHILA
aacgaagacgagctttaaaaatgactcagagtccgcttaagttggcccccattttggaggccctagttctgatagtggtcctaatcaaccaagtgcagtgcggtgagaatgatatgagacaagcgcgcataaggcagtttctgagtgagaaccagcccctggcccagcaccatatcaagcacaatcggccgccgggtcccggacaactgccccggataagatcgcgatcggataacctggccatgctttctggtggctccaacaagttcttgcggtcgccgcaacctgccactgcgcagcacatcatgcgtcgcgagcagttcgggaactttcctgcgaacgaccagctcaggaggtaccagttcgaccagagtcagcagggcagattcgcccacgtaaaggacactccggtgctagatgtgggcaaaaaccagttcccactccagtatgtctccgagcagtacattcagaacttcaagtcctcgccgcgcttcaatggcaatgtgatcatgaaggacaccaagccagtgtacgcacccatccaacagcatgcgattcccgtccaggcctcccagtacctgcactatcccaagctcttcggacagcagggatctcccagtttcagtgttgtccctacccagcaaactgctctccaaaacagccagtttccccaggatccaaatagctactctgtctacgaggataccgatatacctgcgaagcaggcggtaaactttcgccaggcagtgccaccaccaaaggagtccagggaggcgcaggactacctgcaattcatgagcaccaacgagtacttcctgcccaagagggatcctgacttcaagaaactggacgccgagcgggaccagcagaagctgctccaccaatatccacagcaatacagacagcagcagcagcagcaactgtatcagcaacaacagcagcagcatcagcaaccgcagcaccagcagccgcagcagcaacaagcgctgcagcaacatgttccctacaaaactgctggcctagacaactcagtctcctccagttacaatgagcccatacaagtgtccgacttgttctaccagcaagatcccgctcctgcgaattccgcagtggttcgcggcagttaccaggcaggtcaggatgtcttcgttgtcaagtccgacggcaacaaagccgttaagcatgtggtctctactcccatggcggtccagaccaccactcaatcgccgtcgaagagccagcacctcgccaagacccacaagagctttaccccggagcctctgcgattcgagttcaccgagcaagatgccataaggggatcgatgaagtacacccaagccccgcaagccaatcagtactactacgaaaccgtggcccaagctccccgcgagcccgcgaaatctcctgccccgaagattgaactcagcaagcccattaaggaatacaccgatgacccagaggatagttccgacactgaaagtggaaagcagcaagatattccaaaggtgcccactgtgacgagttcagctactcctgacgatccaaaggacacggaaaactactgcgagaagatatgtgctaatgtgtacgatgaaaacgatgaaataatctgtggatccgacggatacatgtacacgggcgaaacccaactgcagtgctattcgtcatgcctcaatataagtgtgacgattaagagtaaaggatcttgctcttaaact

SEQ ID NO: 15951 - protein, 564 aa, DROSOPHILA
MTQSPLKLAPILEALVLIVVLINQVQCGENDMRQARIRQFLSENQPLAQHHIKHNRPPGPGQLPRIRSRSDNLAMLSGGSNKFLRSPQPATAQHIMRREQFGNFPANDQLRRYQFDQSQQGRFAHVKDTPVLDVGKNQFPLQYVSEQYIQNFKSSPRFNGNVIMKDTKPVYAPIQQHAIPVQASQYLHYPKLFGQQGSPSFSVVPTQQTALQNSQFPQDPNSYSVYEDTDIPAKQAVNFRQAVPPPKESREAQDYLQFMSTNEYFLPKRDPDFKKLDAERDQQKLLHQYPQQYRQQQQQQLYQQQQQQHQQPQHQQPQQQQALQQHVPYKTAGLDNSVSSSYNEPIQVSDLFYQQDPAPANSAVVRGSYQAGQDVFVVKSDGNKAVKHVVSTPMAVQTTTQSPSKSQHLAKTHKSFTPEPLRFEFTEQDAIRGSMKYTQAPQANQYYYETVAQAPREPAKSPAPKIELSKPIKEYTDDPEDSSDTESGKQQDIPKVPTVTSSATPDDPKDTENYCEKICANVYDENDEIICGSDGYMYTGETQLQCYSSCLNISVTIKSKGSCS

SEQ ID NO: 15952 - DNA, 6230 bp, DROSOPHILA
gttcattgacatggctaatggcgggtactgatggttccatccagcaaggtgaagtgaagtggtgcagggcagaaaaccaaagcacgtttacattgaggtttcgccggcacgcgtttattttacctgagaggatgggccaaaaccgaatatgttatttaatgcattggcatgcacaaattaagacacgttataattgggggttatataagcgagcataaacggcgcttatctaatgccacacggcaaaagcaaagaaagcgtcgcaattagacgagttttctagccagtttttgtcaaataataggcccaagatcgagtgattttcatgcatgttcggttggctgtcgccgcatttgatgttttccatgatgtttgaaaatgcttatcgggtgcggtccctaatgagatgggtaactatttatctaggggggaaaataaaatatgtaattttgcgcgataagaataacaacggaacatgttaatgagcattttcttgtttcgtcattcaataactaattcaatgattttattatcattactgaatatcccacattcctttcaactgtccaaactatgcgaaagaacgtagcattcgcgtcttaatggcagcacactttcgcatattaaaggcggtcacaacaaaagatggcaattttaaattttttttgcatatttaagaccagttaaacggcgccggctaacatttcacttttggagcacattttatggattttcttttagcgtcattaaagcaaacgaacgcacgctgctctcacaagttgcggtaattgagaattcaaattttatgtttggcggttcagcaagacgaactaatactgagtgctgcagaactcgagagtaaagcttaaagttcgtgagaaagctcttcgcaagcagctgattgaataacatgtttttatctacggaattatcttccacacgcgccacctcttgctctttattgttgtcgtcgccaaatcagtttcagttattcgctgcgtctgattgggagtggttcgagatctttcggtctgcaatttaattagtctgtgctctaacattctaaattcggcattttaaatattctaaaaggtaagtggagcatttgtttagccttatataaaccggttcacactccacgccaaacacccacacttccgatcgcattccgcccagctatttactgcactcaaaggctgacttgcaatttatctgagcaaataaaaaatggtggatttccagatcggttgcaatacgtaaatttgccgcaattcaagcctccttaatgcaaataagttgcgcattttaactttatgcataacctctggcccaacctatttgggcccgaactttccccaccggtctgttttcatatgcattttatttgtctgccgctgttttgtttttttctttgcaccggtttgcctcctcgaaaaagagagatacggataaaaaaagtgtgaagagacgacagtgtgaaagagggggatatatgtggagagagagagacacgtaacccattcgacaggccttttcacatccacctgattctccaggtgctgtccaaagtttaatcttgaattcgtgtcgacagttttaattaaacctatacaattactatgcatatctacaaatagatggttcgagaaaacctccagatagctcgtatctcattgggacttttgcatgcacaatttggaaatgtttttaactttctaagtttgtcctatgttttgagtgcttaaacaacttaaacagtcgacgtttatttttttcatttatcaaactagaagtcagatctgaatacaattaattactataattagattatcgtaaacttatatttgataaggatagatggactcttttattaacttgtcagtcgaaaaattaaaaccataattttattaggttttcttttttatttctagcgaattttgtattaacagtttcataaagttcaagggtcaaaagtcatcatgcaatctttttatttcaacaataaatatttctgggactagaaaaacaccagatgagaaaatatcagattagatctagataatttattcgccccgtcattaccagcttatttaccaatcgcaagtcttatcaatatcgtactatgttcgaattctcccagttggactagaaaaaaaaacgcttgtgaaattcgtttggtgaaagcataaatattgttattatatataattgtgggcgtggcctcagcttatggcgtgttcggcgatcgcgccacctcaatatgttaattaggtacacatgtacctataaagacttagagatatttatattaaagtcagacaatggatctattaaatatgagaagaaaaatccaaaaaaacatcacgcaattgctattttaatttggaagtaaatggcattgactgagtagataagaatggtagacgtttcaagataatcagagcgagcctccttcgcaacaaaaaaaaaaaaagattggcgcccaagttcaaatattatctaagctttaacatgtcagttcgactatcgttatcgatagtaccgcacgtaccagctgattttgaattcgggtgaagttgaataaataagcttaatgccacgcgcttttctaatttgtattccttatcaaaacaagtcggccgtgaactttaaataaaagtggctagcccgcaatagtggaaaagtttttcgccagctgataaacgcaacagttgtcattcggaagagagggacaatgccacccgcaatgcgaaagcgattgacaagtcagccggcgataacgattacatgtttacgcgttcgccgagtgcttattgttttttatactctcgttacattattaattaaaacacttgcttttaagtgtgccgagtgttgtgagagcagcttatcaaagtccgaggttctaaatcttatctgactgggcatttagaacgttgtgattacgccgattgcgcaacaatttgacgattgtacgccacccaagagagtcggaaactgtagcgcttaacggcactttacagttatcagttacggttagagcgcgtctgacgcccacagcatttaattttgctttgtccgaaaattgttctctttcccgggactccagtgtcatattgtctcgtattgtttcacattggtgacaaacactatcgtctctcgtttccagtcgtcggtcggttcattcataataataatacccacatccacaccaatccggttgtaaaatgttcgccctgcgccgcacagccgcaatgatgacgtcggtccaccggcagccgcatctcagccaggccgtttttcgggccaatttcgccatcagcgccgcggtaggtcctccttgtatcctcgccctctgtcgctctaaatctctttgcttactaaatttcggaatagggtgggtcgatgagcaggagaaaaagatattttgaattttttgaagtcggtctcaatattaagattataaacaatcacgtagtcacctgtgctgctagcatccgataaataggattactatatttactgtttatacaaaaaaattgaacaattttttcttaaatttataacctatgaatgcaaagtagagatattaacttttaggcaagtaccttaataattacgtcgtcacgacgaaatattaaatattacaaagtaaagataagggattacttttgaaacacggtgtattttaatttccatccatcaatatcgacccaccctatcccaggctgatcaaagtttactttgctttgaccagttgtcagtttattatcgtcatacatataagtttcgcctgtatcgcctgtgcttaggaccccaaaacccataagatatccatggataatgaaaggatgtccgccgtgagcgaggtgaataccccaataccgcagcattcagacacaaatccatttttcatgtagctaataagattcccatcctgcccttcaagcactcaagtgtggtatgctctcccgaacagatggcccagaagatcaaagccggtcccgttgtggatgtcctcggtgacgagatgacccgcatcatttgggactccattaagagccaactgattctgcccttcctggacattgagctgcatacctacgatcttggtattgagaaccgcgataaaaccgaggaccaggtcaccattgactgtgctgaggccatcaagaagtacaacgtgggcatcaagtgcgccacaatcactcccgacgagaagcgcgtagaggagttcaacctgaagaagatgtggaagtcgcccaacggtaccatccgtaacatcttgggaggaaccgtcttccgtgaggcaatcatctgcaagaacgtgccccgtctggtgactggctggcagaagcctattgtgatcggtcgccatgcccacgccgatcagtacaaggccgtcgactacgtggttcccggacccggcaagctgaccctcacctggaagggaaccgacggtcaggtgatcgatgaggtcattaatgacttcaagggccccggtattgccctgggaatgttcaacacggacgattccattgtggactttgcccacgcctctttcaaatatgctctggaccgcaagctgccgctgtacatgagcaccaagaacaccattctgaagaagtacgatggacgcttcaaggacatattcgaggacctgtacaacaagcagtacaagaaggagtacgaggcggcgggcatctggtatgaacaccgtctcatcgacgatatggttgcttatgccatgaagtcggagggtggcttcgtgtgggcctgcaagaactacgacggtgatgtgcagtcggactccgttgcccagggctacggatctctgggtctgatgacctccgtgctgctatgccccgatggcaagaccgtggaggctgaagccgctcacggaacggtgacgcgtcacttccgcttctaccagcagggcaaggagacctccaccaaccccattgcctcgatattcgcctggacccgtggcctgctgcatcgtgccaagctggacaacaatgagccactgaagcagttcgccgacacccttgagcaggtgtgcatcgacacaattgagagcggcgccatgaccaaggatctggccatctgcattaaaggcaacatcaacgccgttactcgcagggactaccaggagacttttgagttcattaacacgctggccaagaacctggagggtgccctggccaagaatgccgttgctgccaaatgactatccggcactcagtccgagcagcaggcctcgcatctctagaaaactactcagcgatgccttgtcctcgtcaccatattcacaatatttccattcgtttttgtagatgtgcatgtcctaggctaaaaatccgtgtcctcgatgcatgtttcccactgtttcattgtctctgcgagacgcaaaaaaaaaccctgatttccctttaacgtctaacggaaaagaaatttcaaataaatgtatttttataccggactcgagaggtctttaacccagtcgagggtgggctcgttacgaggcccggtccacttgtgcggcttctgatggctctgggtttattggatttgccagcgaaatggccacagttgtgttctaacacttggcggcaccagaccgagacggttcaagcggaaggggctcaggatcctgttagaaggacgaaactatcgatgctagccgaagcattgggctatggctacctgctggcctacgtgatctgcctgctctgctggccaggagaggcgtatcccgccagcagtagctaccgggatctggatatatgcaatcattgggacggaagacgtcacttcctggaactgggaagtccagctggagaggtgcacgccaggaatgtgactactactgcctatagagtaagtgtatttacaagcttctccagacgggatttggtcagcaattatgaacttaaaaacagagctcgccgctggtttttaagaacgatgcagtggccggggatgtgtggtaccagtgcagcctggagctggtcacctgtgccgagtgcgtcatccgagtggccttcacctatgccaacttctccaaaagttgcggcaatacgggtggcaagtccagcatgtgtccctgcgagcatatccagttctcggagccgccctatgattccaccatttccggccaagagttctgtggagatggcaaggtgtttcggagcaaaaccaggacactgcagttgaaattcttctacaga

SEQ ID NO: 15953 - DNA, 1343 bp, DROSOPHILA
tctgattgggagtggttcgagatctttcggtctgcaatttaattagtctgtgctctaacattctaaattcggcattttaaatattctaaaagatggcccagaagatcaaagccggtcccgttgtggatgtcctcggtgacgagatgacccgcatcatttgggactccattaagagccaactgattctgcccttcctggacattgagctgcatacctacgatcttggtattgagaaccgcgataaaaccgaggaccaggtcaccattgactgtgctgaggccatcaagaagtacaacgtgggcatcaagtgcgccacaatcactcccgacgagaagcgcgtagaggagttcaacctgaagaagatgtggaagtcgcccaacggtaccatccgtaacatcttgggaggaaccgtcttccgtgaggcaatcatctgcaagaacgtgccccgtctggtgactggctggcagaagcctattgtgatcggtcgccatgcccacgccgatcagtacaaggccgtcgactacgtggttcccggacccggcaagctgaccctcacctggaagggaaccgacggtcaggtgatcgatgaggtcattaatgacttcaagggccccggtattgccctgggaatgttcaacacggacgattccattgtggactttgcccacgcctctttcaaatatgctctggaccgcaagctgccgctgtacatgagcaccaagaacaccattctgaagaagtacgatggacgcttcaaggacatattcgaggacctgtacaacaagcagtacaagaaggagtacgaggcggcgggcatctggtatgaacaccgtctcatcgacgatatggttgcttatgccatgaagtcggagggtggcttcgtgtgggcctgcaagaactacgacggtgatgtgcagtcggactccgttgcccagggctacggatctctgggtctgatgacctccgtgctgctatgccccgatggcaagaccgtggaggctgaagccgctcacggaacggtgacgcgtcacttccgcttctaccagcagggcaaggagacctccaccaaccccattgcctcgatattcgcctggacccgtggcctgctgcatcgtgccaagctggacaacaatgagccactgaagcagttcgccgacacccttgagcaggtgtgcatcgacacaattgagagcggcgccatgaccaaggatctggccatctgcattaaaggcaacatcaacgccgttactcgcagggactaccaggagacttttgagttcattaacacgctggccaagaacctggagggtgccctggccaagaatgccgttgctgccaaatga

SEQ ID NO: 15954 - protein, 416 aa, DROSOPHILA
MAQKIKAGPVVDVLGDEMTRIIWDSIKSQLILPFLDIELHTYDLGIENRDKTEDQVTIDCAEAIKKYNVGIKCATITPDEKRVEEFNLKKMWKSPNGTIRNILGGTVFREAIICKNVPRLVTGWQKPIVIGRHAHADQYKAVDYVVPGPGKLTLTWKGTDGQVIDEVINDFKGPGIALGMFNTDDSIVDFAHASFKYALDRKLPLYMSTKNTILKKYDGRFKDIFEDLYNKQYKKEYEAAGIWYEHRLIDDMVAYAMKSEGGFVWACKNYDGDVQSDSVAQGYGSLGLMTSVLLCPDGKTVEAEAAHGTVTRHFRFYQQGKETSTNPIASIFAWTRGLLHRAKLDNNEPLKQFADTLEQVCIDTIESGAMTKDLAICIKGNINAVTRRDYQETFEFINTLAKNLEGALAKNAVAAK

SEQ ID NO: 15955 - DNA, 4154 bp, DROSOPHILA
ccacaatccccaacgctaaatcagtgtgtatatacgagaatattgaaaatgtgtgtattaatatataaatgtgtacgtgttaactacttactaactgaaactatctttaatgtaaagtcgagaagtatatatatatatttcaaataaacttatgaaatactattattcgtatgcaattaaatggtgataaggcgttttcaattgacgttaagggttcgattaagcatttcctagcatatcatcatgtatcattgatactatactcttaaaataataataaaaactcgaaattttaagagttaatctacttttctactacattttgaaatgtttatgtacaattggaggatggaactatttctttggtgtaattagtgctagtaaattgaacagatcttcaatagtttctcacttccacaacaactccgactcattgtttaaaccaaataagtaccgcgattgtaaatggaaccaactaacacatctgcggaagtgcgaaagtgccaccctgacattgagattgaatggggccgagattctcggccaactattgctcagtgtttgctgagaaaacaatgtggcgacatggttatctatttggaaagcatctgtatctgtggatgacaacggcgtggggattgcgatacggagtggatagaggtaagggtggagctgctggagctcgtgccttagcgcagtaatgaccaacgagcgtgtaagcctccagtgggatgactaagcgtagtgaaaagacgcattccttatcacattttctttatacattcactatgacgttaacaaaattggtgaaatacggatgccgcgggttaggatcgcagattaatgctgagtaaatttggagtcattgtcatgaaacgaaaaaatattatattaaatacattccttaccaaaaatacataaaatagcatttagaattccctagtatttttattagctcttcaatcttttacataattaaaacatttgtagctatagttagttgcccagcttgtaatataccttcagccaaaaatgtttgggaaccaacttcttagcggcgaaaagcacaagggtttagttaaccagagagtgtcgactgaaagtttaagtacctccatgtaatcaaaggagcaactgctttgctcaaaggccttcgtaaccagaggtgactctggcttaactatggattgggacgaagactgtggctgagttgtgacgcccaggtgagccttatcctcatcctcatcgtccacagcagaacgggcaaaggcctcgtcgccgtcgaagtaatagaactccttgcgagtggagttagtttccaccactctcgatggctgttgagcatcgatgccccgggcataggatatccttctcgccgttcggtagggagtggccgaaaagggtaggggatatccactgatatagccaggataaccaggttgtagcggccacatttgtgcggtttgcgggggtaatcccaactgaggttgcaagcccaactgaggttgcaagcccaactgaggctgtaacccctgtggccacaaacccaatcccctttgaggttgctgcggttgcaagcccaaaccaaatccttggccagcatcttgacgacagccatcggagtcctgatcctggaatatctccagcagaaagccattggacgtggtgctgctcgattgtccaatgcgcatgcgcagcgccttgcgaccctgatcccaatgcgatttgtggacatagccggaacgacagccgcaatagcgctgaccatccagctccagaaagtcaccattgcaattatgttggcctccaaaaccgccactatgtccgccgcccaatccaccggacactccaccaccgaatccgtcaccaaagctgcctccaattgaacctcctgaattctgaccgaaatcaaagaacttgaactgaatccgcagtcgacagacatttggtgagctcttctcgatgtaaaatacgcaatccctctgctgattgggtagcagatagttcaagactgtccttggaaatccgggactggagagatagaagtgattctgattgaagctgctggcacagcagagatccaactgaccaccaaactgctgcaaggtctgggcatcgtaatccttgagagtaacagcatgtggctgaaaggatgtggtctgatattgatcggaaatcaggggcaactcttgctgcagttgctgctgctgctgggaaagttgaagttgctgtggatgttgaacttgtacttgttgttgcagctgctgctgctgcaggacctgctgttgcagtcgctgttgctgcaggatctgcagttgtaattgctgttgctgcaggaatcggtgctgctcctgctgctgctgcaacagttgctgctgctggggagcacatggcggtgtgtactggggtggtaatcccgcaggcggtgggtataatccaccgggataaccaagacctggttgtaagcccaaattaaaccccaaccgatttggttgcgtatagttgaaagctggctccagttgcggctgatggctttgctgtggcaggtgatgatggtgatgctgggtgagcagcttcttcggaggcgacttggcgctcacctgcaccgtgtcgccatctacgtcctcctcgtcatcgtccagacccctggccaccaagtcctccctttcgcaggccaaacgcgtgatgagcaaacggaagccaccgttggttgtccaaggcgaatcatcgctaaggaagcgcagacgcaggactccatcgggggtgtgatactttttgatacccagcacctgaccgcacaagacctccatgtcgtcgccatcgttgttcaggccaatggccaagtaatcccgactgcagttctccgatagctccagcttgaagtccaagaactgtatgtgaaacttggtggggcagcggtagggagatcgcaccacataatcccagcaggtgttcaccggatagttgtccggatagttgggcgattcgacgagactctgtcgctgcctgtaaacaccatgtaagccgcactggggcagctcatcgtgcacagctccctgggcttcaaatggaatgacactcagtaccaagagaaggactattggcagctccatgtcgttgttcgtccgctggtaacgcgctcaaagacgcaactaactcgttgcggttcacgagacatcgatgtttgcctgccaaaaaataatattttacatgggtgcgtcgcaggtttcactggaaaacaatttgcacttttgtttgtggagtcgacaacaaaagcattcacttgtctaagactctctcattcataactcgcactttagttcactgaaccgcacgcaaaactttggggcggacaacatgttttcgaggtgccaaaagcttcataaaactaccaatccattagattaaattccaggcggtacatcttttggggatgattcatgtggcaggggttctctactcgtttacaatcatatcatcatcttcaagatcatatagtttatcatatcagtagagtactacaatataatgcataaactaagccaaataactttatgacgcgtgcttatgcgaaagtaaactttattatcaaatttacttaaccgtgaaatcaaaacctttatataaacacgaatattattatctttgctaaataaaactctcgcttaacaaacaatgacacttcaattccaacatagagtttatcttaagccaataaccaaaaacggaacttacataacttgccaacaaacatatgaatatagctatttcggatcgtgggagaccattatgcatacaaggcacgctcctaaaaaccgtgttaaacaaatatatgtcaaatgtatatcttaaaaaagcgcgcacatatcttttgaaatatcttcacccagagtatgtatgagattaaactggattagcactaagccacagcttctgtagatagaaattttatgcagagagtagattatttggctgctgagcaatttgaccaccacaagatagcagagaacatctgacattttctatatccatataataaaactgacttaacactaagctgaagtggtatgtttaaatcctccagctaataaatcgagactaaacgccctatcttatagtgatatataatagtatctatatgtgtattgtcattt

SEQ ID NO: 15956 - DNA, 2094 bp, DROSOPHILA
agttgcgtctttgagcgcgttaccagcggacgaacaacgacatggagctgccaatagtccttctcttggtactgagtgtcattccatttgaagcccagggagctgtgcacgatgagctgccccagtgcggcttacatggtgtttacaggcagcgacagagtctcgtcgaatcgcccaactatccggacaactatccggtgaacacctgctgggattatgtggtgcgatctccctaccgctgccccaccaagtttcacatacagttcttggacttcaagctggagctatcggagaactgcagtcgggattacttggccattggcctgaacaacgatggcgacgacatggaggtcttgtgcggtcaggtgctgggtatcaaaaagtatcacacccccgatggagtcctgcgtctgcgcttccttagcgatgattcgccttggacaaccaacggtggcttccgtttgctcatcacgcgtttggcctgcgaaagggaggacttggtggccaggggtctggacgatgacgaggaggacgtagatggcgacacggtgcaggtgagcgccaagtcgcctccgaagaagctgctcacccagcatcaccatcatcacctgccacagcaaagccatcagccgcaactggagccagctttcaactatacgcaaccaaatcggttggggtttaatttgggcttacaaccaggtcttggttatcccggtggattatacccaccgcctgcgggattaccaccccagtacacaccgccatgtgctccccagcagcagcaactgttgcagcagcagcaggagcagcaccgagtcctgcagcagcagcagctgcaacaacaagtacaagttcaacatccacagcaacttcaactttcccagcagcagcagcaactgcagcaagagttgcccctgatttccgatcaatatcagaccacatcctttcagccacatgctgttactctcaaggattacgatgcccagaccttgcagcagtttggtggtcagttggatctctgctgtgccagcagcttcaatcagaatcacttctatctctccagtcccggatttccaaggacagtcttgaactatctgctacccaatcagcagagggattgcgtattttacatcgagaagagctcaccaaatgtctgtcgactgcggattcagttcaagttctttgatttcggtcagaattcaggaggttcaattggaggcagctttggtgacggattcggtggtggagtgtccggtggattgggcggcggacatagtggcggttttggaggccaacataattgcaatggtgactttctggagctggatggtcagcgctattgcggctgtcgttccggctatgtccacaaatcgcattgggatcagggtcgcaaggcgctgcgcatgcgcattggacaatcgagcagcaccacgtccaatggctttctgctggagatattccaggatcaggactccgatggctgtcgtcaagatgctggccaaggatttggtttgggcttgcaaccgcagcaacctcaaaggggattgggtttgtggccacaggggttacagcctcagttgggcttgcaacctcagttgggcttgcaacctcagttgggattacccccgcaaaccgcacaaatgtggccgctacaacctggttatcctggctatatcagtggatatcccctacccttttcggccactccctaccgaacggcgagaaggatatcctatgcccggggcatcgatgctcaacagccatcgagagtggtggaaactaactccactcgcaaggagttctattacttcgacggcgacgaggcctttgcccgttctgctgtggacgatgaggatgaggataaggctcacctgggcgtcacaactcagccacagtcttcgtcccaatccatagttaagccagagtcacctctggttacgaaggcctttgagcaaagcagttgctcctttgattacatggaggtacttaaactttcagtcgacactctctggttaactaaacccttgtgcttttcgccgctaagaagttggttcccaaacatttttggctgaaggtatattacaagctgggcaa

SEQ ID NO: 15957 - protein, 676 aa, DROSOPHILA
MELPIVLLLVLSVIPFEAQGAVHDELPQCGLHGVYRQRQSLVESPNYPDNYPVNTCWDYVVRSPYRCPTKFHIQFLDFKLELSENCSRDYLAIGLNNDGDDMEVLCGQVLGIKKYHTPDGVLRLRFLSDDSPWTTNGGFRLLITRLACEREDLVARGLDDDEEDVDGDTVQVSAKSPPKKLLTQHHHHHLPQQSHQPQLEPAFNYTQPNRLGFNLGLQPGLGYPGGLYPPPAGLPPQYTPPCAPQQQQLLQQQQEQHRVLQQQQLQQQVQVQHPQQLQLSQQQQQLQQELPLISDQYQTTSFQPHAVTLKDYDAQTLQQFGGQLDLCCASSFNQNHFYLSSPGFPRTVLNYLLPNQQRDCVFYIEKSSPNVCRLRIQFKFFDFGQNSGGSIGGSFGDGFGGGVSGGLGGGHSGGFGGQHNCNGDFLELDGQRYCGCRSGYVHKSHWDQGRKALRMRIGQSSSTTSNGFLLEIFQDQDSDGCRQDAGQGFGLGLQPQQPQRGLGLWPQGLQPQLGLQPQLGLQPQLGLPPQTAQMWPLQPGYPGYISGYPLPFSATPYRTARRISYARGIDAQQPSRVVETNSTRKEFYYFDGDEAFARSAVDDEDEDKAHLGVTTQPQSSSQSIVKPESPLVTKAFEQSSCSFDYMEVLKLSVDTLWLTKPLCFSPLRSWFPNIFG

SEQ ID NO: 15958 - DNA, 4432 bp, DROSOPHILA
tctgaatacaattaattactataattagattatcgtaaacttatatttgataaggatagatggactcttttattaacttgtcagtcgaaaaattaaaaccataattttattaggttttcttttttatttctagcgaattttgtattaacagtttcataaagttcaagggtcaaaagtcatcatgcaatctttttatttcaacaataaatatttctgggactagaaaaacaccagatgagaaaatatcagattagatctagataatttattcgccccgtcattaccagcttatttaccaatcgcaagtcttatcaatatcgtactatgttcgaattctcccagttggactagaaaaaaaaacgcttgtgaaattcgtttggtgaaagcataaatattgttattatatataattgtgggcgtggcctcagcttatggcgtgttcggcgatcgcgccacctcaatatgttaattaggtacacatgtacctataaagacttagagatatttatattaaagtcagacaatggatctattaaatatgagaagaaaaatccaaaaaaacatcacgcaattgctattttaatttggaagtaaatggcattgactgagtagataagaatggtagacgtttcaagataatcagagcgagcctccttcgcaacaaaaaaaaaaaaagattggcgcccaagttcaaatattatctaagctttaacatgtcagttcgactatcgttatcgatagtaccgcacgtaccagctgattttgaattcgggtgaagttgaataaataagcttaatgccacgcgcttttctaatttgtattccttatcaaaacaagtcggccgtgaactttaaataaaagtggctagcccgcaatagtggaaaagtttttcgccagctgataaacgcaacagttgtcattcggaagagagggacaatgccacccgcaatgcgaaagcgattgacaagtcagccggcgataacgattacatgtttacgcgttcgccgagtgcttattgttttttatactctcgttacattattaattaaaacacttgcttttaagtgtgccgagtgttgtgagagcagcttatcaaagtccgaggttctaaatcttatctgactgggcatttagaacgttgtgattacgccgattgcgcaacaatttgacgattgtacgccacccaagagagtcggaaactgtagcgcttaacggcactttacagttatcagttacggttagagcgcgtctgacgcccacagcatttaattttgctttgtccgaaaattgttctctttcccgggactccagtgtcatattgtctcgtattgtttcacattggtgacaaacactatcgtctctcgtttccagtcgtcggtcggttcattcataataataatacccacatccacaccaatccggttgtaaaatgttcgccctgcgccgcacagccgcaatgatgacgtcggtccaccggcagccgcatctcagccaggccgtttttcgggccaatttcgccatcagcgccgcggtaggtcctccttgtatcctcgccctctgtcgctctaaatctctttgcttactaaatttcggaatagggtgggtcgatgagcaggagaaaaagatattttgaattttttgaagtcggtctcaatattaagattataaacaatcacgtagtcacctgtgctgctagcatccgataaataggattactatatttactgtttatacaaaaaaattgaacaattttttcttaaatttataacctatgaatgcaaagtagagatattaacttttaggcaagtaccttaataattacgtcgtcacgacgaaatattaaatattacaaagtaaagataagggattacttttgaaacacggtgtattttaatttccatccatcaatatcgacccaccctatcccaggctgatcaaagtttactttgctttgaccagttgtcagtttattatcgtcatacatataagtttcgcctgtatcgcctgtgcttaggaccccaaaacccataagatatccatggataatgaaaggatgtccgccgtgagcgaggtgaataccccaataccgcagcattcagacacaaatccatttttcatgtagctaataagattcccatcctgcccttcaagcactcaagtgtggtatgctctcccgaacagatggcccagaagatcaaagccggtcccgttgtggatgtcctcggtgacgagatgacccgcatcatttgggactccattaagagccaactgattctgcccttcctggacattgagctgcatacctacgatcttggtattgagaaccgcgataaaaccgaggaccaggtcaccattgactgtgctgaggccatcaagaagtacaacgtgggcatcaagtgcgccacaatcactcccgacgagaagcgcgtagaggagttcaacctgaagaagatgtggaagtcgcccaacggtaccatccgtaacatcttgggaggaaccgtcttccgtgaggcaatcatctgcaagaacgtgccccgtctggtgactggctggcagaagcctattgtgatcggtcgccatgcccacgccgatcagtacaaggccgtcgactacgtggttcccggacccggcaagctgaccctcacctggaagggaaccgacggtcaggtgatcgatgaggtcattaatgacttcaagggccccggtattgccctgggaatgttcaacacggacgattccattgtggactttgcccacgcctctttcaaatatgctctggaccgcaagctgccgctgtacatgagcaccaagaacaccattctgaagaagtacgatggacgcttcaaggacatattcgaggacctgtacaacaagcagtacaagaaggagtacgaggcggcgggcatctggtatgaacaccgtctcatcgacgatatggttgcttatgccatgaagtcggagggtggcttcgtgtgggcctgcaagaactacgacggtgatgtgcagtcggactccgttgcccagggctacggatctctgggtctgatgacctccgtgctgctatgccccgatggcaagaccgtggaggctgaagccgctcacggaacggtgacgcgtcacttccgcttctaccagcagggcaaggagacctccaccaaccccattgcctcgatattcgcctggacccgtggcctgctgcatcgtgccaagctggacaacaatgagccactgaagcagttcgccgacacccttgagcaggtgtgcatcgacacaattgagagcggcgccatgaccaaggatctggccatctgcattaaaggcaacatcaacgccgttactcgcagggactaccaggagacttttgagttcattaacacgctggccaagaacctggagggtgccctggccaagaatgccgttgctgccaaatgactatccggcactcagtccgagcagcaggcctcgcatctctagaaaactactcagcgatgccttgtcctcgtcaccatattcacaatatttccattcgtttttgtagatgtgcatgtcctaggctaaaaatccgtgtcctcgatgcatgtttcccactgtttcattgtctctgcgagacgcaaaaaaaaaccctgatttccctttaacgtctaacggaaaagaaatttcaaataaatgtatttttataccggactcgagaggtctttaacccagtcgagggtgggctcgttacgaggcccggtccacttgtgcggcttctgatggctctgggtttattggatttgccagcgaaatggccacagttgtgttctaacacttggcggcaccagaccgagacggttcaagcggaaggggctcaggatcctgttagaaggacgaaactatcgatgctagccgaagcattgggctatggctacctgctggcctacgtgatctgcctgctctgctggccaggagaggcgtatcccgccagcagtagctaccgggatctggatatatgcaatcattgggacggaagacgtcacttcctggaactgggaagtccagctggagaggtgcacgccaggaatgtgactactactgcctatagagtaagtgtatttacaagcttctccagacgggatttggtcagcaattatgaacttaaaaacagagctcgccgctggtttttaagaacgatgcagtggccggggatgtgtggtaccagtgcagcctggagctggtcacctgtgccgagtgcgtcatccgagtggccttcacctatgccaacttctccaaaagttgcggcaatacgggtggcaagtccagcatgtgtccctgcgagcatatccagttctcggagccgccctatgattccaccatttccggccaagagttctgtggagatggcaaggtgtttcggagcaaaaccaggacactgcagttgaaattcttctacaga

SEQ ID NO: 15959 - DNA, 1782 bp, DROSOPHILA
ttcgccgagtgcttattgttttttatactctcgttacattattaattaaaacacttgcttttaagtgtgccgagtgttgtgagagcagcttatcaaagtccgaggttctaaatcttatctgactgggcatttagaacgttgtgattacgccgattgcgcaacaatttgacgattgtacgccacccaagagagtcggaaactgtagcgcttaacggcactttacagttatcagttacggttagagcgcgtctgacgcccacagcatttaattttgctttgtccgaaaattgttctctttcccgggactccagtgtcatattgtctcgtattgtttcacattggtgacaaacactatcgtctctcgtttccagtcgtcggtcggttcattcataataataatacccacatccacaccaatccggttgtaaaatgttcgccctgcgccgcacagccgcaatgatgacgtcggtccaccggcagccgcatctcagccaggccgtttttcgggccaatttcgccatcagcgccgcgatggcccagaagatcaaagccggtcccgttgtggatgtcctcggtgacgagatgacccgcatcatttgggactccattaagagccaactgattctgcccttcctggacattgagctgcatacctacgatcttggtattgagaaccgcgataaaaccgaggaccaggtcaccattgactgtgctgaggccatcaagaagtacaacgtgggcatcaagtgcgccacaatcactcccgacgagaagcgcgtagaggagttcaacctgaagaagatgtggaagtcgcccaacggtaccatccgtaacatcttgggaggaaccgtcttccgtgaggcaatcatctgcaagaacgtgccccgtctggtgactggctggcagaagcctattgtgatcggtcgccatgcccacgccgatcagtacaaggccgtcgactacgtggttcccggacccggcaagctgaccctcacctggaagggaaccgacggtcaggtgatcgatgaggtcattaatgacttcaagggccccggtattgccctgggaatgttcaacacggacgattccattgtggactttgcccacgcctctttcaaatatgctctggaccgcaagctgccgctgtacatgagcaccaagaacaccattctgaagaagtacgatggacgcttcaaggacatattcgaggacctgtacaacaagcagtacaagaaggagtacgaggcggcgggcatctggtatgaacaccgtctcatcgacgatatggttgcttatgccatgaagtcggagggtggcttcgtgtgggcctgcaagaactacgacggtgatgtgcagtcggactccgttgcccagggctacggatctctgggtctgatgacctccgtgctgctatgccccgatggcaagaccgtggaggctgaagccgctcacggaacggtgacgcgtcacttccgcttctaccagcagggcaaggagacctccaccaaccccattgcctcgatattcgcctggacccgtggcctgctgcatcgtgccaagctggacaacaatgagccactgaagcagttcgccgacacccttgagcaggtgtgcatcgacacaattgagagcggcgccatgaccaaggatctggccatctgcattaaaggcaacatcaacgccgttactcgcagggactaccaggagacttttgagttcattaacacgctggccaagaacctggagggtgccctggccaagaatgccgttgctgccaaatga

SEQ ID NO: 15960 - protein, 450 aa, DROSOPHILA
MFALRRTAAMMTSVHRQPHLSQAVFRANFAISAAMAQKIKAGPVVDVLGDEMTRIIWDSIKSQLILPFLDIELHTYDLGIENRDKTEDQVTIDCAEAIKKYNVGIKCATITPDEKRVEEFNLKKMWKSPNGTIRNILGGTVFREAIICKNVPRLVTGWQKPIVIGRHAHADQYKAVDYVVPGPGKLTLTWKGTDGQVIDEVINDFKGPGIALGMFNTDDSIVDFAHASFKYALDRKLPLYMSTKNTILKKYDGRFKDIFEDLYNKQYKKEYEAAGIWYEHRLIDDMVAYAMKSEGGFVWACKNYDGDVQSDSVAQGYGSLGLMTSVLLCPDGKTVEAEAAHGTVTRHFRFYQQGKETSTNPIASIFAWTRGLLHRAKLDNNEPLKQFADTLEQVCIDTIESGAMTKDLAICIKGNINAVTRRDYQETFEFINTLAKNLEGALAKNAVAAK

SEQ ID NO: 15961 - DNA, 13003 bp, DROSOPHILA
ccagacccaatgttggaaattatgaatggcgtgggaattcgttcggcggttaaaaactttgaaggtttcttaatttttaatataaacatcattaagaataaaaagcttcaggatgtcttttactatattgtgttttgaaaccttttaattttgccttacctacacatataatattatataattggcaatactccaattttcaggaataaaatttagaagggtcgcaaatgaactaaataatttattttagttttaatttatttacctatgtatatactaccaaaaactagttaatcttgtgccttagttatttaaaaaaacgccaaaatgatgatcatcacaaatgatgcaaaggatataagcattttctctaataatgttgagtttatttgtatgttcacgaactaatccatggtaacaaggtgacatgatttacacaacatctatcatttgtaagctgataacttaaaattgttatcttatctattatatccgttggaattcaaacttacaaattactaataattcgatgttatttttgtgcacaaaggtttatatacatatacatcgtaataaaatgcttctacccggcaaacattttggtcgcgctgccaaaaatattacgcccacaattatattttttttttcatattggtatttctttttttaaatgtcaatatgccaagcgcactgtaacgcccaaactgttgaaaaaagttttagaatttgatgccaacaacctgttgaactttctccgtcgcacttcaacttgtataatataaaaggcaaattcggtaataagttatttatttagtaactatgcagtatgtatacatcactttgagtaaatgatgactaatatataatattcctatatgcattgttatattattacattatcgaaatgtttatttacagtttcttttactaataaaatgtacaatttccttaaaaagttcatacaaaatttaatatttattttaaacaaataaacgaaagccagaatgggaaattaggcattttaaataaaaagtgaaacagaaagagaaatttaaaacaatggcatatcaacaagaagcgtttgactaatatttacagacaaccccgtaacatttgacaactttttacttaaaatctatctccagatccacgtcctttcgctcgtgccaattatattgccgagaacatagagtagagctgttagtatgacttgccaaaagtgcatgaagctaaacatttagagcagttatgtgtttgcggagctagtggacgtcggattcgatgaggacggagctgctggggctgccaaattagttggaagctgtgcggcagccgcagaatagtaagctgcattagctggaacgtttgtgctaatagctggaaaagaaaggactgttttcatatttttctcataggatcacaggcagaacatacattggcgcagtgccttttggaacttttcgtattccacataatgtttaagacgcagctcgtcctcttcgatgagttgtctctgacgcaacagcaacagccgttggtgctggttagtacccaagcgcgtattgcacaattggttcactaatgagtctaaattgtgctttatatcctacagagagaacagttgtgtttattcatttaagacaatatggatttttagttgttcttacggattgaatatcgctcggtagcagatgcggatgcgtagctgctaaagagacaggctcttcggtaactgcaataaaggatacaaaagttgtagagttctcatgcgtataatttaaatacgaagtgacaaactactcaaaattgtgaaaaataaatataaacaaataaatatcatggatttgtttaccttcaccggacgttgcattgaaaatcggttgcataacgtgttgcatgggctgtgctggctgctgggatgccatcaaaggggactgctgcaacaaatgatttggaactgcacctgcgaaattttggggtgctgccacacgagctccagtctgctggttgtacattccgggcacgttttgttggtgcatatgcgactgcatctgcaactgatgctgttgttgcgagatcatttgctgttgggctcccatagtctgcatgggtggaagctgatgcggcagatttccctgagccatgctcactacctggggcggaagcgagtgaagttggttgggctgcgactggatgaactggtgctgaggatgagtctgttgtgtgccaggcaaattaaattgctgtgatccttgctgggatccctgttgctgttgctgctgcattaggatctgctgctgctgttgttgcgaaatgataggcatttggttatgctgctgctgctgcgactgaatcgtctgcatcggtaaggattgttgtggtggctgctgctgaagagtgttaaccatagatgggtgcccattaagtggcgtctgctgtggctgttgagtcatatttggatgtacgctctgctgctgtggctgtaggttagacggctgttgcacgtgggtgccattttgattgaccacttgcggcactacaatgcactgagtccctgctccacttgtagtagttgatgttccacctggcaactggtgtatctgctggggctgttggtacatcaactgaattccgttaatggccagcggaacattttgaataggagagctgatgacttcggttggagtgttgaccacgctgccgttctgaacggagttgttggtctgcacctggcctccagggccggcgacttggaggtcgatcttaagttgaccttgagctggttcctcaactccggttgaagttttctgctcctgcacacgactgacactaaaacgcgaaattttacgcgcgcttggattgactacctcttcaacttgtttaggaaccactgacaacgttgctgttgcagactaaaaattaaagaagttagaaataagtaaaaatgtatataaaaaataaaaaaaaaaaactgttgggttcttgcctcttctgtgttttcggtatttcgcaaagctgccaatttcttttccaaatcagctattgaattttggttaattgatccattgctgggattcctttgcggaggatcactgttgttcgttaaaatggaagtggcagaaggcttttccaaactgggctgcttggagagttgcttctcatgacccgtagcaatggtaattccaaccgatgcctcagtcgggatcggatccgggttgctcactgtcccttcaagattagtggcagtgtgcaggtgcatgtcggatcccacgctgttgtcgatggatgtgcgacgtgagttgtagacggaggagcctgagcccctggcggatgttaaggctgcagtgggagtattctgacccactgagggtactgaagggcctgctccgttatttggcttggttatctaagggaaaacaagatatttattataagaaacatattcaaaaaaaatgtaagcactttaaaataataattaatgcagggtatttgaaaataaatacacttgaatcttaagttaaatgaaaattcggtaagtgttccctcatttgacgagattttgttttacaattttgtagcctagcattatggtattaacactggcaaaaaaaaaacgagaaaccccctttaccactgctcgactattttgtaattattaattacctcttgtgtctgtggttgtccagaagtggcctttagggaggacattgctggggaagcttgatgaggagctctgttgttaatcgaggccactacagcggaggcaaacgcgtgggcatgagtaatgttctccagttctatttttaactgctctagagtgttggccgctccagttccctggttgcctactgcctgtccggatttatcttttggtttctccgcttccgcttctgtggcctgctgagcgttttccgaagtgtccaatgcagccttgttgggcatgtcaaaggttattttcactgcggtcaaatcgtcaagacttctagtatgcttcaagtcctcttgaattttcaggtgacgattcaagggcaaattcaggctgcgaggagcaccattgccggccgactccaagagcttttgcattctggctatagcaagggagcaaggttttttatccttgccatcgtcaagcggtggctccggaccagttggagtaatgttgctgtcgggcatatagtcaatcgatagcgaagtgtactccgaggccgtgctcgtttttcgagaaacggaaccagagccgatggtcacgtcattgctactattgggcgcatccctcgatgcggttgatgaggaagacatagtcgaagtggttgtgggcggagtgctgacgttcagctgtggttctttcgcatttggtatgttggataaatgggacctggcctctaaagtcaagttgcagtttgactgttcagcgcctcctccaccggatggcagggtttcaacaccatggatagtgggctcgaacatctttgtgatgtcgctggcggtttcatcccgctaaaataagtttgttaaatgtgagttataaaagtcaagcaaatttgtttgtgaatatacattattactctaaaaaaaatttattcaaagtggaacttaaataaaacaaatatattattataaaacccagttttgattatcaaaaaagagcagaagaaaaaagtaatcatatccctggataaagtttttcaaaataaaatctatataagttcaaactttaatattacttttggtttgtgttggggccttaaaaagttaaattgataaaaagttgaattaaccaattatacagactttcaataggataacaataacttattttgaatgaatgatttagttctcaaatgatctatttttaatgacctcagtacaaagtatctaataaaatgtaaaacgtaaaggctatataaaaatgttaaaaaaaaaatgtacaatttcttcaagaaaatgttttagttatatagttatagttgaaaatcgaatgttcatagttatctgtaaaatttgtaaatccgaaaaccttttataattagagcataaaacgaacaagaaatgtaactataaacgaacttcaacttaattaacttttgagttgtctaacaatgaaaagaaaatccttgtaagtaaagaaacattttaaatttagctaagaaacaaaaggtgtttacataagcccagtgcacacaacacttacagatctatgtctttggtgtgacctaaacgtggaacgctgtcgagttagagacgcgtgtcggacctgttttattatagtagggatagacaatcaaaaaacatggattttgtgatattgatattaaatcgcttagtcaagtaatttacgaaatcttgtgagcattattttctcgattttgaatagctgcttttcgtaggaaaaggaaggagttggttggactcatgtagcagtataaatactgatataatttgaatagttaacgaaaacttgtgttagatgaaggcaaatatcactatatttttgaaaattactcgtgatgcttgatgaagtctttaaagattcaattttaattaaaggatcggactactactgcaactggttttaatttgggtaaaaataggtgcggcgtggaaatttgttaccattaggagcacaaataagaagggctataaaagtaatctttatctatatatagttgctgagttcttagaaaaatcggtgagtcattatattcattacgggttgttcatccaatgaaccgtgtccttctgtgcgcttaaagaaccctaaggcctcgtaagaatagtcttcattgagcaaaaaatttatgtggaatttattttgggatagcgatgtaccttttcaatattgcggcgataatttgtcggtatagggatttgattgggattctgtttgacttggtcaacaatttcattgatcatttccacaaaaactgtactttgacaattagaaagcaaatcttgggcgatctgaaagcaaaagattttgatgattgagttttggttagagcaagaaattgtcttaccaatttattggctatttcaaccggatttacgtctcctatgtcgaatttaaatgtaatcgttttaagtttattttccatgtgacagtttatgacgctgccctcgtcgacgctggttacactaagtttgggaatccgttcgttgccgctccggtttgatcgcctcggtttctgggaacgtgtgcccgtgcctgtctgcttttgctgcttttccgcatcagcagagttctggggttcggtcttcggtgcaggttcgagggcaccgtgggcgctatttagggacattgcatccgttgcgacattcgcatctttgttgacctgtattggctgcagattttcctgttgaacaggcacttgcgaagaaatctgtgagatttgctctactgcaggttgctgctgtggtggttgttgctgaaccacgtgtgtttgctgtgtctggggctgtggttgctgattctggggctgtggttgctgttgctggggctgttgcaccaaaggttgctgatgttggaccgaaggctgctgatgctgaaccagcggttgctgctgctggaccaaaggcggctgctgttgtaccaaaggcagttgttgctgttgcaccaagggctgttgctgctgttggctcatggcctgttgttgctgggctggctggctatgcagcaattgctgcaattgttgttccaaaggcattgatagctgaatgggttgctgtgtgggctgttgtataaatggcgctgcctgttgtggtacggccgagaatccaggatgctgttgctgttgggcatcactgagcgttacttgtccgccctgctgattgtaagtgtgttgtattggaggagccacggacgtcggtggaacttgcatctgcactgggatctgaataggttgctgatgttgatgcggtgccatgacttgcgatcccgtaacgagttgctgatgttgttgctgaggcattgcctgcgcatactgctgtacgaattgctgttgctggagttgttgttgttggagttgctgttgttgtatttgctgctgctgttgcagttgctgttgttgaagctgctgctgctgcagctgttgcagctgatgctgggccagttgttgctgcattatctgttgctgatgtgaaacggccacttgttgttgctgcaagatctgttgctgaatttgaagaggctgcgaaagctgttgctgttggccagcttgctgcattgcataagcttgttgcatgttaacggcctgctgaggctgttgctgctgctgctgaaaatattgctgggcctgttgctgagccatttgttgctgttgagtcaaatccggagcctgcacgttagtatgcataagctgctgcagttgttgctgcagtggctgttgttgttgctgtggctgctgctcatgtggctgcggaggcaatacagtttggggctgttgcacttgaacttgctggggtatttgctgcatcatttgtggttgttgctgttgttggttcacttgctgctgcggcatgacctgatgattgactgttggtgccactacgggttgttgctgttgcatttgttgactgcctgtcggcgaaatgacctggttattggtcatctcctgcatcgatgcattcgaattttgataagaggccagctgtggcggttgaatgtagtgcaccgtcggcttctgttgcatgggaatagccggtgacggaatagcctgtggttgcaccgagatcaactgggaaacaggcacttgacctgggacctgaacaggttgctgaatgccactgttcggaatcgaagtgttcgagcgagtggacagctgctgcggttcgacgctgttcgtggatagagccaggcttgtttctgaatcagtgttaagcaggtcatatcttagctgcaggcgctgattccatttaacaccatcctcctcgtcctcggactcctcctcctcttcctcgtcttcatcgacgttagtcggcaaactctcacgttgcttttgcaatgccaatttttccaaacgagacttctcgttttgcagcttgatttgagtttgacgctgggcacgttccttaagcaacgacaccacctgcacttttaaaagccgagctacagcgcgagagtcgtcctcagatataatattttccttcatcatttcttgcgcaatctgttcgtactcgtcatgcctgatgttgtactcaaactgaattgcctcgttttccttatgacgggacgagcgcttcttgggatccataaaccgcagtcggaactcgatgatgctgatgctcggatcagaaaggaactgctccgaagcagttggctccactcgtataccgatatcttcgtcaaagaactccgattctagcagttcattgcagctggggcgatcctcctttttaagttcaatgcaccgttcgataatgtcgcgcacgttgggatcctccaccttagccaacgccgctggcttaatgcccgatatcacctttttgtagatctgtgcaggacccttgcactcactgtaaggatattcggaaatggccatctccaacatgcacatgccgaatgcatatacgtccaccgactcgtcgtagtgctcctcgtacatttccggggccataaactccggcgtaccaatcacagatttcgcgtgggagcggtttttcaaagttgccaggcccaagtcgccgattttaacactaccagtggtgccagttataaaaatattatcacatttcaaatcacgatgaattataggaaattgacgagtatgcaggaagttaaggccttttagtatctggcgacaccatgacttcaatacctttgggtgtatttttttgaatcgtttcaaatagctataaggaaataagagtttatgtttacaattcgcccattaaaatccatgtttacgcttacgatttcaaagttccagataacattagttcggtgactagtacaatattcttcttgcggccaataggaaactcccaatatgtataaaaccgcactatgtttgggtgctgaagtttcttcagcatgtctgcctcctcgcgaaatctagtacgttcacttttttttacttgcttgtcctgtaaaataggtaaataaaattgtacattttcatgttacctaatgattactttaattgtgatgatccattatataaaaaagattactcaatcaaaaattcatgataattattatctatctgataacttgcttatgcaagcttgtgatcatgtttgctttgactaataataataatacttatacatatgcccaatggcacaacaataaacttaagaagttttttatcttaccaataactcgcaccaggcaactggaacaccagtcaacgtgtccaggccacgatagacagttttaaaggaaccgcgtccgacttccttatcgtacttaaagaatcgtccgcacggcgacatggccaccggatcatcgtcctcatcgctcttactcttggttatcgatgtagctgaagatgtggtggagaccagcgacgtggagggcaggggagatgcagatgcatctgtcgaggacccggtgacagcagcttcctctgcgctagcctcggagctctccgcttttttggttatgtcgtcgaagctctttgcctgcttttcgctctgaacttcggtatcgtccttatcctctacttgaaagccaactcgttttacgccgcttgagtgcttggtagaagacttcaatggcacatcgtcttcagtcttttcgattgtaagactccgtgacgcttcggttataatgttgtcgatgattccggccacatggtgggaagtggcatccgtagcattggagcgcgtaggcgtgcggaactgctcctccagatgctccgcctcgcgggaaagcatctcgatgttgtcgtcatagtcacgaggaaactctgtctcgagttcaacgaactgcagtggattggtgttcctgcctgactgttccacatttttacggacgaatcgaatgttttgcacgaagttcgccgtcaaagtcgttggcgtggtctttgacgagtgcagtggcgcctgctgcttgatcaatggctcgatcaccgtgtccgaggaggactttctggcctccattttcttggtgtctgaaacaaccgcttgcgacgtccccttgactgacttgtcttttttaggtttgcccgaagtaagaccagctttctggttgcttatggcatctgcaggttctattttgctatccatttcgtcctcattctgttccctgctctggttgtcctgagagcaaagcacctctacatcggttgattgctgtttgcctaaatcgccgttgttgttatcgttgactttcggtacgtcgtccacgtttttcgggcttgacgccgttttgccgggaagggtgttatttgaaaagcgtcttagcacccgcacaaataggttacttttgctggcagctggtggtgtaggcgtggtgttcagcgtgggtagagaagaagctggctcgataggtgatgactggattgaagtggtgctgctagtgctcgtgtgtgcagaaagtgtgccctgcttgcaagtgggctttctgtttagtgtgtcttttagttttgatgtcgggttcggcttttgcctagaggaggcagatctattaaacgaacggtgtcccgacttttgtatattagctccctgcacagtttgctcctcgctagaaattgaggtattcctaaaagaatgatagaagtagttgattagattctatagactcacaggtacaacagtcgagttttccacagttctcagtaaacttccttccaagaacattttataaacattcgataaacgaaaaaacggtttcagtttacgtgttgtttatctagtaagttttgcttaaaacagagacgttgaagtaacaattccagttgaagcatatttaaaaattagtatcctagggaaacaaatcctttgtaggatacttggtcagtttaacacactacatacaaggatattttaaaccagcttttacgttatttaggcatatatgaaacaacgattgttacttcaatcattttttgttatgtgccctgatttaaataaaaacaatatttaaataaatagagatattccctaaatgttttggcaatgactccaactcacctttgaggttgcgtggtgcaggaggtagtaccatcttcgctgatggcgcttcccttccgagcacggttcgcaggtacgacctcttgttgtcgtacgaagtcgcagagggtttgtccaattttgcaagatttttagcagcagaccaccacgtttaatctgaagcgagaggcaaggcggtgaatgagtacatgaaggcatggaggaatggagcaaaggttaaattccggcactattgacaggaggaactggcttggactggggcagagacatgggcaggggcaggagcagggaaaggtgaccattcccacacccacttatgttcgttgcttggtgccgacgtctgaaatatcgcttacagctgggtggaggaggtagtggcgccgtctccaggaggccgaggtgtgcgctttccatgaatcactagtttcgattgcactacgttcgtcactggctctgccgttccactctactctgttctgttctgtcgcgagggatatgtgcgtatgtgcggtacgctggctatacatacatatttatgtacatttgattcgggacaggaagcatatgcagcgactatgatgtcatgtttccacgccgctccttccggaagtccttcgctcgacgggatcgtgctcgagttggggatttacgaccgggacggggtctagggctcgcactgcgactgtcggatcgttcgcatcgaggatttcaatttgtgattgtggtgttcaaaggcaattcgagctagcaagctttcatattacggcacgggggattggtaagtctttcgggagatagtgtcacctccacaaggggggtcaattggattgaacgcgtgcgagagtcagcggaaaattgaagttatttcgccagaagttccctttactttcacaaaaaattttacaaagcaactgggtttacttgtgttcgtgatctatcgatagcgcatattgttacacaagtgttatcggcggtgatgccacccaagctaccagcttgcctaatatatatgttacgcattagcagagatgttacctggcctctgttaacttgaacagtagaccgttactcttcgaacgagttataacattgttaagaatactgtataacctttaagcattaagccacttttttaaatttcattttgcctgccataatgaaacagattacaaacagattacagctgtaaaaaccacacctaacaaagtcttaataaattccaaacccttatacaggtttcccttattcagcaagaagatgctcctgtctcttttgttttgcccctaaggcaaaaagcccagatagtctcttattttatatatataaatatgattttcgataatgttttcttgcaattcgttaatttatttattataactaacttctctgaatgatttttgagatacatacaaatatattgtagaacttaaatatacatgcactaatagtttataagttatcactttaatgaataggaaagctataagtgcacgatatttttatacgtgaacaacaaatcaaaatcactttttacaaaaccctacattttaccatttccactaaatttgcatattttgtaatcgctagaataaattaaattaaaacagttttttattttattttagtttaagagcaagatcctttactcttaatcgtcacacctggaatagaacatgttggtttaaaatatatacagacaatacatatattgggtatgaaactcttacttatattgaggcatgacgaatagcactgcagttgggtttcgcccgtgtacatgtatccgtcggatccacagattatttcatcgttttcatcgtacacattagcacatatcttctcgcagtagttttccgtgtcctttggatcg

SEQ ID NO: 15962 - DNA, 7567 bp, DROSOPHILA
gcgaaataacttcaattttccgctgactctcgcacgcgttcaatccaattgaccccccttgtggaggtgacactatctcccgaaagacttaccaatcccccgtgccgtaatatgaaagcttgctagctcgaattgcctttgaacaccacaatcacaaattgaaatcctcgatgcgaacgatccgacagtcgcagtgcgagccctagaccccgtcccggtcgtaaatccccaactcgagcacgatcccgtcgagcgaaggacttccggaaggagcggcgtggaaacatgacatcatagtcgctgcatatgcttcctgtcccgaatcaaatgtacataaatatattaaacgtggtggtctgctgctaaaaatcttgcaaaattggacaaaccctctgcgacttcgtacgacaacaagaggtcgtacctgcgaaccgtgctcggaagggaagcgccatcagcgaagatggtactacctcctgcaccacgcaacctcaaaggtgagaatacctcaatttctagcgaggagcaaactgtgcagggagctaatatacaaaagtcgggacaccgttcgtttaatagatctgcctcctctaggcaaaagccgaacccgacatcaaaactaaaagacacactaaacagaaagcccacttgcaagcagggcacactttctgcacacacgagcactagcagcaccacttcaatccagtcatcacctatcgagccagcttcttctctacccacgctgaacaccacgcctacaccaccagctgccagcaaaagtaacctatttgtgcgggtgctaagacgcttttcaaataacacccttcccggcaaaacggcgtcaagcccgaaaaacgtggacgacgtaccgaaagtcaacgataacaacaacggcgatttaggcaaacagcaatcaaccgatgtagaggtgctttgctctcaggacaaccagagcagggaacagaatgaggacgaaatggatagcaaaatagaacctgcagatgccataagcaaccagaaagctggtcttacttcgggcaaacctaaaaaagacaagtcagtcaaggggacgtcgcaagcggttgtttcagacaccaagaaaatggaggccagaaagtcctcctcggacacggtgatcgagccattgatcaagcagcaggcgccactgcactcgtcaaagaccacgccaacgactttgacggcgaacttcgtgcaaaacattcgattcgtccgtaaaaatgtggaacagtcaggcaggaacaccaatccactgcagttcgttgaactcgagacagagtttcctcgtgactatgacgacaacatcgagatgctttcccgcgaggcggagcatctggaggagcagttccgcacgcctacgcgctccaatgctacggatgccacttcccaccatgtggccggaatcatcgacaacattataaccgaagcgtcacggagtcttacaatcgaaaagactgaagacgatgtgccattgaagtcttctaccaagcactcaagcggcgtaaaacgagttggctttcaagtagaggataaggacgataccgaagttcagagcgaaaagcaggcaaagagcttcgacgacataaccaaaaaagcggagagctccgaggctagcgcagaggaagctgctgtcaccgggtcctcgacagatgcatctgcatctcccctgccctccacgtcgctggtctccaccacatcttcagctacatcgataaccaagagtaagagcgatgaggacgatgatccggtggccatgtcgccgtgcggacgattctttaagtacgataaggaagtcggacgcggttcctttaaaactgtctatcgtggcctggacacgttgactggtgttccagttgcctggtgcgagttattggacaagcaagtaaaaaaaagtgaacgtactagatttcgcgaggaggcagacatgctgaagaaacttcagcacccaaacatagtgcggttttatacatattgggagtttcctattggccgcaagaagaatattgtactagtcaccgaactaatgttatctggaactttgaaatctgttaaaatcggcgacttgggcctggcaactttgaaaaaccgctcccacgcgaaatctgtgattggtacgccggagtttatggccccggaaatgtacgaggagcactacgacgagtcggtggacgtatatgcattcggcatgtgcatgttggagatggccatttccgaatatccttacagtgagtgcaagggtcctgcacagatctacaaaaaggtgatatcgggcattaagccagcggcgttggctaaggtggaggatcccaacgtgcgcgacattatcgaacggtgcattgaacttaaaaaggaggatcgccccagctgcaatgaactgctagaatcggagttctttgacgaagatatcggtatacgagtggagccaactgcttcggagcagttcctttctgatccgagcatcagcatcatcgagttccgactgcggtttatggatcccaagaagcgctcgtcccgtcataaggaaaacgaggcaattcagtttgagtacaacatcaggcatgacgagtacgaacagattgcgcaagaaatgatgaaggaaaatattatatctgaggacgactctcgcgctgtagctcggcttttaaaagtgcaggtggtgtcgttgcttaaggaacgtgcccagcgtcaaactcaaatcaagctgcaaaacgagaagtctcgtttggaaaaattggcattgcaaaagcaacgtgagagtttgccgactaacgtcgatgaagacgaggaagaggaggaggagtccgaggacgaggaggatggtgttaaatggaatcagcgcctgcagctaagatatgacctgcttaacactgattcagaaacaagcctggctctatccacgaacagcgtcgaaccgcagcagctgtccactcgctcgaacacttcgattccgaacagtggcattcagcaacctgttcaggtcccaggtcaagtgcctgtttcccagttgatctcggtgcaaccacaggctattccgtcaccggctattcccatgcaacagaagccgacggtgcactacattcaaccgccacagctggcctcttatcaaaattcgaatgcatcgatgcaggagatgaccaataaccaggtcatttcgccgacaggcagtcaacaaatgcaacagcaacaacccgtagtggcaccaacagtcaatcatcaggtcatgccgcagcagcaagtgaaccaacaacagcaacaaccacaaatgatgcagcaaataccccagcaagttcaagtgcaacagccccaaactgtattgcctccgcagccacatgagcagcagccacagcaacaacaacagccactgcagcaacaactgcagcagcttatgcatactaacgtgcaggctccggatttgactcaacagcaacaaatggctcagcaacaggcccagcaatattttcagcagcagcagcaacagcctcagcaggccgttaacatgcaacaagcttatgcaatgcagcaagctggccaacagcaacagctttcgcagcctcttcaaattcagcaacagatcttgcagcaacaacaagtggccgtttcacatcagcaacagataatgcagcaacaactggcccagcatcagctgcaacagctgcagcagcagcagcttcaacaacagcaactgcaacagcagcagcaaatacaacaacagcaactccaacaacaacaactccagcaacagcaattcgtacagcagtatgcgcaggcaatgcctcagcaacaacatcagcaactcgttacgggatcgcaagtcatggcaccgcatcaacatcagcaacctattcagatcccagtgcagatgcaagttccaccgacgtccgtggctcctccaatacaacacacttacaatcagcagggcggacaagtaacgctcagtgatgcccaacagcaacagcatcctggattctcggccgtaccacaacaggcagcgccatttatacaacagcccacacagcaacccattcagctatcaatgcctttggaacaacaattgcagcaattgctgcatagccagccagcccagcaacaacaggccatgagccaacagcagcaacagcccttggtgcaacagcaacaactgcctttggtacaacagcagccgcctttggtccagcagcagcaaccgctggttcagcatcagcagccttcggtccaacatcagcaacctttggtgcaacagccccagcaacagcaaccacagccccagaatcagcaaccacagccccagacacagcaaacacacgtggttcagcaacaaccaccacagcagcaacctgcagtagagcaaatctcacagatttcttcgcaagtgcctgttcaacaggaaaatctgcagccaatacaggtcaacaaagatgcgaatgtcgcaacggatgcaatgtccctaaatagcgcccacggtgccctcgaacctgcaccgaagaccgaaccccagaactctgctgatgcggaaaagcagcaaaagcagacaggcacgggcacacgttcccagaaaccgaggcgatcaaaccggagcggcaacgaacggattcccaaacttagtgtaaccagcgtcgacgagggcagcgtcataaactgtcacatggaaaataaacttaaaacgattacatttaaattcgacataggagaccgggatgaaaccgccagcgacatcacaaagatgttcgagcccactatccatggtgttgaaaccctgccatccggtggaggaggcgctgaacagtcaaactgcaacttgactttagaggccaggtcccatttatccaacataccaaatgcgaaagaaccacagctgaacgtcagcactccgcccacaaccacttcgactatgtcttcctcatcaaccgcatcgagggatgcgcccaatagtagcaatgacgtgaccatcggctctggttccgtttctcgaaaaacgagcacggcctcggagtacacttcgctatcgattgactatatgcccgacagcaacattactccaactggtccggagccaccgcttgacgatggcaaggataaaaaaccttgctcccttgctatagccagaatgcaaaagctcttggagtcggccggcaatggtgctcctcgcagcctgaatttgcccttgaatcgtcacctgaaaattcaagaggacttgaagcatactagaagtcttgacgatttgaccgcagtgaaaataacctttgacatgcccaacaaggctgcattggacacttcggaaaacgctcagcaggccacagaagcggaagcggagaaaccaaaagataaatccggacaggcagtaggcaaccagggaactggagcggccaacactctagagcagttaaaaatagaactggagaacattactcatgcccacgcgtttgcctccgctgtagtggcctcgattaacaacagagctcctcatcaagcttccccagcaatgtcctccctaaaggccacttctggacaaccacagacacaagagataaccaagccaaataacggagcaggcccttcagtaccctcagtgggtcagaatactcccactgcagccttaacatccgccaggggctcaggctcctccgtctacaactcacgtcgcacatccatcgacaacagcgtgggatccgacatgcacctgcacactgccactaatcttgaagggacagtgagcaacccggatccgatcccgactgaggcatcggttggaattaccattgctacgggtcatgagaagcaactctccaagcagcccagtttggaaaagccttctgccacttccattttaacgaacaacagtgatcctccgcaaaggaatcccagcaatggatcaattaaccaaaattcaatagctgatttggaaaagaaattggcagctttgcgaaataccgaaaacacagaagaggcaagaacccaacatgtcagtcgtgtgcaggagcagaaaacttcaaccggagttgaggaaccagctcaaggtcaacttaagatcgacctccaagtcgccggccctggaggccaggtgcagaccaacaactccgttcagaacggcagcgtggtcaacactccaaccgaagtcatcagctctcctattcaaaatgttccgctggccattaacggaattcagttgatgtaccaacagccccagcagatacaccagttgccaggtggaacatcaactactacaagtggagcagggactcagtgcattgtagtgccgcaagtggtcaatcaaaatggcacccacgtgcaacagccgtctaacctacagccacagcagcagagcgtacatccaaatatgactcaacagccacagcagacgccacttaatgggcacccatctatggttaacactcttcagcagcagccaccacaacaatccttaccgatgcagacgattcagtcgcagcagcagcagcataaccaaatgcctatcatttcgcaacaacagcagcagcagatcctaatgcagcagcaacagcaacagggatcccagcaaggatcacagcaatttaatttgcctggcacacaacagactcatcctcagcaccagttcatccagtcgcagcccaaccaacttcactcgcttccgccccaggtagtgagcatggctcagggaaatctgccgcatcagcttccacccatgcagactatgggagcccaacagcaaatgatctcgcaacaacagcatcagttgcagatgcagtcgcatatgcaccaacaaaacgtgcccggaatgtacaaccagcagactggagctcgtgtggcagcaccccaaaatttcgcaggtgcagttccaaatcatttgttgcagcagtcccctttgatggcatcccagcagccagcacagcccatgcaacacgttatgcaaccgattttcaatgcaacgtccggtgaagttaccgaagagcctgtctctttagcagctacgcatccgcatctgctaccgagcgatattcaatccgatataaagcacaatttagactcattagtgaaccaattgtgcaatacgcgcttgggtactaaccagcaccaacggctgttgctgttgcgtcagagacaactcatcgaagaggacgagctgcgtcttaaacattatgtggaatacgaaaagttccaaaaggcactgcgccaatctattagcacaaacgttccagctaatgcagcttactattctgcggctgccgcacagcttccaactaatttggcagccccagcagctccgtcctcatcgaatccgacgtccactagctccgcaaacacataactgctctaaatgtttagcttcatgcacttttggcaagtcatactaacagctctactctatgttctcggcaatataattggcacgagcgaaaggacgtggatctggagatagattttaagtaaaaagttgtcaaatgttacggggttgtctgtaaatattagtcaaacgcttcttgttgatatgccattgttttaaatttctctttctgtttcactttttatttaaaatgcctaatttcccattctg

SEQ ID NO: 15963 - protein, 2285 aa, DROSOPHILA
MVLPPAPRNLKGENTSISSEEQTVQGANIQKSGHRSFNRSASSRQKPNPTSKLKDTLNRKPTCKQGTLSAHTSTSSTTSIQSSPIEPASSLPTLNTTPTPPAASKSNLFVRVLRRFSNNTLPGKTASSPKNVDDVPKVNDNNNGDLGKQQSTDVEVLCSQDNQSREQNEDEMDSKIEPADAISNQKAGLTSGKPKKDKSVKGTSQAVVSDTKKMEARKSSSDTVIEPLIKQQAPLHSSKTTPTTLTANFVQNIRFVRKNVEQSGRNTNPLQFVELETEFPRDYDDNIEMLSREAEHLEEQFRTPTRSNATDATSHHVAGIIDNIITEASRSLTIEKTEDDVPLKSSTKHSSGVKRVGFQVEDKDDTEVQSEKQAKSFDDITKKAESSEASAEEAAVTGSSTDASASPLPSTSLVSTTSSATSITKSKSDEDDDPVAMSPCGRFFKYDKEVGRGSFKTVYRGLDTLTGVPVAWCELLDKQVKKSERTRFREEADMLKKLQHPNIVRFYTYWEFPIGRKKNIVLVTELMLSGTLKSVKIGDLGLATLKNRSHAKSVIGTPEFMAPEMYEEHYDESVDVYAFGMCMLEMAISEYPYSECKGPAQIYKKVISGIKPAALAKVEDPNVRDIIERCIELKKEDRPSCNELLESEFFDEDIGIRVEPTASEQFLSDPSISIIEFRLRFMDPKKRSSRHKENEAIQFEYNIRHDEYEQIAQEMMKENIISEDDSRAVARLLKVQVVSLLKERAQRQTQIKLQNEKSRLEKLALQKQRESLPTNVDEDEEEEEESEDEEDGVKWNQRLQLRYDLLNTDSETSLALSTNSVEPQQLSTRSNTSIPNSGIQQPVQVPGQVPVSQLISVQPQAIPSPAIPMQQKPTVHYIQPPQLASYQNSNASMQEMTNNQVISPTGSQQMQQQQPVVAPTVNHQVMPQQQVNQQQQQPQMMQQIPQQVQVQQPQTVLPPQPHEQQPQQQQQPLQQQLQQLMHTNVQAPDLTQQQQMAQQQAQQYFQQQQQQPQQAVNMQQAYAMQQAGQQQQLSQPLQIQQQILQQQQVAVSHQQQIMQQQLAQHQLQQLQQQQLQQQQLQQQQQIQQQQLQQQQLQQQQFVQQYAQAMPQQQHQQLVTGSQVMAPHQHQQPIQIPVQMQVPPTSVAPPIQHTYNQQGGQVTLSDAQQQQHPGFSAVPQQAAPFIQQPTQQPIQLSMPLEQQLQQLLHSQPAQQQQAMSQQQQQPLVQQQQLPLVQQQPPLVQQQQPLVQHQQPSVQHQQPLVQQPQQQQPQPQNQQPQPQTQQTHVVQQQPPQQQPAVEQISQISSQVPVQQENLQPIQVNKDANVATDAMSLNSAHGALEPAPKTEPQNSADAEKQQKQTGTGTRSQKPRRSNRSGNERIPKLSVTSVDEGSVINCHMENKLKTITFKFDIGDRDETASDITKMFEPTIHGVETLPSGGGGAEQSNCNLTLEARSHLSNIPNAKEPQLNVSTPPTTTSTMSSSSTASRDAPNSSNDVTIGSGSVSRKTSTASEYTSLSIDYMPDSNITPTGPEPPLDDGKDKKPCSLAIARMQKLLESAGNGAPRSLNLPLNRHLKIQEDLKHTRSLDDLTAVKITFDMPNKAALDTSENAQQATEAEAEKPKDKSGQAVGNQGTGAANTLEQLKIELENITHAHAFASAVVASINNRAPHQASPAMSSLKATSGQPQTQEITKPNNGAGPSVPSVGQNTPTAALTSARGSGSSVYNSRRTSIDNSVGSDMHLHTATNLEGTVSNPDPIPTEASVGITIATGHEKQLSKQPSLEKPSATSILTNNSDPPQRNPSNGSINQNSIADLEKKLAALRNTENTEEARTQHVSRVQEQKTSTGVEEPAQGQLKIDLQVAGPGGQVQTNNSVQNGSVVNTPTEVISSPIQNVPLAINGIQLMYQQPQQIHQLPGGTSTTTSGAGTQCIVVPQVVNQNGTHVQQPSNLQPQQQSVHPNMTQQPQQTPLNGHPSMVNTLQQQPPQQSLPMQTIQSQQQQHNQMPIISQQQQQQILMQQQQQQGSQQGSQQFNLPGTQQTHPQHQFIQSQPNQLHSLPPQVVSMAQGNLPHQLPPMQTMGAQQQMISQQQHQLQMQSHMHQQNVPGMYNQQTGARVAAPQNFAGAVPNHLLQQSPLMASQQPAQPMQHVMQPIFNATSGEVTEEPVSLAATHPHLLPSDIQSDIKHNLDSLVNQLCNTRLGTNQHQRLLLLRQRQLIEEDELRLKHYVEYEKFQKALRQSISTNVPANAAYYSAAAAQLPTNLAAPAAPSSSNPTSTSSANT

SEQ ID NO: 15964 - DNA, 3901 bp, DROSOPHILA
tggtaacgcgcaagaaatggatggctcgtaagtgcctgaggcggcgggatcgccataaatccgaaagcgattacctaatcgactgtccggatgtgaatgtggagaaatttcagccgtaagtatttcatattgttgtgtttttcatagcccttttcctgaaaacaaaatccacttctaggcgccttgagaacctgtgcaccgagatgtgccaaagcgactactttctggtggccatggaagcgctgcagcagcaactggagggcattaggaaaccgttggagcgaattgtttgcctgggactgggacctttctcccgcacctaccatgccctgcatcaggctgcatttgtgattggactgcatcggcatcacaagatcagagaggccttgtacttcgatcccgtcttcagagacagcgagaaggaactgatccggctgttcgacggttgtataatgagcaaagactgcgcgggcaagcacgaggcgacggtgcccacgctctattatctgccacactgcccctacgctctgatgcataacatcctgtggtccaattggaagcgggagacactgcccaacgtttttctcatctcgaatagcttcgaaatgctgaccatgacgcccagaaaccaggatgaccacataacaagaatagtagaacattgtacagaaactccgctggaagatgactacgagcaccacaatgtattcaacgacttgtcgctgcacacgttcccccaggaatccttgcccggtagcaacgacgaagcgttctggacacgatgtgctcccttgaaggtaaacgaggatgaactgatcacggaaacggagacgagccttgctgccctgaagcttgaatctgaataaatgatcatagcgttggacttttaaacgttttttttcatatataccaaaaggcccgtgaaacgcgagtagtaagttgggtttcagtatagtttccaattctaataacaagctatttacaattatattggaggcacctacaagcgctccataatcattttctctgcaggctttacgccgtacttgtagaccttattgagactttccggaaagtcgggcagtagattgttgaagttctccacgtgatgtgtatgctgctccgtccagatgccgtcgcccgtgaagtggaactccgattcgattaggtagagaatgagagtcagaatttcgttgttgcttaacgaatcgaaattcgccactggcaactgcagatcttcttgcgcatcgggtgattgcaaaaggagcattttttcttcaatacgtttgctgtgtagaaacaaaaagtattagggcaaaatcgcttgtaaattaattgtaccactcacatgggataaagcagcaagtgtatgttcgcaaatatctcattaagtttaaactttttgctgcgtaagtactccagacactgcttcacgtgcagcaatggtatatggcaccagttgggatggcgagagagaagattgcgcagcacttgcacgtccttccccaaaacattactcaagtagacgactatatcgcggcctttagtacgatctgagccatctctggcaaatctggaacatggttatttgattagtcagtcaataagctgataagattcttacttagcgaacgcctcggacccacaagaaaggatgtgcaaggaggcgcaccgaacccgcagttgattgagataatccagacgcagtcgcgccttgttctggtagtggaccagtctcaggattcgcggattggtacccaagacttgaaactcctcgatctcctgcagatcccttagtcgctccagaaccgtatccggtccaagggtgagcacttccaggcagcggagaacggcatcctcactgatgccgaaagcgtggacgtgctgcagtgtttgcttcaagctatcgcaggtggacatcaaaatcttgggtctgcgaaagccgatttctcgtatgtcctgcgagtcaatggtaggcacctctcgcaggatgcgccgcacgttatctgcttccgaatagagcagaaaactgttcttccttagccgctcggcggaaaaattaaactctttggtcagcagttcaatggtgtcctgcactgctcgaaaactcttgtggcggatgcgcgtgtaaacgcgccacagcttctgtagatcgttgtcgtccatctggagacgttcacgcaggtaagcgttgatcagggattgtctcaagctcttcagtgtgagggtctcactctccagctcccgtaaatccaccggcagcttgatatccttaaaatatcccgccagacgctccgccaccttcacatcgaaggggatgtaattatgtgccttcaagacttctatcggcttgttgaccaccgtcacatacttggccagcgtttggacagtcacgttgtggaagccgcactcctgcaagacactgtggcgattggccaaagtggtggcgccataatagatgatcatgggtttcgctatgatgtcgtccacactatagtccagtgatttcaaagtgtcgtaggagcttagcaagtccttgcgctttaacgtcttgagctctgggtgcttctctaaggctgccgcccaagaacgataggaactacctataaagacgcaatagtgactccctaaatcaactttaaagccttagcttacccagagttttggacaaatagctggcattcagcggctcttccatcggaatctcgactgtcggtggctttggcagttttggcttgagatcctccttcttactgctgacccgtttcgaactggccattccccgcgccagctgtccaaggctccgggccagcaattgcgcttgattctggccgttgcgcagcataattataacatttcccgcagatttatttacaaacggcaaagaaacgtaactgttatcggggtgaatgacaactgttgcagctagtgatgggagcacatatatacaaagggaaaaaatcaaaatataataatataatataatttatattatatatttaatatttctaatattattttgttcaatgtttgagttgcaaaaaggctttgagtgtgcagaaaatgtattctcccttgatcttgtggtaggtaatcaactatcgatacggccggcaaatcaatttcatcgatacgacgacggttgttttcacatccctaaccccgcagcgttgttacacgtgcgcgtgaattatagtttatttgacttggtttttatttcaaaacatttaaatatgtcgcttttacgcatcaggtaagcattggagatgaagcccatgaaatgcaaatgaaatcaaaccaactgcgcttccaggaaaccaaaaacccgcaagggaaagaaggtgttgctggccagggagccgcaactcattgaatccgcccgcacaatgctgtttttggacggaaggaagtgcggcggcaatgtgaagctgtgcatgaaggacctgcaggcgctgaagaagccgctggttaaagtgctgaaccgcaaaaacgacattaccccctttgacgatccctcatctctggagttgtaagtttggacaaagcaaacaactaaaatgtagtgtatttaattgtaaacatcattcgaatcaccagcttgaccatgaagaacgatgctgctttgttcacgttcggttccacgtccaagaagcgacccgataacattatactgggcaggatcttcgagaacgaggtgctggacatgtttgaactgggcatcaagcggtatcaggcgatttccgagtttaagaacgagaaaatcggagcctgcgtcaagccctgcctggtgttcaatggtccgaaatgggcacagaccgaggaactgaggcgccttcgcaacctgttcatcgacaccttccagcgcgagaaggtggattcgatccggctgcagggcatcgaa

SEQ ID NO: 15965 - DNA, 1739 bp, DROSOPHILA
ataacagttacgtttctttgccgtttgtaaataaatctgcgggaaatgttataattatgctgcgcaacggccagaatcaagcgcaattgctggcccggagccttggacagctggcgcggggaatggccagttcgaaacgggtcagcagtaagaaggaggatctcaagccaaaactgccaaagccaccgacagtcgagattccgatggaagagccgctgaatgccagctatttgtccaaaactctgggtagttcctatcgttcttgggcggcagccttagagaagcacccagagctcaagacgttaaagcgcaaggacttgctaagctcctacgacactttgaaatcactggactatagtgtggacgacatcatagcgaaacccatgatcatctattatggcgccaccactttggccaatcgccacagtgtcttgcaggagtgcggcttccacaacgtgactgtccaaacgctggccaagtatgtgacggtggtcaacaagccgatagaagtcttgaaggcacataattacatccccttcgatgtgaaggtggcggagcgtctggcgggatattttaaggatatcaagctgccggtggatttacgggagctggagagtgagaccctcacactgaagagcttgagacaatccctgatcaacgcttacctgcgtgaacgtctccagatggacgacaacgatctacagaagctgtggcgcgtttacacgcgcatccgccacaagagttttcgagcagtgcaggacaccattgaactgctgaccaaagagtttaatttttccgccgagcggctaaggaagaacagttttctgctctattcggaagcagataacgtgcggcgcatcctgcgagaggtgcctaccattgactcgcaggacatacgagaaatcggctttcgcagacccaagattttgatgtccacctgcgatagcttgaagcaaacactgcagcacgtccacgctttcggcatcagtgaggatgccgttctccgctgcctggaagtgctcacccttggaccggatacggttctggagcgactaagggatctgcaggagatcgaggagtttcaagtcttgggtaccaatccgcgaatcctgagactggtccactaccagaacaaggcgcgactgcgtctggattatctcaatcaactgcgggttcggtgcgcctccttgcacatcctttcttgtgggtccgaggcgttcgctaaatttgccagagatggctcagatcgtactaaaggccgcgatatagtcgtctacttgagtaatgttttggggaaggacgtgcaagtgctgcgcaatcttctctctcgccatcccaactggtgccatataccattgctgcacgtgaagcagtgtctggagtacttacgcagcaaaaagtttaaacttaatgagatatttgcgaacatacacttgctgctttatcccatcaaacgtattgaagaaaaaatgctccttttgcaatcacccgatgcgcaagaagatctgcagttgccagtggcgaatttcgattcgttaagcaacaacgaaattctgactctcattctctacctaatcgaatcggagttccacttcacgggcgacggcatctggacggagcagcatacacatcacgtggagaacttcaacaatctactgcccgactttccggaaagtctcaataaggtctacaagtacggcgtaaagcctgcagagaaaatgattatggagcgcttgtag

SEQ ID NO: 15966 - protein, 560 aa, DROSOPHILA
MLRNGQNQAQLLARSLGQLARGMASSKRVSSKKEDLKPKLPKPPTVEIPMEEPLNASYLSKTLGSSYRSWAAALEKHPELKTLKRKDLLSSYDTLKSLDYSVDDIIAKPMIIYYGATTLANRHSVLQECGFHNVTVQTLAKYVTVVNKPIEVLKAHNYIPFDVKVAERLAGYFKDIKLPVDLRELESETLTLKSLRQSLINAYLRERLQMDDNDLQKLWRVYTRIRHKSFRAVQDTIELLTKEFNFSAERLRKNSFLLYSEADNVRRILREVPTIDSQDIREIGFRRPKILMSTCDSLKQTLQHVHAFGISEDAVLRCLEVLTLGPDTVLERLRDLQEIEEFQVLGTNPRILRLVHYQNKARLRLDYLNQLRVRCASLHILSCGSEAFAKFARDGSDRTKGRDIVVYLSNVLGKDVQVLRNLLSRHPNWCHIPLLHVKQCLEYLRSKKFKLNEIFANIHLLLYPIKRIEEKMLLLQSPDAQEDLQLPVANFDSLSNNEILTLILYLIESEFHFTGDGIWTEQHTHHVENFNNLLPDFPESLNKVYKYGVKPAEKMIMERL

SEQ ID NO: 15967 - DNA, 4817 bp, DROSOPHILA
aactactacgaacgccttaccaagaacgccattcagatggtgtccgaggtgctgccccccgactccaagtatgtcctggcaatgaacaaattcgcagaaagctcctcattcttcggtcggatggtgaagttggccagtaccgagtcgccgttatcggccatttgccacggcgactgttgggtgaacaactttctgtaccactatgatccggaggatccacaccgagtgcttgaggtggcgctgctcgactttcagctgatacgctacagctcgatcgcactggacattgccaatctgctgtactgctgcaccaccaaggaaatgcgcgatgctcagctgcagactctgctcaagatctatacggaggagctgtttcgatggctgcaaatgctctgcacaaatttgccggaccactgcgacacgttacagaagctgcaggatctgtaagcaaatgatttttttaagagttaaaatagttaattgatgttttatatgtccatagttttgccgaggagctgaagacatacggacgctttgcacttggtttggcattggatatcctgcctattagcacctgctcttcggaggatgctcccgatatgtatttggatcgaagcgatgaactcggggaggatgtgggcgcgcccacgcttaactttccacccaacgacctgtgccgccagaagatgtcggagatagtcattgatatggtggatcgggacatgctctaggccaccctgcaatcgaaatggaacactagctgtcagcccaaaacaccaatttcgaacaatacaccgtgctccagttgatgctcacttaacccttagttatatgtatgcaagatagtaaaaattatcagtaacttagcaagactttgtacgtttagggtaccaccgctacctttatgttacgtttctgtagcatccaattccttgaccctgcgtcccaggttggatttcatgtagtcagagttaacacttttccgtatgaataatttattctcatattagttttttatttgtactgctagatgagcaaacagaacgttgcaaaaatagtaaataatatatgttttttgtttagtctttcgcttaactcatgataccaagtgggtattctcggaaaatttaagtttccattgcgtttacctagacggaatgcaattgggcacagggcttttaaattggacaggaattgtgagaaagcactattcgctctagccgtagctaaaattaacaatacatttgttgaacttaggccgaaaaaaaaacagacaatagaaagcttgtctagtcgtattgtgtttttctaaagtattctttacacaaagtaataaactataaatgaagggtatgcctttccttaactcagtaatccgccttggccgtccaggtggccttgtttcccaggacgcccttgtcgcagttctcacgcagaaatctaagacccgcttcgatggagcgctccaggtcatcctgagacttgggctttttcgctggtggagctctgtcatccaatccagcaggcggaggaatagcggcacccatgccacgactggatgtgctcggttgttcatcagcttcgtcttcgttattcgcactgtagctccgtcgttggaacttcttttcctcctttgtgctgtgaaaattgtggaactgcggctcttgggcacggttccacaccataggcggtggcatgctgctgaagttactgcgcttaagggggacaggctctggcatgggcgcaaattctgcatgccgctgggcacgctgcttctcattccactcctcctgggacattggcaggcgttcggccttgtacttccactcctcctcaggtggttctgcgctctccgagtctgctagcttgcgcacaccaggtttgttcttgtcccaatcgcgtacgtgctccttgcgcaattcttccagttcagcctcctccttttcttttttacgctcgatggctgccctcctctcttgttccgcccgatttagctctgcttcttctttcgccaattcgtccttcttttgctgttcctcccgcaggtagtcttcctcgctgatgggtggcaagccgttgcgttctcgaatcctgtttttggcggccagcacgcgatccgccacgagacggtctcgttgggcgcgcaattcatctcgtcgcatctgcttagccttcgttgcttggcgtgccttttccagatccaactgctgctgtcggcgctcgtcttcgtccgtggagaaggcatagtagccaacaccgtgggtgcgcgcttcgtcaaagaagacatcctggtagtggacatcaggcttttcaaaattctcctgctccttgcgctcccagttcatgcgctgttcgtcgtgcttcgtcatcgtggacagggcttcgctgaagacgctctccgttggacgcggcccaatgaaggactcatcatcgctgttgtggttactattcagctcgcggcttcctttggtatttatcatccagttggccttggtctgatctaggcgctccggcatgctctcggcaagttgcttgtcgcgtctcttggcctccttcaagtccttccgcaaacactttctggtgcgtcccaggcagtcaacgtactccacctctaaatcgtcgtggccttcttcatcttggctggaactgctgctgctactcagtcgctggcgggactcacgtctctgcgtgcactgctccggctcccgatctgcctcctgttttttgcggttgaacatcaccaggcaattgtcatcggagttgaggctgcctccattgcggctcatccggtcgtagaacttactcttggcctccaggatgcgccgtgacttctccaactgagcatggtcctcggcctcgtacactttggcaccatcgtcgctgcttgcgacctttttgtagccctgatcactggacttttccttgttgccggcgctcttggtggggcgaaagtcggcggcggatgcctttgtggccttggccaccctcacctcatgctgtttccgcagcaattccgccttcaggctgagcagcgaggaaagattcacactaatagccttgtttggatcgttcattgcgtacaaaagtataactacaaaaatacagctgtgagataaagttgcagaagcaacagctgataaatacactggcacaaaacaaatcgagatactttctataattttaattattcattaggactgtccacaatattatgctgttttaaagaaaataacaaaacattagataacagatatatattgatacaagaagcacattaaagcaataaattaaagttacaaaataatttaataaaccacttattagcttatgttttttctctgtaccaaatacggccacactaagcgtggtgacaagaaaaagaagaagcgtgtttatttaccttttggaatgtcgaactctggagaggattttcaggtggtaacgcgcaagaaatggatggctcgtaagtgcctgaggcggcgggatcgccataaatccgaaagcgattacctaatcgactgtccggatgtgaatgtggagaaatttcagccgtaagtatttcatattgttgtgtttttcatagcccttttcctgaaaacaaaatccacttctaggcgccttgagaacctgtgcaccgagatgtgccaaagcgactactttctggtggccatggaagcgctgcagcagcaactggagggcattaggaaaccgttggagcgaattgtttgcctgggactgggacctttctcccgcacctaccatgccctgcatcaggctgcatttgtgattggactgcatcggcatcacaagatcagagaggccttgtacttcgatcccgtcttcagagacagcgagaaggaactgatccggctgttcgacggttgtataatgagcaaagactgcgcgggcaagcacgaggcgacggtgcccacgctctattatctgccacactgcccctacgctctgatgcataacatcctgtggtccaattggaagcgggagacactgcccaacgtttttctcatctcgaatagcttcgaaatgctgaccatgacgcccagaaaccaggatgaccacataacaagaatagtagaacattgtacagaaactccgctggaagatgactacgagcaccacaatgtattcaacgacttgtcgctgcacacgttcccccaggaatccttgcccggtagcaacgacgaagcgttctggacacgatgtgctcccttgaaggtaaacgaggatgaactgatcacggaaacggagacgagccttgctgccctgaagcttgaatctgaataaatgatcatagcgttggacttttaaacgttttttttcatatataccaaaaggcccgtgaaacgcgagtagtaagttgggtttcagtatagtttccaattctaataacaagctatttacaattatattggaggcacctacaagcgctccataatcattttctctgcaggctttacgccgtacttgtagaccttattgagactttccggaaagtcgggcagtagattgttgaagttctccacgtgatgtgtatgctgctccgtccagatgccgtcgcccgtgaagtggaactccgattcgattaggtagagaatgagagtcagaatttcgttgttgcttaacgaatcgaaattcgccactggcaactgcagatcttcttgcgcatcgggtgattgcaaaaggagcattttttcttcaatacgtttgctgtgtagaaacaaaaagtattagggcaaaatcgcttgtaaattaattgtaccactcacatgggataaagcagcaagtgtatgttcgcaaat

SEQ ID NO: 15968 - DNA, 2533 bp, DROSOPHILA
ctctgatcttgtgatgccgatgcagtccaatcacaaatgcagcctgatgcagggcatggtaggtgcgggagaaaggtcccagtcccaggcaaacaattcgctccaacggtttcctaatgccctccagttgctgctgcagcgcttccatggccaccagaaagtagtcgctttggcacatctcggtgcacaggttctcaaggcgcctagaagtaatcgctttcggatttatggcgatcccgccgcctcaggcacttacgagccatccatttcttgcgcgttaccacctgaaaatcctctccagagttcgacattccaaaagcataatattgtggacagtcctaatgaataattaaaattatagaaagtatctcgatttgttttgtgccagtgtatttatcagctgttgcttctgcaactttatctcacagctgtatttttgtagttatacttttgtacgcaatgaacgatccaaacaaggctattagtgtgaatctttcctcgctgctcagcctgaaggcggaattgctgcggaaacagcatgaggtgagggtggccaaggccacaaaggcatccgccgccgactttcgccccaccaagagcgccggcaacaaggaaaagtccagtgatcagggctacaaaaaggtcgcaagcagcgacgatggtgccaaagtgtacgaggccgaggaccatgctcagttggagaagtcacggcgcatcctggaggccaagagtaagttctacgaccggatgagccgcaatggaggcagcctcaactccgatgacaattgcctggtgatgttcaaccgcaaaaaacaggaggcagatcgggagccggagcagtgcacgcagagacgtgagtcccgccagcgactgagtagcagcagcagttccagccaagatgaagaaggccacgacgatttagaggtggagtacgttgactgcctgggacgcaccagaaagtgtttgcggaaggacttgaaggaggccaagagacgcgacaagcaacttgccgagagcatgccggagcgcctagatcagaccaaggccaactggatgataaataccaaaggaagccgcgagctgaatagtaaccacaacagcgatgatgagtccttcattgggccgcgtccaacggagagcgtcttcagcgaagccctgtccacgatgacgaagcacgacgaacagcgcatgaactgggagcgcaaggagcaggagaattttgaaaagcctgatgtccactaccaggatgtcttctttgacgaagcgcgcacccacggtgttggctactatgccttctccacggacgaagacgagcgccgacagcagcagttggatctggaaaaggcacgccaagcaacgaaggctaagcagatgcgacgagatgaattgcgcgcccaacgagaccgtctcgtggcggatcgcgtgctggccgccaaaaacaggattcgagaacgcaacggcttgccacccatcagcgaggaagactacctgcgggaggaacagcaaaagaaggacgaattggcgaaagaagaagcagagctaaatcgggcggaacaagagaggagggcagccatcgagcgtaaaaaagaaaaggaggaggctgaactggaagaattgcgcaaggagcacgtacgcgattgggacaagaacaaacctggtgtgcgcaagctagcagactcggagagcgcagaaccacctgaggaggagtggaagtacaaggccgaacgcctgccaatgtcccaggaggagtggaatgagaagcagcgtgcccagcggcatgcagaatttgcgcccatgccagagcctgtcccccttaagcgcagtaacttcagcagcatgccaccgcctatggtgtggaaccgtgcccaagagccgcagttccacaattttcacagcacaaaggaggaaaagaagttccaacgacggagctacagtgcgaataacgaagacgaagctgatgaacaaccgagcacatccagtcgtggcatgggtgccgctattcctccgcctgctggattggatgacagagctccaccagcgaaaaagcccaagtctcaggatgacctggagcgctccatcgaagcgggtcttagatttctgcgtgagaactgcgacaagggcgtcctgggaaacaaggccacctggacggccaaggcggattactgagttaaggaaaggcatacccttcatttatagtttattactttgtgtaaagaatactttagaaaaacacaatacgactagacaagctttctattgtctgtttttttttcggcctaagttcaacaaatgtattgttaattttagctacggctagagcgaatagtgctttctcacaattcctgtccaatttaaaagccctgtgcccaattgcattccgtctaggtaaacgcaatggaaacttaaattttccgagaatacccacttggtatcatgagttaagcgaaagactaaacaaaaaacatatattatttactatttttgcaacgttctgtttgctcatctagcagtacaaataaaaaactaatatgag

SEQ ID NO: 15969 - protein, 568 aa, DROSOPHILA
MNDPNKAISVNLSSLLSLKAELLRKQHEVRVAKATKASAADFRPTKSAGNKEKSSDQGYKKVASSDDGAKVYEAEDHAQLEKSRRILEAKSKFYDRMSRNGGSLNSDDNCLVMFNRKKQEADREPEQCTQRRESRQRLSSSSSSSQDEEGHDDLEVEYVDCLGRTRKCLRKDLKEAKRRDKQLAESMPERLDQTKANWMINTKGSRELNSNHNSDDESFIGPRPTESVFSEALSTMTKHDEQRMNWERKEQENFEKPDVHYQDVFFDEARTHGVGYYAFSTDEDERRQQQLDLEKARQATKAKQMRRDELRAQRDRLVADRVLAAKNRIRERNGLPPISEEDYLREEQQKKDELAKEEAELNRAEQERRAAIERKKEKEEAELEELRKEHVRDWDKNKPGVRKLADSESAEPPEEEWKYKAERLPMSQEEWNEKQRAQRHAEFAPMPEPVPLKRSNFSSMPPPMVWNRAQEPQFHNFHSTKEEKKFQRRSYSANNEDEADEQPSTSSRGMGAAIPPPAGLDDRAPPAKKPKSQDDLERSIEAGLRFLRENCDKGVLGNKATWTAKADY

SEQ ID NO: 15970 - DNA, 2485 bp, DROSOPHILA
gcgccaggagagcgagcaacgtcgcgccaatcccgatggggctccaccgactggcggagatgctggtggcggaggcggcgtttcgggatctggacctggaaacgaagaaagtgccggagcagagaacgaagccaacaccgaggaggccatgctgcagcgtgccctggccctgtccaccgaaacacccgaggacaacttgccggactttgctaacatgactgaggaggaacagattgccttcgctatgcagatgtccatgcaggacgctcccgacgactctgttacccagcaagcaaagcgcccaaagacggacgaggcaaacgctcccatggacgtggacgaggattactcggaggtgatcggagacccggccttcttgcagagcgtgctggagaatctgcctggtgttgatccccagtcggaggcggtgcgcgatgctgtcggttcactcaacaaggacaaggacaaaaagagcgacggcaaggactcgcaaaaaaaataaaccgcatctatgattatatctaataagctcgtttaaagcatttgtatgcccattaaaatcatttgtagccgtctttcaaattatgcttcaagtgaaaatatataaacaaatacacacgatctgctgctgacttaattgactgcgagggtcttttcattcactgcatgtctagtaaaaataattttctagtcctgatagtggccggtcgactcgggtaagcatgtttattagggaagcatatgcataatgcttcttctatctgtcactcacgactctagttaaagtaaataaattggattctgtacttaaagtaaatgaacttgagctcattggccagtttttgaagttaaacacggaagaatttaaaacatcaaggattccgcccgcctcttttagagtccactttacacctggcatactgcgttttatacaatgtcagtaccatatatcagacacacgtttatttacagctggaccatagataaataataaaatcagtttgtggctcaatgcactatagtttatttccccgtaacaggggcactattgatatattgatgctctctactttacaagcgtattaactatgtgtggtctcgtatgcagattacttgtcgcccttgtagtcccggatgtggtagagcacccaggcgggaatgaacaaggatgcagcgcacatgccgccgccgaggatcaccttctcctgtaatgcaaaaagtgaaggatcagtttttcgctttgggaatcacatcctggttatgcaacaagctcaaacttacggcggtggagatgcgctgggtcggaggtccagagacgaccgactggcaacggctctgcatggcgctacgcatagcggggaccaggaggcgggcagcgctgttttggaacattttcacaaactttttcgcaaaatacgctggcgtaaaatcaatgctgtaaggttagaatgcttcttcttaacgatttgtcattcgcctttctttagagatggtcttacgcgaaacacaactatcgcaagccaaaacgaaaatgtagggtgtttcaggtgcagataattgtttagaaataccttattgattaaaaataatgttcttgacaacctagaaataaatttaagtcaatcaagttactcaatgtcggtatggtcacaatgcgtacaattagttaaattagttagtttgttcaatattaaaaaaatcctttttttaattaaaaaatagctttaatattatgtatcggaaaatttaatggaacatagataacactatttataatattatacgtgttataattgtgataggcatacacaaatttataagggaaaaataagccagggaaggcggtccagggtgaccatttcgtgccatcggaatcaagcgatagtcgcgcatggtcccactgctgcatgggacatgtccgtcatgtgatattcgttgctcgagaaaaagttcggtgatcgctttgtccacctttttattttttatttgcccaaagcactttgcgtcgatcctagagcctgcaaaatggtatccgagtgggtggcaccaatcgttatcaccagcatttgggccttcattggcatcatctgccccttcttcgcccgaggacccaacagggggtaagctaatctgtttacccaacttcagtcttgagtagctttgcaacccacaaatgaaactattttgcagggtgactcaatgctgcctgatgctcaccgcagcaacttgctggctgttgtaagtacatgtgtatataagtgctcgctgctttttaaaatgcttatcaatggctattttccttgcagctggctgtgctgctacatgacgcagctgaaccccctcatcggacccaaactaagcatgaacgaaatcatgatcatggcccgcgagtggggcaatgagatcaaggacaccatggctgtcaccgtctaatgtctgtcaccctaatgtattcgtttcaattgttttgttattgtttctttat

SEQ ID NO: 15971 - DNA, 409 bp, DROSOPHILA
aaagaaaggcgaatgacaaatcgttaagaagaagcattctaaccttacagcattgattttacgccagcgtattttgcgaaaaagtttgtgaaaatgttccaaaacagcgctgcccgcctcctggtccccgctatgcgtagcgccatgcagagccgttgccagtcggtcgtctctggacctccgacccagcgcatctccaccgccgagaaggtgatcctcggcggcggcatgtgcgctgcatccttgttcattcccgcctgggtgctctaccacatccgggactacaagggcgacaagtaatctgcatacgagaccacacatagttaatacgcttgtaaagtagagagcatcaatatatcaatagtgcccctgttacggggaaataaactatagtgcattgagccacaaa

SEQ ID NO: 15972 - protein, 68 aa, DROSOPHILA
MFQNSAARLLVPAMRSAMQSRCQSVVSGPPTQRISTAEKVILGGGMCAASLFIPAWVLYHIRDYKGDK

SEQ ID NO: 15973 - DNA, 3769 bp, DROSOPHILA
gtgctcagattatcatccattccgaacactcaaggttgcctcagttccaggcactcccaaatgggttactctttgttgtgtgtgtgatatattcggactttctttattcttaagccctacgaattgcgcattttcagggcaggtaaacaaatcaatttctgttccaaggccacgcactcgtactcgcactcgcttttaatagatttcgttttcaatttgtccaattttcagcggagtcgcattgtttggcttggttccgccgtaaatcgatgacgaatcggtacggtttgcttggcgttttgggggcgtacacacacgcgcatgtatgtcacacagtgcccaattcgcgtgggaactggaggggttgggccttcaagggggtggtggacggtggggtcggcggggtcaacagtttgtctctgtagcctctgcgcttggattcctatggatttttttgttattttagtgcgtgcagctgctttgagcttacactttggtttttatattatagcctacactccgcagaactgtagtacattgttttgaccctttattgttgtgtttttatcgggtttttagcaattttcttgcaattttccgtctgttttgtttacatatttttttgctagtgatgacctgcagtaggtcgattcctatcgaaaggaaacagctgctttaacgttattcaatacttcttttgaaagtgttaataagtgtacctatcgacttaatcgactagttattttcttttctatgcatattgccatatgcttatatggcaatctaaataatccaatagcattacaaagttgtctttgactgaaatgacttgtcttgaataaatttaaataaatataaataaatttttaaattgtaattcaaagaaccaaatctataaaggtatgtgatgtatggaaaatattgagaacatattaaacatatagtacatatcgaaaaagtgtcatcgccgtgacataataccccgccagtgttgccaaatactctgctacacaacactaccgcgcgtgctggaaaaaaacgtgcgcgtttattcgttgcattttgttaagataattccttaagtccgggtacttctgactccgattccgactcccaaaagatgtggccgcgatttggcattaagattggcaacagcacgctttgcatcgcccatgtgcgcgcggatggcaaggcggaggtgatcgccaacaaacagggcgaccgagtgtcccaagcgtgccttctctgggacggagcctcggagatcgaatgtggcctcacggccaagcagaagatggccaaccgtccgcgccaggcggtggcgcacagctttcagttgcttcagcccaaggaagagctcacggaggagaaactgtccagtgcgctgcgtgaaataccctgcgactttgacaaggaggagctggtgttccggatggagcacactgtaccctccgacagggaggaccaagacgatagagttgtgaccaaggacctcagcgcctatcaggtgacggtggagctgctgcgcgctgagctggagctggcccatcaatatcacacggacggggagcaggcgcccattgccgtgctatccatacccagctactatcccgcctcggcctacaaactgctagcagatgccgctcaaaccgctggcttccatgtggcccagattataaccgaacccacggccgccgttctaggctatagcatcggcgaggagcagacggaacagcgccgccatgtgctgacaatcaaatgcggtggcttatatagcgacatcgcattctactccgtccaaaatggcctgttcgttcagctggccactttcggacccttccccatcggtggccggcaattcaccgaggccttggtgcagtttatttgcgaggagttccgtcgcaagtacaagctagatccgcatgagtctcgccgctcagtggccaaaatacgcactgccgccgccaattgcaaacacatcctgaccacgatgccttccacgcaactttatatcgactccctgatggacggcgttgattacaatgcccagatgtcgcgtgctcgcttcgagagcctcatacagccagtgatcaataacctcatccagcagctaggcgagtgtgtggagcaggcgcaaaaggagcatcccgggttgagtaaaatagatgacatcgttctactaggcgccacaatgcaaatccccaagcttcaggcggcagtgggagcccgcttcccggatgccaagctccacaacagccattcggcggacgaggttgtggccatcggctgcgcgcgccaagctgtgtgcctgattgaccccctcgaacagcagcttcacaaggaggaggattgcgtggtggctgaggatgacctcttcatttggcacggtaatgacgaatccaacgccaaattggtcctgggcagggggagcgttctgcctgccaaaatacggatatcactgccccaatcagaggagggaaagggtgacgacgtaagcaaagcagctgcttcgtttaagctgcgcaccggggagagcgagatcctggcccgtctgcccgacagcacgataccggaggatgggctttaccagctagaggttgaggtagatgtggacgataaggacggcaacgtggtgccgctggtgcgactgcgctgcatgtgagagccggattgtgaaccggaaccggtgcgatgtcgcctagactatttattgttgctagcctaatgattacaatacaaaaacttaataaagataaatacgcaagcggcaaacgagaaagtgtatgcatactgaaatattcattaaccttttattttcttatgttagtttgtaaaattagaatcaaaactgcaagctggcagatttctggctgcgctccagttttcgcaggaactcctcgaaaaccacgacacccttgaacatgctagtcttcttgtgatccttgatgcggctcttatcctccggcgcctccatgtagctcttgctcttatcatcgaaagcgttgatctcgtgaagcaactgggtgatcgtcggcactgtggtgggatcaaacttggccacagcactcacactaaacggaacgcacacttttccagtggctggatgaatgcaaaacggtgcctttagcaaatgattgaatcccctagtgacattgatgtccaaacgaggatagagcagtccaagctggatttcggctacaatgttcttcagcttgcgactccaggcacttgtcgtggatgttctcatagagttggcgtacttaatgaagctctcccaaacgagtcgcgagtgtgctccatcctccaaattcttttgcatataagattctagttcgccacgcgcagcgtcatcgtggaccatgttaagaagtttggtaactcccttgggagttccaaaaagattctgatcctctagtacaatctcctcgaacatgggctccactatctttaaggctctctttaggctatgatgcggtcggtctcccattgaacatctgggtgaattgccgcccgcgaaactggcataggtaataatgttaaggtattccgccacagcatagcgaccacgtccgtccaagtgacgggcttggtagtcgcaaacccagcaatggatacctcgtctacctgagaaaatccagattatgtgctcgaaaccgaaatcctcgcgcaaagcgacatccaaaaccctggcagccagcaccataaacttccagcatttcaggcatacccctgctccagagcaacaggtacgcacctcgtcgtaatccgt

SEQ ID NO: 15974 - DNA, 1769 bp, DROSOPHILA
actctgctacacaacactaccgcgcgtgctggaaaaaaacgtgcgcgtttattcgttgcattttgttaagataattccttaagtccgggtacttctgactccgattccgactcccaaaagatgtggccgcgatttggcattaagattggcaacagcacgctttgcatcgcccatgtgcgcgcggatggcaaggcggaggtgatcgccaacaaacagggcgaccgagtgtcccaagcgtgccttctctgggacggagcctcggagatcgaatgtggcctcacggccaagcagaagatggccaaccgtccgcgccaggcggtggcgcacagctttcagttgcttcagcccaaggaagagctcacggaggagaaactgtccagtgcgctgcgtgaaataccctgcgactttgacaaggaggagctggtgttccggatggagcacactgtaccctccgacagggaggaccaagacgatagagttgtgaccaaggacctcagcgcctatcaggtgacggtggagctgctgcgcgctgagctggagctggcccatcaatatcacacggacggggagcaggcgcccattgccgtgctatccatacccagctactatcccgcctcggcctacaaactgctagcagatgccgctcaaaccgctggcttccatgtggcccagattataaccgaacccacggccgccgttctaggctatagcatcggcgaggagcagacggaacagcgccgccatgtgctgacaatcaaatgcggtggcttatatagcgacatcgcattctactccgtccaaaatggcctgttcgttcagctggccactttcggacccttccccatcggtggccggcaattcaccgaggccttggtgcagtttatttgcgaggagttccgtcgcaagtacaagctagatccgcatgagtctcgccgctcagtggccaaaatacgcactgccgccgccaattgcaaacacatcctgaccacgatgccttccacgcaactttatatcgactccctgatggacggcgttgattacaatgcccagatgtcgcgtgctcgcttcgagagcctcatacagccagtgatcaataacctcatccagcagctaggcgagtgtgtggagcaggcgcaaaaggagcatcccgggttgagtaaaatagatgacatcgttctactaggcgccacaatgcaaatccccaagcttcaggcggcagtgggagcccgcttcccggatgccaagctccacaacagccattcggcggacgaggttgtggccatcggctgcgcgcgccaagctgtgtgcctgattgaccccctcgaacagcagcttcacaaggaggaggattgcgtggtggctgaggatgacctcttcatttggcacggtaatgacgaatccaacgccaaattggtcctgggcagggggagcgttctgcctgccaaaatacggatatcactgccccaatcagaggagggaaagggtgacgacgtaagcaaagcagctgcttcgtttaagctgcgcaccggggagagcgagatcctggcccgtctgcccgacagcacgataccggaggatgggctttaccagctagaggttgaggtagatgtggacgataaggacggcaacgtggtgccgctggtgcgactgcgctgcatgtgagagccggattgtgaaccggaaccggtgcgatgtcgcctagactatttattgttgctagcctaatgattacaatacaaaaacttaataaagataaatacgcaagcggc

SEQ ID NO: 15975 - protein, 513 aa, DROSOPHILA
MWPRFGIKIGNSTLCIAHVRADGKAEVIANKQGDRVSQACLLWDGASEIECGLTAKQKMANRPRQAVAHSFQLLQPKEELTEEKLSSALREIPCDFDKEELVFRMEHTVPSDREDQDDRVVTKDLSAYQVTVELLRAELELAHQYHTDGEQAPIAVLSIPSYYPASAYKLLADAAQTAGFHVAQIITEPTAAVLGYSIGEEQTEQRRHVLTIKCGGLYSDIAFYSVQNGLFVQLATFGPFPIGGRQFTEALVQFICEEFRRKYKLDPHESRRSVAKIRTAAANCKHILTTMPSTQLYIDSLMDGVDYNAQMSRARFESLIQPVINNLIQQLGECVEQAQKEHPGLSKIDDIVLLGATMQIPKLQAAVGARFPDAKLHNSHSADEVVAIGCARQAVCLIDPLEQQLHKEEDCVVAEDDLFIWHGNDESNAKLVLGRGSVLPAKIRISLPQSEEGKGDDVSKAAASFKLRTGESEILARLPDSTIPEDGLYQLEVEVDVDDKDGNVVPLVRLRCM

SEQ ID NO: 15976 - DNA, 5063 bp, DROSOPHILA
ttcagaagatatttaccggacactaactgctattccttctagtaccaacattgctcattgtattgtgctctaagtcagcttaatataatattttcatcaagagaaattataaattcaaaatcggataaaatacttactaagtacataaatcattttatggtgagtaccaaacaaatccacctgataaacctgacaatgaaaatcttgtaaatcttataaagcccctacattatagatcagcctagaaattgtttcactttttatttattccattcctgcgctttatcattaacatattacaaatggtatttttagtctaatctaggtacaacttcagccagattggttagtttttgttttgaacaatttttaaaatgggaaatggcacaattagtattcgattcaaggctcattttatatttttaatttcttcgaacggaccccgaatatttgcttacaattattagttagtaacttcaaagcattttgattcacgagtttattctgtttaataatttatgttgtaatccagttcaaaatcaaagaaaaatatcacttctggataggtttagctattttgcaaatcttattggacaaactcaaaatttcacaaaaatgtagtttactacacttacatagctaacattacgccttctcattatgcgattaggttacatccagcgaattcctacgagggtcctcaatgtggtacatgacatcggaagaaaggaagattagaacaaaggcattgcgttgcagcttttgcgatagcatgtatttgttaaagtgaaattttcattctatatcatacttcaacgaccatatttgagtttttaaaactatgtacttatttccaattactcataagatatattttgtttgtcaactagaatcacatacaaatgggttcgaatcgctgaacccgattctatgcaattattgagatttttaagttattgttacattaattgtagattttggattttaaacattttgggttcatatgctagttccctttgtatatttaattgttgcttttcccatggacaacacattacatttgtatcagtaaaaataaaacattttaaagaggtacatttcgaaagtataaacttaaaattcatatacagtaaagatgttatacatatcatatttgcagtggattgggtattacgcttgtggccaacaattacaattatactgaattataggtatgcaacagtaatactttaacacaaaggctcataacaataacaaaaattttatttatcggcgaaagggaatagtttctgctcggtttgatacatagattcattcgatattgaatgtattcaagtatccagatttatgtgctcatgtggattggtgtgtgcgtttcacttagttgtagttgttaaacttcaaaaaatgagtagaaaaccgattaaagaatgtatgcatttttatctttacaattcagtctgaaagccataatttacagtcaccagttttgaaaatgtactgtttcctgcttaactcttaaagttgtgtattgaaatttaatgatatatcaaggttccttctggttttggtaaaaccacattttaaaggtattaaatgtaatttaattcaatacaagtacggaaagttgctgtaaatttcgttgcattaagtggagaataaatattatgtaacctaaatttggtacccaaatacattattttgtttaatttcgcattcgatatttggctcagtatcgtttatatatatcgtgtgtgaatattgtttacgtgttcctgggactttacatccaaattttaatgcttttgggctgatgtttcttttttttgtttccttctgcttcagaagcttagtcttcatccgagtaatctgaactttcggaactagtaatatcacttgaaatcatctccagccaatgataatctcgccgatctacgtagtcccagagatatatctataaaatatgacatacattaattttggtgaccttctctaacgattttaggttagcttgttacagttacctaataaatacaaaaatacacctaaaaaatacaaaattgcctaataaaacaaccattcaaataaaaatgtaaggaattagattgtacatgctcgatctcagattttgtactcacatcaagtaaatcgattatttcattctggctctgtaactttcgggtgcgcttcggcaaacccacatcgacgatatctccgttgggcagagcgtgcttgtagaaacacttgttaccaaaggggcacttgccctctccttttttaaagtatttgcagtcctttgctcccaaagcggcgcggtaatcgttgagcaatttgtccttttcctccttggtctccatccagaacgcactgggacagacaaaatccgagcacacgcgacattcggggcaagctctgcagatttacgatcaaaattaggtcaaaattataccaccaaagcctcaaacatacatcaatttagtctgcattcagcttattgttttgtatgtttaaggtattagcatctagttaacgagtaatgcttcaattgaaaggattatttagaaacgcattatatttacgaaacttgtttgtcgttccactttattaagcagaatgaatagtttggttaaaattcttactacaacttcgatttttaattggataattactttaattacttggtagtcaccaaagaagcgtctctaaagcatttacttaccgcgttattttgttctcaaactgtttggcctgacgccatgtgcgaatgcactccaagcagaatatgtggttgcagttggggagaatgccgaagcgcttttctcttcccgccttttccataatcgtgtcaaagcagatgccgcacgtcttgtccttggatctggcaatggcgaaggacagctccatggcctgctcgtgctgctgaaggcactcacggttgtgactcctccgctgaacttgatccgtgggatgcaggcaatactggtcgcacatttcgcacagctccatgtgaatggggtaagcggagaattcgccccaggcgcaggaactgttctcctcgccatagtcctctttgttcagagacgaaggtccgcccactacttcggcccaggagacacccggggctaatgtatcgtagctggctccagcctgcgcctccatcaccgcctcagggtccacagtggtctcaaattcgctttgttcgtgggcagtatagcgcttttggctaggcacaaacacaggggcgttcgcccagttcctctgctgactggagatgctggcgctgcggctgccaatggtgctgctgctgcttgtactaggcttcggcagcacgtcggtggccacctgctcctcgcactcgggacgaccgcggctcaggtcgtgggagaagcggcaaagttccccaaagcggcagatgccgcgcacgtagtagcggcagatggtctggctccggccaagagccatgccgctgatggctgtatcgctgctggtgacggcactcatttcgctacgatgatcgcaaaagggttttcgggttttcaaatcactgacaagtctggacctgatgacctgaaagcaaaggcgaggggttagcgattgacgctaggcaaaatgggtaaattcaggaaaatgtgacctccagtctcaagcgttcttacccccaaacgaacatacctacagacacagccactgcgtacatacgcagattcggcaaacagagcccgtgtacccttaaaccacagttgttcgggagtttccgcaatccttagcaggaaagcacacgaaatgcactcgtgacaccttttgcatttcaaatatccccttagcatcagtgaaatatgcaatgtaagtatgtatgcaagtgcgaggattcctgtacgcatatgaacgttgcgatcccgcacttcaaaataacccttgcatcgcacgcgatgaatgttttacattacctgcttgctttcagggagtgcgacttcttgaaatcgaagctggtttaatgtccacagcactcacagtttcttactttgtcgttttatgcaccttggatcacattcacaatttttttccgcagtgtgaccaaagccattgaagactaaaatcacacgcacaacaaaccgtttactgtttgaatgttcgaacgctttttaaattttactaggaattctgggaaaggaacaaaagaatgaaaacgacaacagaagagaacgttttattcgactatcagatacccgagaaattttttaatttttttggcatatcaatagacagaatatcaaactggacagaaaggcgtaacggttttgggccgttagaattggcgtagcaataatcttcatcttaatccttctacatacataacgaatctactaagccttcttatttacgagtaacgggcataatgatgtaagataatatttaataataagatttacagtgttactcccccattctatcaaagcttagaaagcagtttactaatcaaaaggatttatttccacccggctatttatttaattagtgttaaagggtataccatttgtatgtatattgtataaataattgctcctaataatgacgcggcaatgacaggagcgcagcgtaacttcactcgaaaaaatttataaatgatacgtggtcaaattctgttagtgaacagatggagaggatttaacggaggatataacgtagttgtaacgttctaaagctttaatatctatatttatttatctgacattatctcaatgtaataattccgcttgtgtgaatataaaatttatctgactatcaaatgtacctgaacatatttgctgtgtagcagtaacgctctaattgactttgaaactaaataagataccatttctaacgtaaattaaggctattacaggcaatctgaagtaattagaagttattcgggccaactcaggtgaacagtattcataaaattcttctaaaaaccagaccatgcgcttgataaagaaattccatggaaaaattcgaagcgttagccgaaaaaggggaaaaagtttcctaagaaatacgtcaatggaaatgcttaagtacgttat

SEQ ID NO: 15977 - DNA, 2081 bp, DROSOPHILA
aaaaaaattgtgaatgtgatccaaggtgcataaaacgacaaagtaagaaactgtgagtgctgtggacattaaaccagcttcgatttcaagaagtcgcactccctgaaagcaagcaggtcatcaggtccagacttgtcagtgatttgaaaacccgaaaacccttttgcgatcatcgtagcgaaatgagtgccgtcaccagcagcgatacagccatcagcggcatggctcttggccggagccagaccatctgccgctactacgtgcgcggcatctgccgctttggggaactttgccgcttctcccacgacctgagccgcggtcgtcccgagtgcgaggagcaggtggccaccgacgtgctgccgaagcctagtacaagcagcagcagcaccattggcagccgcagcgccagcatctccagtcagcagaggaactgggcgaacgcccctgtgtttgtgcctagccaaaagcgctatactgcccacgaacaaagcgaatttgagaccactgtggaccctgaggcggtgatggaggcgcaggctggagccagctacgatacattagccccgggtgtctcctgggccgaagtagtgggcggaccttcgtctctgaacaaagaggactatggcgaggagaacagttcctgcgcctggggcgaattctccgcttaccccattcacatggagctgtgcgaaatatccaaggacaagacgtgcggcatctgctttgacacgattatggaaaaggcgggaagagaaaagcgcttcggcattctccccaactgcaaccacatattctgcttggagtgcattcgcacatggcgtcaggccaaacagtttgagaacaaaataacgcgagcttgccccgaatgtcgcgtgtgctcggattttgtctgtcccagtgcgttctggatggagaccaaggaggaaaaggacaaattgctcaacgattaccgcgccgctttgggagcaaaggactgcaaatactttaaaaaaggagagggcaagtgcccctttggtaacaagtgtttctacaagcacgctctgcccaacggagatatcgtcgatgtgggtttgccgaagcgcacccgaaagttacagagccagaatgaaataatcgatttacttgatatatatctctgggactacgtagatcggcgagattatcattggctggagatgatttcaagtgatattactagttccgaaagttcagattactcggatgaagactaagcttctgaagcagaaggaaacaaaaaaaagaaacatcagcccaaaagcattaaaatttggatgtaaagtcccaggaacacgtaaacaatattcacacacgatatatataaacgatactgagccaaatatcgaatgcgaaattaaacaaaataatgtatttgggtaccaaatttaggttacataatatttattctccacttaatgcaacgaaatttacagcaactttccgtacttgtattgaattaaattacatttaatacctttaaaatgtggttttaccaaaaccagaaggaaccttgatatatcattaaatttcaatacacaactttaagagttaagcaggaaacagtacattttcaaaactggtgactgtaaattatggctttcagactgaattgtaaagataaaaatgcatacattctttaatcggttttctactcattttttgaagtttaacaactacaactaagtgaaacgcacacaccaatccacatgagcacataaatctggatacttgaatacattcaatatcgaatgaatctatgtatcaaaccgagcagaaactattccctttcgccgataaataaaatttttgttattgttatgagcctttgtgttaaagtattactgttgcatacctataattcagtataattgtaattgttggccacaagcgtaatacccaatccactgcaaatatgatatgtataacatctttactgtatatgaattttaagtttatactttcgaaatgtacctctttaaaatgttttatttttactgatacaaatgtaatgtgttgtccatgggaaaagcaacaattaaatatacaaagggaactagcatatg

SEQ ID NO: 15978 - protein, 349 aa, DROSOPHILA
MSAVTSSDTAISGMALGRSQTICRYYVRGICRFGELCRFSHDLSRGRPECEEQVATDVLPKPSTSSSSTIGSRSASISSQQRNWANAPVFVPSQKRYTAHEQSEFETTVDPEAVMEAQAGASYDTLAPGVSWAEVVGGPSSLNKEDYGEENSSCAWGEFSAYPIHMELCEISKDKTCGICFDTIMEKAGREKRFGILPNCNHIFCLECIRTWRQAKQFENKITRACPECRVCSDFVCPSAFWMETKEEKDKLLNDYRAALGAKDCKYFKKGEGKCPFGNKCFYKHALPNGDIVDVGLPKRTRKLQSQNEIIDLLDIYLWDYVDRRDYHWLEMISSDITSSESSDYSDED

SEQ ID NO: 15979 - DNA, 8748 bp, DROSOPHILA
tgacatccgactggatggatgtccagacccttcgattcctcctctgcgattgccgtgttccttttggatttgcagttcaactgggagtcggacggaaaggatggactattggccgaggccattgccgtttaagtttaggcagcaaatgttttaaatatacacattagctataaatataaaatttgattattttttaataaacgccaatagaaggtaaaaaaaaaacagacatcaaaccctttcgaattaaattttatgagtttaccacatttaaatagattttttatctttttccagtatttatcagcctgactgataggctatatcatcatcgatctataaatataatcgttgcctaattcataagtgcagcaatatgacaataccattttgcactggaatatgacaatgcaattacatttaggcgattcgctggaaattttcaaatacatttccaaactaccggcctgcagggatttccgcagcgtcatgcttggcaggtcctttgaggaactttgagacctcccacagaaaggcgagattccgagaaacgagtgacccggactattcagaatacgtttccgtaaacagggccgtcaacaaaggcttctatccaccccaacccgcagataatttatcaccttgccacgtgacgtcttttcgcgacttgttgtctactttgcggcgcatatcgtgatcctgctgaataattgccaccgacattattcattcgcgaatatcgcgctaaactttttaaatgtccccaaaatatttcattgataaaaacggccgtggcttcgttttccaaggaggagtggccagtaaaagcttgtttgaagcttttacgcaatttttggcgcctttacatcggctcgttgaaatcgacgcactcgtcatcggccgacgatggcaacgaatcggtttcaacttcggatgcggccttataaaaggaagcggctccgcgagtcaaccacgcagtgttcaacaagtagtaggtgcaacagttgacagtattccgattctgattccgattcagtaactcaaacggtttccaggaatatattttaaagtgagtgttaacggtgtatttcgaatatcagtcacgccaaactctttaagaagtttccaaaaaatatcttgtggtctgtgtttaatttaagccagtcgatttcataaaaaggataactaaacgtgacgtgaaatcttagtaatgccgtcgctttcgtcatcgattacagtgtcgtcaatgaaactcgaaatacgcgcctaaaaaaataaataacaatttgtggacatatattaaatatgccaaataagaacaggagaactcttatatttaaaactattaagtgaattcgttcttaataatacagaaatatttttaaggcaaagaaaagccagctaaaacttaattcattaattcagtactttttctttggtaaattattttaatctgctcttatattttgaattgtatcagaagatatttaacacaaaactacctttggcttaaaactgaaaattaccataaagatagagcctagccattgtaagttctcttcaaaaataaaagtaaaattttcttattttatttcaccaacgctttttacaagaaaaccccatttatatgattaattttatatattatactaatcttgtaaatgtttaactacaataatttatttttattaatttattaaagttcaagctttttaagcacagagcatcacagctgaactagttaaatttaaaaattcatttcattgcactggtgagcttacaaattttgggaaaattggttttaaggttactcgggacagcaatccataaatactttatcaatgtcaataactcaaggaattcccaccaatgccaaacacaaatgtcaataaaccaatgaaaatctaggagaaacaaatagaaaaaagcatcaatatttgttgtccccgacctcgttctctgtttcaaaccccttaagttccacgtgcaaaaattcctgacaatcgtatagaaatttaaaaaaaaaaactgaatcaatcgaaagcattccaaagctgttttcatgtcacaaaaattcagcatcccacaggattttctcctggagaatgtatttactgaaattggttgtgctatttctttagacatagcaactgaaaagtatatctagaggtattgacttacattccgcaggctatacttttcattaaagattagtacacgattttgtagttggcgaggatttaaaactgcaaaaaaaatacttatgaatttcatggaattttcttggctagcaccctttttttgatttttcgtagcaatcattgccgtctgtctggtcctttggtttggctcaaacactttgtgtaaccttttgtgtgcaaattttgacaagtatcccagatggtcggattcaataagtagaaaagttatgtaatatcctacccaggattgttacgcacgtagaccgtgtctaattggccggactccggcgacaaaatgtccgatgcacttgaccaactccacatccttagccctaattaagcagtttttccgccacacatgtccaggtggtacgtaggcgaatatagtggcagataaggcctatgaaaattcctttgggttcgtgtgcgtttcggttacacttcaactcaatttagcaattagctgtgcggttattgcgaaaaggaaaacaggcgacgggtaaaaatgaacgtacaattatatatgggttcctgaaacttccctcgcttccaagttaatttcattttaccttggggacatcgccaaccagggtgaattcccttcttttgctttttttttcctattttttgttttttgggctctgtccactttttgacactgtgtcaacaagttaattaaggcattttaacaacgattcgtgtttgctttgtttacttataattcgttctctccgcagcaatttcgaataagttgtgctttcccaaaaataacgccaaagtgtcgcccacttaagtgagtgccaataaaagaggagtaattgaaaaagttttcttgcaggaaatgcccgaagaaattgcaatttatttccaaaattaataccaaaaaaaaacaggaaaatcgcaatgcacttaaagacctaaatctacgagagaacattgttcgcaaatattttgacaaagttgcaaattttcaattgaatttaatcaaaacgtgacgaaaagtgaaaagaaaatcatccacagagaatttctctttctccgagcaattttaatgaaccaaatgcaaccgtctttatttttttgagagggcgtgacagagttgatttgcttgattgatttatgtggttaactaaccatataaattgagctaatttcaatgtatttatctgtgaggtagaacagattttctggaaaatattttaataaagattaatattattaaattatagaattatgtaataaattataattccttaaaaaaacagacgcttaaactttcgcagcaaacagcgctttaattatttaccaagcccttaattaaataatgaactttggatttcttggtgaaaattttcacacttttttgtcgaaatttgtcttaggcatacattattttcagttgcttgggcagacaaattaagccgatcctagacatctcaaccagcgagaccgcaagtgccaaaagtttcaggcaactcatttatattgctcgtcaagcgaatgttttttaaacgcaaaaaaatgcgataaggttggcgggtttccccaaaaccccaacaaccaggctcctgagctaaatgggctaaaaatacgctgcgaaggagttaagcccactcgctcacttcggcgacgtcccatccttaattaaatgaaacgacaaagcgcacagagtgggcccagtatgaaccgcgatgcagtacctgacataaaaaatatttataaaagcacacaaacacctactgcacagtggtggaaatctatgcgaaaagtaatagcattcttatcaattttaattagaaacatctttcgttaaaatctacaagaattatagagtagctttcatttgtctataaataaatgggatgttaaaaattaggcagtactttttaatattcgaatattaatataaatatattatttttctgatagttgaattgtgtaatttctactttataaacaacatactgcatccgtctttgttattaactatttgtctgcaaagtacacaacctttatatttttacccaatttttaaataacggccttagttagtggaaaaggagtagaatttgtttgcccgtatggcccacggttcttcgcgcgaagaaagattaagcaggagcgcaaaacaaaagccccagaatcagccgccaagttatccaagagacgcccttttgacgtttggcacccaccgcccatttctccagtttccctcgcgattctcctacttttggcgggggtttcttggttgcttgcgtgtttatctgagtattgtttgcttgagcacaaagagacgcccacacgcacggcataatggggcggatggggtaggtatccatcccatggccgtggtagtgacggtaattaccctcttgtacaaacatctacgctttttttttttttgccttccagagacatccacatcgccaacgacccgcgcactaatcccgagctcatccgcagaggctgtatgaacatgaagcccgacatcctagcgctctgcatcctggctaccacgatcctgtgcagcaggacgcgtcacgtcgccggcttcctgactgcacagtccaccgccagcggaggagcaggcggagcaaacggtgccaaagtgggtgaccatcagggcgtggcgtccgtaccacaacgtcttcatttgcccgttctagcggtcgggggcggacccgttcgccaaggacccgctctgcccggcgatgtcctggatgcccaggaacgagctgtttacgatcccggcgatggtgagtcataaacatccctattaccgctttccttgccatggtaaacttcccgggcatcagctaatccccagtcgaattaaaaggatagcaactgcatccaaagaccatttcaattaaattgttatcgggttctttttgaatgcgaagacgtaatcgtggtcaaggtgaatcctataaccaagctattccatcgccctataaaaatatatagaccttatttatattagccaaattaataggcattctgatccataaagctgaggaactggaactgaatctgttcaggaactttaataaatgaactagttattttgttgtcatttagctatttttctaaaatattttcaatatttaatggcagttatggcctcctatttactcctcacctgagtacatgattacgttcaaaatttttgcttgccgacttttaggcgacccattcgaaaggggtggaccaagagttagggtgacccatggcgtgcacttagccgtaaccgtcgcccaccatctctatccctaatggccatggtgaccaccgctcgctgaacattttcggtcagtgcacaatttttcaagtgcctcacattgttgaccatcgcacaatatgtggagcatgtgtttgtttgtgctgagcacttaaaacgcccaccaaactgcccgggatagattttcaaatttgttgacgaatttgattcgacgtttgcgttttacgttgctaccacctaccttctaccaaccggcaataaaatgtcatatccgattttcaataagcgaacttgttttccaagcgatttgatagatgggtaaatggattggaaatttaacgaatatcgatttggtttgagttggtaacatttgaatttttggacatgatcttataaacatacatatatgaaacaaaaatttaaatttatttctgtttctgatctcgaaactatttatttcaattgaggagtccttaaatttaaaactgtaaatgctttgggttcatgagcgtccgctgtctgcggctctttgaagagacatcgagtggacagtgatgggcagactggatgccaaatgcgacaaaaggcagtcaaggagttgcagtgcctgttgacttgactgacggacgtggtcgaaaagccgagaaggcttcccctgccgcggaggggaaaaggaatgctgtggccataaactcattgccgccagtcaatttccgccagtccattgaaacgaccgaagagccgggggaaaacatattccagccaaccaggacagacagacaaacaaactattcaaactttcaaatatcaaacggcggaagtttccgatggcaaggagcaggagtcggggaattaagtgggagtgggagtggaagtgggaatgggaatggcaatggcgtggttgtggtcggattagcgacagcttgaataaacattcaaatcgcaaataaggtctttggcttgctcatttcacggcagaattactccgcgcccaggagctcggattggcagtggttcctcaaggtcccgactacgcggatgcggtgtacaacgaactcgagctggccagcaagttcgaggtgctcaagaagatggaggaggatttgcgtgccgagcaggagctggtggacaaatccgctttgctcatgaaaatgctggaggtgagtgcgaagacaggctgtcgaaatttcgatgaaaatgttgaaaaatacacggtaaattaaatttttttaaaatattaaacataaacatcaaaacatattagcttttgcttataaataactttttgagtaatgcatacttaagtgataatatttttaatttttattaaaattttaacacaattttttgatctatgtgcattttttcgctcaggatccctcattggaaaccttgcccttggtctacgtggaggaggaggagccggaggctgtgattccttccggcggagccgaggactacgccgacttggagaacgccgttcaggatttggttttgggccagagcaaatccaagcgttcgcgctactatcgaaggtatccatggaagcgtcacaacaagaatcgcgggtaggttgcttttctatatttaaacattattcacaataatccgaaaatccaccaagcactatactcagctccattgaccgctaattaatcgaacccacttttcatttgtagttagtaaatgttgtcagtagtctttatgcagtattaagtagcatatttttagagcttagaacggaaatcctaaaattgccaatttcaatacgtctgcttgggaatggaaagatttaatttaaagtaaaaatgtgataaattcaattgcaacgaattgacgtaaatcaaaagcatgaacctcgaaagaaaaaatgcaaagaatggcaatttcaggagcatccttgccaaaacgcccacccaccaagtagtctattgaatttgaacaacttaatgtaatgcatttatcagagtctctttaggcccgaaaggcgcccagacaccagacacccagaacttcccaccgcccactgagagatcgattattgattactgattactgatagccgaagcgtgaacgattttgctaactacataaccattaccattatcagttcttacatgaattctatcaacagcaactatgaaccggaattgcgttatgcctgcacacctagtaaggaggatatattcaagctgctggtcaatctgcacgagaatcgcaagggcaatcacagcaagacggttaacttctgcaatcgaaagcgtccggccaaggcggtcttcaccaacattaggttcctgggctaaggcacaggatctgggatggaagccattagcccacacacacacagacacagacacgacactgacagacacatatgtataccaagcatcaattgtacattgctgacaaagtcgagcgctaaactggagaacaacaagcactaacaattagcctaactaatttactaactacttaacttaacccgtctaaaagagctaaacgagctgaactaaaaatacttcgttatctcactagggctagagacccttgtaagcctcccctaattccaattgtagacaattaaaacttttataactctcaatgtcttgtatatactaacgaaataaacaaagttatagtagctcgctcccttttgttaatttcattgtggtcgtcgcgtgtgctaatccaaacaattccaaaacgttgccatatcactctaaagtctcgtaacgtcttctcggtccattacactattattataatgagataaatggatccacaatccccaacgctaaatcagtgtgtatatacgagaatattgaaaatgtgtgtattaatatataaatgtgtacgtgttaactacttactaactgaaactatctttaatgtaaagtcgagaagtatatatatatatttcaaataaacttatgaaatactattattcgtatgcaattaaatggtgataaggcgttttcaattgacgttaagggttcgattaagcatttcctagcatatcatcatgtatcattgatactatactcttaaaataataataaaaactcgaaattttaagagttaatctacttttctactacattttgaaatgtttatgtacaattggaggatggaactatttctttggtgtaattagtgctagtaaattgaacagatcttcaatagtttctcacttccacaacaactccgactcattgtttaaaccaaataagtaccgcgattgtaaatggaaccaactaacacatctgcggaagtgcgaaagtgccaccctgacattgagattga

SEQ ID NO: 15980 - DNA, 961 bp, DROSOPHILA
acagttgacagtattccgattctgattccgattcagtaactcaaacggtttccaggaatatattttaaaagacatccacatcgccaacgacccgcgcactaatcccgagctcatccgcagaggctgtatgaacatgaagcccgacatcctagcgctctgcatcctggctaccacgatcctgtgcagcaggacgcgtcacgtcgccggcttcctgactgcacagtccaccgccagcggaggagcaggcggagcaaacggtgccaaagtgggtgaccatcagggcgtggcgtccgtaccacaacgtcttcatttgcccgttctagcggtcgggggcggacccgttcgccaaggacccgctctgcccggcgatgtcctggatgcccaggaacgagctgtttacgatcccggcgatgaattactccgcgcccaggagctcggattggcagtggttcctcaaggtcccgactacgcggatgcggtgtacaacgaactcgagctggccagcaagttcgaggtgctcaagaagatggaggaggatttgcgtgccgagcaggagctggtggacaaatccgctttgctcatgaaaatgctggaggatccctcattggaaaccttgcccttggtctacgtggaggaggaggagccggaggctgtgattccttccggcggagccgaggactacgccgacttggagaacgccgttcaggatttggttttgggccagagcaaatccaagcgttcgcgctactatcgaaggtatccatggaagcgtcacaacaagaatcgcggcaactatgaaccggaattgcgttatgcctgcacacctagtaaggaggatatattcaagctgctggtcaatctgcacgagaatcgcaagggcaatcacagcaagacggttaacttctgcaatcgaaagcgtccggccaaggcggtcttcaccaacattaggttcctgggctaa

SEQ ID NO: 15981 - protein, 275 aa, DROSOPHILA
MKPDILALCILATTILCSRTRHVAGFLTAQSTASGGAGGANGAKVGDHQGVASVPQRLHLPVLAVGGGPVRQGPALPGDVLDAQERAVYDPGDELLRAQELGLAVVPQGPDYADAVYNELELASKFEVLKKMEEDLRAEQELVDKSALLMKMLEDPSLETLPLVYVEEEEPEAVIPSGGAEDYADLENAVQDLVLGQSKSKRSRYYRRYPWKRHNKNRGNYEPELRYACTPSKEDIFKLLVNLHENRKGNHSKTVNFCNRKRPAKAVFTNIRFLG

SEQ ID NO: 15982 - DNA, 6942 bp, DROSOPHILA
acatttaaggcaattcattaacgcaactaacatatgggagtcaaagagccaaagttaaaaactaaataccaacaggtggactactgcccaaatacgagaagaaaaatgaaaaaacatcagatacacgaataacatggctaatcatgcactagatttcgggatatgtgtcttttttttcacaggcccgactaaaaaatgctgcctcggtttttttttcccccaatttttcaccgcgcatttgcatacgagtggccaagtcgacggcgccacaatctcctcggttcccagccaccagcaagttcgaagatttcggagagccgagttgttagcggcaattattgtaacctgcagacgggccgcataaatcagcttaattgctatatttaaattctaaatttggagctctggccaagtgcgctgtctagttgtgcaagtgacacggtcagcgtctatttggacctgcaaatctaatatatgcatggctatagtttttgggcagcattaacaatttatgcaaattaatgtgtgtgtgatggtggtcccctaaaaaggcaaatttattagaagtatgcatatttaaattaagatatgcctgttatgggtgttgtaatgaatgttaagtattttcacatgtcgatttttaataacaaagaacctaatgaacttattacacatttcaagaaagttctaacggttggttttaaaattcaaaattcgatagaagtcgatatattttcaatggtttgtgtccacgctacgaccacagtcaaattggaaattgatgtcaagtatttgtgattattttatggtaataataaagcgatttaggtaacaaacacatctaattaaattctattcattaaatatattttatcgtagttgtattctcattaactgtcaaattgcggaataccccaaacaggatgtggtattttctagtatgcgagcaaaaatataccgcataggttttccacatttcagctttacagtcacactgcaccgctccgccattttacgctgacaattttttcgcaagattgaagaaactagttcgtgcacgagtagaatgtaaatagttacagaattcacccaacggaaaacaacgcgccaaagcaattaatcaattaattgtgcagcgggcgcgattacccggctaaatcgcgcagcagcacgccggtttctgctccggcttccccctcccccgcaaaaaaaaagaaactgtacgaggcgcgagtgcaagtgggacagagacggaaagattggcgagtgtcttagtgtgcgtgcgaaaattgggaaaagcggtgaaaaatcagtaattacgcctaggaatagcaacttttccggctcaacatggccgacgtggtcttggatctgtacgcggaggacctcgacaaggactttgccgggcaggctcaggtaagccatgggaaaaaggcagtcgctctgcaagccgcgtgtgtatgtatacagtagggtggatcgatgtccgaaagaattgcgttagggggtagaacggcgtcttgggcgaactcgaccacttggtaccttgtaaagtagggttctaggaactgagtgcagggatattatatttatataaaaatgaaacgtaattttttttaatttctttagccatggaaatgtagagaattgtacgaatcccaataactatacattctaaaaattctaaagtaaaaatagagtaaaatcgaatttgtaaaaaaaacaagacttgatcgtttatttttaacgattttacgggattcccacaacagtttgacccacttgttaattactttgctttatccgcacaggacgaatttggaggcgatggagtagacctatacgatgacataggcggtcccaccgaatcggccgcctcaggtggcgggggcggtggaacgccctccgcagatggagccgcagggccaggctccggggaacccggcgaacggaattccggtggtcccaatggggtgtaccatcagagcagtggtagcctcactccgaccatgaatcgccgctaccagctttatgtgggcaatctcacatggtggaccactgaccaggatatcgccaattcgctgcgagacattggcgtgagtgatctacaggaagtgaagttttttgagaacagggccaacggtcagtcgaagggcttcagtgtaatctccctcggctcagaatctagcctgcgcgccgtgctcgaccagctgcccaagaaggagatgcacggccaagcgccggtggtcacgtatcccagcaagcaggcactcacccaattcgagagtctgcaaaagacgcgtccagtgccgccgccgcagcagaatggaccgcccaggggtccggcaccacccagtatgggtggcgggccaatgcccaccggacatccaggaggaccgcaaggaggtggaccaccgggacatccaccgcgcgggatgaactccatcatgcagccgggccagtaccgaccgcagcacatgtcgcaggttccccaggtgggcggacccaactcaggacctccacgaatgcaggtacacaaccactgttttagccccacatggccccaagaggtctcatcgtttgtagaaatatcgctcggttctaatttgttttgtttctacattcctacattatttcctatttccatcaaaattgttctgaatgcaaaatttgcttacttaggtaaaattagaaaccctaaatatacgacttcatgtatagtttataaacgaatatgttctacttcagttgttcgatattcttttgtaaattaaacgtagaaacttagttttacaatttagagaaaacaataacgactttagatgtgagatataaacaatctgaaatatccgatctcttgttagtatttcatttgataatttataaactaaactaaagctgtcgtacaaattaagtttctaagaatttttatttatgtctttaagtactattcttattctttacttctattaattcacaagtaatttcagagcaattttttgtagcactcctcggcctaaggcagtttgtattctttttactccttttgtactctagtcatagactttcaacaaaaaaaagcacatgtaataaattaaaatcaagagcagtgccttcctggttccactcaaataatatatacttttgatttaattgcgttaatgtatttccccccctagtatttgtaattgtgtataatggcccgctattgttatacaaaatgtttatgtattacgatttatgttctattccatgtctttgacaacgcttacgcacacttctaccccacaacaacaactactacttcaatataaaacgtaattcgtattaatatagccgccaatgcatccgcaaggcgggctcatggggaaccaacagccgccaccccggtatccgtcagcgcagggccaatggccaggtcagcggccaggcgggccgcgaccaggtccaccgaacggaccaccgcagcgaccaatggtaacaatccccaaagcactgagtcctctttgtatctatgccataatataattctaacgaagccagagagaaggcgagataaaggaagactaacccaacttaagttaaccttagttaacttagtcttaagcgatgtattcagaacattttcagtaattccacagatcaacccatgcaacacaaactcatactatagcttagaaaccgattcgatccgatcattgggaacagtaaataatcttgtctcttctgccttgcagttccaaggaggcccaatgggcatgcccgtcaggggtccggcaggtcccgactggcgtcgtccacccatgcacggtggtttcccgccgcaaggtccgccacgtggccttcccccagcaccaggtccgggcggaccacacggcgcacccgcaccccacgtgaacccagcattctttaaccagcctggtggtcctgcccagcatccgggcatgggtggcccgccccacggagcaccaggtccacagccaggcatgaatatgccaccgcaacagggcatgaacatgacgccacagcatggaccgccaccccagttcgcccagcatggaccacgtggtccgtggccgccaccgcagggtaagccaccaggtcccttccccgatccgcagcagatgggtccgcaactgacggaggtggagttcgaggaggtgatgagcagaaatcgcacagtcagcagttcggcgatcgccaggtgagtgcaaaggtttttaaaatgttttctttaacgaggtcaaaacttgtagttattatttaaaaactaacccattcctaagtcgaattcatagaaaattccaattattgaaactatgactcagatccggtctaattaataaattatctagataattaattactttgttgatcaaatatcaattccctttttatgctaatttattttcagagctgtttctgatgcagccgctggtgaatactcgagcgccatcgagacactggtcacagccatttcactgatcaaacagtccaaggtagcgcacgatgagcgatgcaaaattctgattagctcgctgcaggacacgttgcatggcatcgaggccaagagctacaataggcgcgaaaggtcgcggtcgagggagcgatctcatcgcagccgacagcgacgtgagcgttccacgtccaggtaccgcgagcgatctcgggagcgggaacgcgatcgggatcgtgagcgtgaacgggatggcgggtaagttttggttctaccatgtgtaagcctcacacttaattccgtattcattttctagaagctacagagagaggtctcgcagtagagaacgtgaacgccaggctccagatcactacagggatgacaggtaaagacgttctacttctaaaaattcgcttcactgtctcatttaaaagttgctgattaattaatcatagtgcttcatttaaatagcatagaactcataatttattcactcgtaaacagattttttacttttgctgtaaaaacaagtgtagatttgtaaagtcagacgaaactttattttaaaatatttggaaaaatgtataatttattaaaaggtagtatttttaaggtataggcttttcaaattttttattttcattaaaagctttctgtaaagatgttagcttgaattgtaactgtttaggctcatcagaatatttttgctcttttgtgcaacaatatacggtgacaattaagcgaattatttttaagctcgaaatgaaaaccttgcgttaatttcaatcccataatccgaaaacagccgatcggtgcgtccacgaaagtcgccggaacccgtagtcgccgaagcagcggaggcgccatcatcgaagcgctactacgaggatcgggaaaggtaccgctcctcggaccgtgagcgacgcgaccgcgatcgagaccgcgaccgcgagcgggagcgtgatcgcgacaggcgtgaggagcaccgttcccggcattgactgccgtaagtggaagttggaaccatcgccagtggacccgtaatcaagtgtaaagatgcaacacagatatactaaacacactctattaacaaacaataagccgcagcttggtgggatgacaagctagccacaattaacagattttcgatttgtatctaacattaccaatacgtaggatatgaatatggcaaacagcatagttcttctagacatactataataagccgaaatgctgacaagattttaccaacgacggacggggactgcctctggatccatccaacttcacatcacagaatcctggcaacatcaagaccggcagaccgaagtcagcagcagtagcaggaggatcgatggagaagccaaggggacagtcagcgtgggacattatagacactgatgcgcactggatcatcaaacaacaaacaactagcattcctgcaccgccgtcttcgcagcagaatttcaatattattgtactctaaaatttcggtttatttaataaaacataaacgtatgaaaaaaagaattgttccagaaaaaacctttaccaaaactgtcttgtattgtgtgtcttcttgtactcttattatataaaaaaaaaaacatcttattagttaatgactttataattgtacaacaaaattgtatgtaaaaattacaaaattattgcacttgtgcgtgcaattaatatggaaattgttatattaacaaaatcattttgccgactgaggccgaaaatcgttatccctaatgtattttcaaatatttcgcgatcttttgttgtaaacattctccacgcatttgtttaatcttgtttttatttaacaattaaacttaagtcgatcataattgtgtgcttgagactgagtgtgagtgaatttttgtagcattcaaatgccgactgaatccatccgcataaacggatggagaaaaccatatgtttgtatagaataagtcgagtgtgtgcttttagcccaaataccatgatttttagactaaattactctaaaagagaaacgtcccaatcgcatttatcgtagttaactatactaacgttacaagctgatgtagttcctaacataggttccaagaaaagaacaaagtcattcagttccccccgagatactgtactactcgcggctcattttacacaacttaggcctccaattgtatcatctacattttacttttttaaattctagctttacttttaatttgtatatacattttgtaaacgatactcgactaagatcatgtcccactaatcccgaattgcaattacaccttgttaaatcaagtctacgatttgaaaagtacctgtaactctccgcagagcgagagcctagaggtgttaagagtattatgagcttaacgatgtcttgtacaatttatactgtgattgtgatctcgatgaaacaaactacatatgaatttatacaaaccattactgtctgttaagtcatgccaaagcaggtaatgttg

SEQ ID NO: 15983 - DNA, 2459 bp, DROSOPHILA
cgctccgccattttacgctgacaattttttcgcaagattgaagaaactagttcgtgcacgagtagaatgtaaatagttacagaattcacccaacggaaaacaacgcgccaaagcaattaatcaattaattgtgcagcgggcgcgattacccggctaaatcgcgcagcagcacgccggtttctgctccggcttccccctcccccgcaaaaaaaaagaaactgtacgaggcgcgagtgcaagtgggacagagacggaaagattggcgagtgtcttagtgtgcgtgcgaaaattgggaaaagcggtgaaaaatcagtaattacgcctaggaatagcaacttttccggctcaacatggccgacgtggtcttggatctgtacgcggaggacctcgacaaggactttgccgggcaggctcaggacgaatttggaggcgatggagtagacctatacgatgacataggcggtcccaccgaatcggccgcctcaggtggcgggggcggtggaacgccctccgcagatggagccgcagggccaggctccggggaacccggcgaacggaattccggtggtcccaatggggtgtaccatcagagcagtggtagcctcactccgaccatgaatcgccgctaccagctttatgtgggcaatctcacatggtggaccactgaccaggatatcgccaattcgctgcgagacattggcgtgagtgatctacaggaagtgaagttttttgagaacagggccaacggtcagtcgaagggcttcagtgtaatctccctcggctcagaatctagcctgcgcgccgtgctcgaccagctgcccaagaaggagatgcacggccaagcgccggtggtcacgtatcccagcaagcaggcactcacccaattcgagagtctgcaaaagacgcgtccagtgccgccgccgcagcagaatggaccgcccaggggtccggcaccacccagtatgggtggcgggccaatgcccaccggacatccaggaggaccgcaaggaggtggaccaccgggacatccaccgcgcgggatgaactccatcatgcagccgggccagtaccgaccgcagcacatgtcgcaggttccccaggtgggcggacccaactcaggacctccacgaatgcagccgccaatgcatccgcaaggcgggctcatggggaaccaacagccgccaccccggtatccgtcagcgcagggccaatggccaggtcagcggccaggcgggccgcgaccaggtccaccgaacggaccaccgcagcgaccaatgttccaaggaggcccaatgggcatgcccgtcaggggtccggcaggtcccgactggcgtcgtccacccatgcacggtggtttcccgccgcaaggtccgccacgtggccttcccccagcaccaggtccgggcggaccacacggcgcacccgcaccccacgtgaacccagcattctttaaccagcctggtggtcctgcccagcatccgggcatgggtggcccgccccacggagcaccaggtccacagccaggcatgaatatgccaccgcaacagggcatgaacatgacgccacagcatggaccgccaccccagttcgcccagcatggaccacgtggtccgtggccgccaccgcagggtaagccaccaggtcccttccccgatccgcagcagatgggtccgcaactgacggaggtggagttcgaggaggtgatgagcagaaatcgcacagtcagcagttcggcgatcgccagagctgtttctgatgcagccgctggtgaatactcgagcgccatcgagacactggtcacagccatttcactgatcaaacagtccaaggtagcgcacgatgagcgatgcaaaattctgattagctcgctgcaggacacgttgcatggcatcgaggccaagagctacaataggcgcgaaaggtcgcggtcgagggagcgatctcatcgcagccgacagcgacgtgagcgttccacgtccaggtaccgcgagcgatctcgggagcgggaacgcgatcgggatcgtgagcgtgaacgggatggcggccgatcggtgcgtccacgaaagtcgccggaacccgtagtcgccgaagcagcggaggcgccatcatcgaagcgctactacgaggatcgggaaaggtaccgctcctcggaccgtgagcgacgcgaccgcgatcgagaccgcgaccgcgagcgggagcgtgatcgcgacaggcattttaccaacgacggacggggactgcctctggatccatccaacttcacatcacagaatcctggcaacatcaagaccggcagaccgaagtcagcagcagtagcaggaggatcgatggagaagccaaggggacagtcagcgtgggacattatagacactgatgcgcactggatcatcaaacaacaaacaactagcattcctgcaccgccgtcttcgcagcagaatttcaatattattgtactctaa

SEQ ID NO: 15984 - protein, 702 aa, DROSOPHILA
MADVVLDLYAEDLDKDFAGQAQDEFGGDGVDLYDDIGGPTESAASGGGGGGTPSADGAAGPGSGEPGERNSGGPNGVYHQSSGSLTPTMNRRYQLYVGNLTWWTTDQDIANSLRDIGVSDLQEVKFFENRANGQSKGFSVISLGSESSLRAVLDQLPKKEMHGQAPVVTYPSKQALTQFESLQKTRPVPPPQQNGPPRGPAPPSMGGGPMPTGHPGGPQGGGPPGHPPRGMNSIMQPGQYRPQHMSQVPQVGGPNSGPPRMQPPMHPQGGLMGNQQPPPRYPSAQGQWPGQRPGGPRPGPPNGPPQRPMFQGGPMGMPVRGPAGPDWRRPPMHGGFPPQGPPRGLPPAPGPGGPHGAPAPHVNPAFFNQPGGPAQHPGMGGPPHGAPGPQPGMNMPPQQGMNMTPQHGPPPQFAQHGPRGPWPPPQGKPPGPFPDPQQMGPQLTEVEFEEVMSRNRTVSSSAIARAVSDAAAGEYSSAIETLVTAISLIKQSKVAHDERCKILISSLQDTLHGIEAKSYNRRERSRSRERSHRSRQRRERSTSRYRERSRERERDRDRERERDGGRSVRPRKSPEPVVAEAAEAPSSKRYYEDRERYRSSDRERRDRDRDRDRERERDRDRHFTNDGRGLPLDPSNFTSQNPGNIKTGRPKSAAVAGGSMEKPRGQSAWDIIDTDAHWIIKQQTTSIPAPPSSQQNFNIIVL

SEQ ID NO: 15985 - DNA, 5762 bp, DROSOPHILA
aatattggtttagtatgtataatttgtttacttaggctaagcgcatttttctatatttccatctttttatttagaaggtacagagagactgactgagagatctatgtatctgtgtatctggtaggtgaaaacgaatgtagtatgtatgtatgtactatatgctgcaaaacttctatatcattatgaatttttgctatacttattgtgatcggaatctatgtacagtgttcgtgtagcaggcagtgccacgtctacacgttgcttacgaactaatttagtattcattacgctatttattcattcagtttcgacgccctcgaactgcttaaaaatttaactaaacatttcatttacgtcccgccctcgctggaactaaagtatttaattactttactcattgtttataagtgtatgctttcccactcataagtattcgcattggatttaatgctaaatcaaatactttgttaattaaatatcttagcttaatacatgcttgatatgtagttctcatgtaaattagtgaaataattgaaagttcacagaagagaagtggagtgtttgttggtccagttggagatgagctaacaaagtctggtttctatatggattcgaggtaggaaataacttagtgttacgttaattttgtgtgggactctggtgcaatttataagtaggtgtgttcttccttggcagtctgtagattgtcataaaatgaaaagaaattcgattcgattaccaaagggaaagatcgaggaagttacttcccaagccaaataatcaggcattcaaatgtttacgtatcttaaaaatatgtatttaaagcttatacgaatcgtaggtatctatatcattagtttaatttacgttcctttaaatttgctacataggtctatccactatacatctgaagcagcagttcaatcgatttctcctacgattttgggtacatccccggcatttccggtacaacctcggtgtgtttggatccgctgctcaattagctggacgtacagttgtacgggtcgtccgtgcggaagttcggatgatcctcgaagggtttcacgcccgctgcctttttgtcatccctcagcttttccacctgctgcatgaccctgaggaaattgccgcctgccagcttcgtcagctcgtcaattgtccagccgccgccaaggagttcggcaaatagagtcggatatgaagacacatcctccagtcctttgggcgtactaaaattagaagaaggaatctcagtgcattagcttttttgtcgaaatatgagttatacattttggaataatgcttccgcataaaacatatatttgaaaaaatttctaatcacaattaaattaaattttcgtgcactacatacaaaataaattggctaagctgtccagaggcagagtccacggcaaacaaactctgggcgtaataaagtcgcattgggtcaagctacagaggaaaacaaataaataatggattgcacacataggaaaataaataataaatatacattttgcaggccgaacactcaagtgctcggtaatcatattttatgaacagaaatttgtacaaataaataataatttagttttctatgcaggcgtttaggccaaacacggtttcaatgacacaaacagcaaaaatatgggtcacaataccagtaaggacaaattaaacagggtgatgcaccataaatccgatttatttatatttattaaaacaatcattttcaattaaatggactgccaaccatgtaatattataagagcactttatattaaattattatcaacattattataaaacattcgcgccaccctgccgagtcaatataaaacaatttaaggattttccaaaaatttgccaaatcgactgcggttggaaaacaatttatgtccttttctcctagtttggcttttgccattttcaagttctgcatgcgaatgtgggcagaatgtttattgtgcatgtgtgtgcgtttgtgttgccaaattaatagcacttatttgcggcttttgatggccaaaacttaaaattcaattcaatatgtcgatcaaattatcggcacaagtaatgacaatttaattgaatagataaacctcaacctcgaaaaatgggaaggtgtcataggggacagccaatgagcctttaaagtggaaattcgcgttatttgccgaatatcagcccaggatatcagccatgcggtttgacccgaaccggaaacaaggccatttgacatttggtaatttcatagaattttagattatttattgtgccatactcatgtttgtttcgtatttcggtccccggcaattgccccataaatattcatatacaccaatttcagttttcttgttttcattgggccccaaaatacctcaaaaacatttatgtggtcgcgctgctgccccgaaagaccaaaacaaaatgaagttcatttcggtggaaattgatttacattgacatttttatgtcgtccttgttgttatttttgcatgggaatcctgctcatttttgctcatttttggccatgtcctcaaaatatttaatgcaaaaacagcccagcgagatgagactggacgaccaggtaggtttatcaaaatttcatcctcaacattttgtttgttttcgcattgtgttcacgatgcaatgaaatggaaatctatgcaaatgcattctccgcagcatcacgggaataattacaacgataatgaagatgaatgagcttgatgatggtgatgacgctgagtttggggaaaaaggacattctgccactggtcggctcatcgaggtaatgaacatttcgctcctgctaatggggacaggctttaaatacttttggacaaattctgattggtaagtgatttactggcagctttgggctgcgagctcatttaaataccagatttcgcaaatggaatttagctggatttttcggtacttaaatattttgctacatagttttccggagcatgtcctcattgcagtgttttttccgaatttatcgtcgaaagtagtgtcagccatttaatacactaacgactaccataatcttatggtatcttatccacatatttacgatggctgataatcttttattaatggccacctggatgcaagttgagagctcattaaattaacttgaaaatctcggtaaacagattgcacattgtttgcgaaaaacatgagagaacaaaagggaaataatggaaaagtgcccgtaatgagcggtaaaataataacgatctatccgcacccatcgcgctctggcaatatgccaattttaagtcctcgtccttaaatataatcaattaataacttaaaaaacagtaggtagattggcagccagaggaggggaaaccacctggaggtggtaacatatatatatatatatatattgactacggcgaggacgagcggaggaatgcgaatttaagtgaaataaatgcttttacttactaattaatgccgtcgtagccggcgcccagtccaacgtgatcgatgcctgcgactcgcttaatgtgattaatatgcgctgtgtgtgtcgaaagtgtgttggtcagcggaaggatatccggtggcagggttaccattcgtcgtcaagttcattaagggccattgttgcaggttggacgccattgttgttgtatggccgtcataagtcagcgttattaaaattttcgcaaatttgaaatgtgtccaagtcgaccgaaaaacaaagaaatggaaagaagtaggcattagaggggcttattgcaggagaaacacttggaaaatcgctttttattaccacaaatattaatatgcaatttttaaatatgtagtatacgttgttcatttatcatttatttatacatagtgagcaaatcagtaaaacgttcaatcaattcgaaatggacaaacaacataatctaatcttggtactgataatttttccttgtgtagccaaaaaaagtggtgggaaatctgcggggattcaaaagaagacatcgagtcaaggaagtgattacgagacccattttgatggctcgtcaaaagcaatgccacaaaaatcagaatagggacaggatgaagggagtgaaaagaagataaaaggtaataatgaactaactgaaacaatagcccggcaatcaggattcagcgcaacaaagagcaaccgcggccaagtcactggctttgattgatttcggatggggcaaagttccctcgaaggcatctaacaaggtatataagttataatacaacccttgttaatttttttcacagacagccatgtcacgtttacgatagatttaaaatataaatatttatggtgactaaaaagcttctgaaaaagtgtctatgatacataagtgattagaaattggatcttaacttcccgaaataaaagttagaaactgacgaattcttactttattgatgtttcaaataactaacgataaactgtcttacaaataagataaaaattataagagtatactttgaaatgggagcacttaccgactgcatcgtgcacggtcgagttgtcgctgcaggataggaacttcgagtagaagttgaccatgaccaggccgccgttcttggccagcgcctgcaggatgtcgtcctggacgtttcggctcgtattgcacagctcgtaggcggaggaatgcgagaatatcacaggtgcctcgctcacctccagggcgtccctcatcgtgcccttggagacgtgggacagatcgaccatcattcccagtcgattcatttcgcggatgattgtctgaaaggcgcagggattcgcatgaatggattagtcagaggtgcgtattcgtggttagtcagtgattagtgctaagcagttgctaagaccctgctccctccattgtagtttacttatgcaggatttctgcaagagcgaaatgccgagggcataaaacctaagtcgcatgtcataaaacataagtaatgaccagcgggccaaaggacatctggaagccgttttcattatgcatgggctttcatttaacctttgagtgccagttgacccctaacccctaacccctaaaccgctatcgccctaagtaaactgatattgctggctggcagtgtaatttgtatttatgcgcggatttatggggattcattgggcgaatctgtggacgtgtgtgtctgtgggcttacataattactaatctgatgcaatctgccccacccccccgcactattagccccaaggaggtcaccagttatgtgggcaaaatttattacattgttcgccgttaaattaaggaactgtaattaaacatttcaatggaggaagaattacgccaaatgaatccttatctgccaatagattcttagatatatccatacgtttggcttagcagctttagttttattcagaataaaacagcaaaaataaaatggagcatttgttgaatagttagtttcaattacaaatagtacaatatctttaatttttaaataaccgtgtaatttcttttccaaaatttatggaactgattaaagctagcattcgagttatcttgagtgtttgtacgcgtaatcacaaataacttttaatttttatccttaatttgctggccaatttgcagtgtattttatgtgcgatgccggtccgcagataatttttaattgcaggcacatatagccgacatatcggcatgccgataagtatatatacactcacccacacaggcacgtgaatatatatttatataacaaccatatagccatgtcaattggaggcggcggca

SEQ ID NO: 15986 - DNA, 564 bp, DROSOPHILA
atcatccgcgaaatgaatcgactgggaatgatggtcgatctgtcccacgtctccaagggcacgatgagggacgccctggaggtgagcgaggcacctgtgatattctcgcattcctccgcctacgagctgtgcaatacgagccgaaacgtccaggacgacatcctgcaggcgctggccaagaacggcggcctggtcatggtcaacttctactcgaagttcctatcctgcagcgacaactcgaccgtgcacgatgcagtcgcgcatattaatcacattaagcgagtcgcaggcatcgatcacgttggactgggcgccggctacgacggcattaattatacgcccaaaggactggaggatgtgtcttcatatccgactctatttgccgaactccttggcggcggctggacaattgacgagctgacgaagctggcaggcggcaatttcctcagggtcatgcagcaggtggaaaagctgagggatgacaaaaaggcagcgggcgtgaaacccttcgaggatcatccgaacttccgcacggacgacccgtacaactgtacgtccagctaa

SEQ ID NO: 15987 - protein, 183 aa, DROSOPHILA
MNRLGMMVDLSHVSKGTMRDALEVSEAPVIFSHSSAYELCNTSRNVQDDILQALAKNGGLVMVNFYSKFLSCSDNSTVHDAVAHINHIKRVAGIDHVGLGAGYDGINYTPKGLEDVSSYPTLFAELLGGGWTIDELTKLAGGNFLRVMQQVEKLRDDKKAAGVKPFEDHPNFRTDDPYNCTSS

SEQ ID NO: 15988 - DNA, 2869 bp, DROSOPHILA
gcgtcaagctgatgatcgagtaccaggggcgcatattcgagtaagtgcgagccccgctgaggaggaacagccccagtctcccaggtgatggtccatttggtgtccgggcgcccgccgctactgttacccacaaaacccgaatcccagccgcttacgtctcatccaaaccgctcacctactgtgccgttgtgtcgaacgctttgctaaccactcgaaatccgaaatcctcaacccgaaaccgaacaccccactgtacctgccacacctctatacccattcccgattcgctcccgaatctgtttccaatcccgatcacatcgtctacagatgcaccgccgatcgccgccgcctgagcatgcgcaacctaaagaagactctgtcgcagccggacctgctctttcacaatctattctgagctggcccaatgacatccaatggatccttcatcccagagagagcactgtacatatatggaatgactttacgccccgctagcaattgtgtcctaagattactttttatattcttactttatcaactaacttttgtacttatgtttactaatataaacactaaaactaattgttttctcaatttgatatctttaataattatttaaactgactaatgctcagatgctcttacgaattcccaggaagtccagagccacgtttgtcccaaagctcttctgccgctgaatcatcaaaaaagaagactcgatattgtattttcagtggcgtatatatatttttttcttgtatttgaactgctatataacatggtggggtattttttggaggaagaggggcgaaaaggagctgggaatgcggatgacggggacggaggcagctgggaagaatctatgattttgcaatacagtctaatcgtcactagagctaatatgtaatagatatatgtttttaaaaaccaactggttttaagtgctatgtggcctataaacgtgtatatatatatatatattagatatatgcttgtatgtactaggtttatattagctttagtccgcattctggactttattcaacattaacataggtgtatacacatgtatgtacatgtatcttatgcgtcggcctttcgaaatacatatgcgaatgagccatctgatgtagcgcctttaaattaatgacaaaacattgcgctcgctcctttgatcacaatttgatttggggttaatcgatgcatgtatgtatatgaatgatatctatgatgtaaataggtaggattctgattcggttgctttccaatgaggggttctacgaaactgaggtgtttgattgctcgggcgagcatccaaattagatacatatcgaaggcacaggaatattacacacattttactctaaggggccggggtcctcagaacttaataccaactgaataactactgggttaaccatggcagctgccacacgcgcatctatttgcgattacgttaaactaaatataaaatccactcatttccggttcttttgccatgctgtttacatttgcccaaccatcaatttgcgacgcttctgttgaaagtttgcgaatattacttaaagaacgggttcttagatgccgatgacttcatggtgcacaagatctgacgttccagctgaaagtcatagtccagggacttgagcagcgtagagatttctggcagtgtaggtatctatgcatacatatttcgaatatcgaattagagcgagaggttgaaagccactggctgcgtcactcacatcattcacagcttggttgcgctgcagcctaacgtccatgacgaaaggcactccctccagctcggtgtaggtgcccaaggtgcccgttccgccgtaagtaccgtgtcctccgccagaacccactcccgctggccgcggtggcgccggtcgctgtggcgagtttatttgatagttggcttggatctcctcatagtcatggtgttcagtcggcggttgtggcagctgtttgatgaaatggccaagcattgaaagttttttaagacgcaattgactcagagccacgacttactggtccacgtgagttgcgttgaccctggagattcaggcggttcagggcctgctccacctcgcaagtggctggagctggcaatcctccacctggcactggcggcgaaaggcgcactgggatcgcgctggttttgtagcagataagcactccgttgatatcgccggccagcttaaagccatcgggcgctgccttcaacttggagcagagtattatgtcggtgaccgcctgggtcacagtgccgcgcttggagagcttgtagatcaactgccgcttgcgccaggccttctggtcgctatcggcagtgcgggagacctgcgagaattccttgggcggcggcgttttatccgaaatcactctgaaaaccaagtagatttcatttataaacgaagaggagatggaatccaatgagttgagctcactgtagggtctccaccacgtattccggcaggccctcggacttggacaggcagaggtagcgtgtgttctggcgtccaaacaggctgtagtcgcgccataggtccgcatccgaatcctggtcgtaggtgcggcttatggcactgaagttcttcgggcagctaaaacgcacaaaagctattagtatggacaaatcactgtcaaatgggccactgcacactaaccgctcgaaatcctcgacgatgtgcagcgaggtgatgggtcgattgtccggcagaaagctcatgatggaattgaatacattggtggtgctggtcgagccagcaccattggtcgcctccagcggagtacccagtagagccgccgtggacaatgccgcgttgggtgctccaccgatgccgctttgaatgtgcttgcccac

SEQ ID NO: 15989 - DNA, 1607 bp, DROSOPHILA
tgggcaagcacattcaaagcggcatcggtggagcacccaacgcggcattgtccacggcggctctactgggtactccgctggaggcgaccaatggtgctggctcgaccagcaccaccaatgtattcaattccatcatgagctttctgccggacaatcgacccatcacctcgctgcacatcgtcgaggatttcgagcgctgcccgaagaacttcagtgccataagccgcacctacgaccaggattcggatgcggacctatggcgcgactacagcctgtttggacgccagaacacacgctacctctgcctgtccaagtccgagggcctgccggaatacgtggtggagaccctacaagtgatttcggataaaacgccgccgcccaaggaattctcgcaggtctcccgcactgccgatagcgaccagaaggcctggcgcaagcggcagttgatctacaagctctccaagcgcggcactgtgacccaggcggtcaccgacataatactctgctccaagttgaaggcagcgcccgatggctttaagctggccggcgatatcaacggagtgcttatctgctacaaaaccagcgcgatcccagtgcgcctttcgccgccagtgccaggtggaggattgccagctccagccacttgcgaggtggagcaggccctgaaccgcctgaatctccagggtcaacgcaactcacgtggaccactgccacaaccgccgactgaacaccatgactatgaggagatccaagccaactatcaaataaactcgccacagcgaccggcgccaccgcggccagcgggagtgggttctggcggaggacacggtacttacggcggaacgggcaccttgggcacctacaccgagctggagggagtgcctttcgtcatggacgttaggctgcagcgcaaccaagctgtgaatgatatacctacactgccagaaatctctacgctgctcaagtccctggactatgactttcagctggaacgtcagatcttgtgcaccatgaagtcatcggcatctaagaacccgttctttaagtaatattcgcaaactttcaacagaagcgtcgcaaattgatggttgggcaaatgtaaacagcatggcaaaagaaccggaaatgagtggattttatatttagtttaacgtaatcgcaaatagatgcgcgtgtggcagctgccatggttaacccagtagttattcagttggtattaagttctgaggaccccggccccttagagtaaaatgtgtgtaatattcctgtgccttcgatatgtatctaatttggatgctcgcccgagcaatcaaacacctcagtttcgtagaacccctcattggaaagcaaccgaatcagaatcctacctatttacatcatagatatcattcatatacatacatgcatcgattaaccccaaatcaaattgtgatcaaaggagcgagcgcaatgttttgtcattaatttaaaggcgctacatcagatggctcattcgcatatgtatttcgaaaggccgacgcataagatacatgtacatacatgtgtatacacctatgttaatgttgaataaagtccagaatgcggactaaagctaatataaacctagt

SEQ ID NO: 15990 - protein, 304 aa, DROSOPHILA
MSFLPDNRPITSLHIVEDFERCPKNFSAISRTYDQDSDADLWRDYSLFGRQNTRYLCLSKSEGLPEYVVETLQVISDKTPPPKEFSQVSRTADSDQKAWRKRQLIYKLSKRGTVTQAVTDIILCSKLKAAPDGFKLAGDINGVLICYKTSAIPVRLSPPVPGGGLPAPATCEVEQALNRLNLQGQRNSRGPLPQPPTEHHDYEEIQANYQINSPQRPAPPRPAGVGSGGGHGTYGGTGTLGTYTELEGVPFVMDVRLQRNQAVNDIPTLPEISTLLKSLDYDFQLERQILCTMKSSASKNPFFK

SEQ ID NO: 15991 - DNA, 4961 bp, DROSOPHILA
gttccaggagctacaggagatccagaacctgaacgagctggagtacagtgccacctcgaaggatcgcttctaggacatatttcagaagattcagtttgagcttaaggacaagtctagcgctctttgagcgatttacgcacaatacaacgaacagtgaaccaccttccaacgaaacccaacatgctatagtttagatttttcatttagacctaagatttatgttgagttttcagttttgctagttcatttaatgagttggtcgctttgactgtttatcgttttattagttgagcagttgcaccatgtttaaactgccaaatcaaatgttacactgaaattatgcttcttatctactgtactgttccactgacttttttcttccgtccattgacttaagttagtttacatttattatttttgcgttttttattacattgcaatcaataaatccatgccaacacaatagtcaggtgcttatgctcaaattgattcttctgaattgccgaatgcattttattaatatacggatagttaatcgccacttattattattacatagtgtaatccatccgtgcatgattgtctttaaaatctgtacaagaaattacttttaatgtgtatatttcactattgcatctacaactttgaagcaatacgaatcctgccgtagtaatttgtaaatgcggtagcatcagtttagtaaggcaatgttagtctaaagattttactaagtataaaagtataaatttatttatctcgtatttaatatataaacgtacgtaacaataatatattttatactaaaattttctaacctcacacttatacaaaaagtataaacttttgaaaatcaaataaagaacttgaggtaaagcaaatatcatagctgtgtgtgttcgaaactggaattgaaatttgaacgtaggcccatactcattaattttacttgcaaatggacaaggattcgcaaattattgaattacaaatacaaagaaaccaatcagtttttgttttcttcctttatactcttttaaaacttacaaaagaaagcatagttacattgaataatttttgtgtcaattattttgataagcacggggaaaacgtaaaaaatatatttacccttaatttacaatacaagtacatttgttcaaacttaaaaaactattttggaattaagttttgattcaattaaagaagcatgcgattataataaggcgttgtcgttttgggagtcattgcattgttgtagtcagttttcctgccgcttcccagcaatggagctgtcttcaactttaactgaatgtttggtatctgaccgactctatctctgaccgggaatggcaagtcgtcgcccttgccgaagtgggttgaagttccgttgggttgggtataggttataccaccaccttgcatgctcggaataacagagaccacggatccatcataaaattgcacttggacaactccatgggagagctagaatggcgaaatggagatcagaatccatatgtaaaataaaggtacaattaaataaaataaaggtacaattgagcattacctcagtagctattccgatttcaggaacgtttatgcgtttgatgggtatattttgatgggcggctagcatgttggacctagagcagttggttccaaaatctgaagtatttcgagtcgacgaaatagtgcttaaggaaaagtttattgagccctgtaggataaatgcatgtcacagtctgcacattattcgatatatatgtacacgtacctgattagattttggtgtggaaaacgcaatattggtggtatctcgtaggccatccaatctctgagcgggttgtacatctgttataggtcttcgtccgattgtgactggaaaacacgaattatctttcgtctgagctacttccaaggcattactgatgttgacacagtgggtgaaacactcgtttccgtgctctattagggatcgtgactccgaacaggaataatccgagagcaacattccatttcgatcgtagacctttagcccctcggacggcgtctttagtagcttagctcccgagtagaaacgaatctcaaagtcggtcattgtctccatcaattggcatttgcctagagtactgaagtatgtgacttttggtgttttgctttttaccagccctacaaatcgagctccgtatatgtattttttccagtgcttgctgggcaaattatcgtagttatatacacaatctccgcttggtatttgaagatctggtggctgctctctcactggtaagccactgaaatgtaagaaaatattaaagatatgtctttgattttcaaggtagcacatcacttaccgcccaggatctggttgataaattatgattcgctgtccgtcatccgatatgcgacaaatatcattaatgcgatcttcattataggttggccgaaacttaagaaactcgagaactacctctccattgcgcaaaatactcattatagcattcttcgtcttataacgcgtcggaagcagtcttttagtattcaatggtggcaccgaaatgcgatcttccttaagagatgcctgtttggaattgggtacattgcccgcctccatgcagaacgctgaggacttagcagctcctggccaatttggctctgccaagccagttgaagcttgcccaaataaacctgtctgttcataaggcaatttatgatggacttgcttaaattcctcccgtatttgaggaagcacttgttgtggtcctgagttttccacagatcgaatttgctgggaattccgggagtcacctacaacagataaatagagtgagattctactagcaaatgtacattgtaaattcctgaataattactgctagcaaatgttatgattccactatcgccactttccatactctggctgaacacattcaacgctcccggcgcagagtgtccaccatttgagcatttcaacataaagggatggcagagaacagcctccagggtaattcgttcgtgcgggagcttttttaataatttgtttatcaggtcctgcgcctcgtaagacaagtgagccggcataatgtactcggacatcacaactttgttaagggttgactgcactgcatcggtttcgaagggcgggcgtccaaccagcagggtgtacagcatgcatccaacgctccagacgtccgcgggcagtccgtgagacgttcgcgataccacctcaggcgaaatatagttcggagttccacacatggtcatatggcgctcatcaggtcgctttaattgggtggccagtccaaaatcggctatcttgacgtgcatttccctgctaagcagtaggttggacagcgaaatgtcgcggtgcatgatgttgtgggagtgcaggtacaaaagtcccgccaccacctgcttcagaatggaagcagcttccgtctctgtgaagggtctggcgatgtggttcatatagcgatgaagctccccattatgggccagctcgagcaccaaatacacatagttggcgtcctgaaagaaagtgtacagctgaagcacagagggatgcttcaggcgggagtggatttccacttcctggcgaacgcggttagtgagtccagtgccctggattagttttttatcgatctgaaagccagtttgtgagtaatacctttaaccaacactatagcagtacttaccatctttatggccacatcctggtgagtgtgcaggcaccgcgccttgtagacggtcgcaaaaccacctttacccagcaagtgctgtacttcatagtcctgcaaagacaaacagcgcttaaaaactccgtccgactgccgccttccagcacacccacctcaattgtttctccaaacgcccgattggataacatagctagccttttttctgtagacttactgagccacttggaatgtcttgttgttatttatcaaaaaactaaagccatataaacaaacaagccgaacaaaatttaaacgccaccgttagtgttgggaaattttaatgccacattagtgaagatcattagccagcactaatgagggctgcactatcaccaatatatttgcgaatttgttactccaatacaatttatttcttgtttaaagaatatttcacaaaattatgatattaatcattaaaaattatttttatatacgagttgataagtaaaagtcaaactatcaataatggcttcaaaaacaatcattgccagcactccccagtgttgccagagctaataaagtatatttatgagatatttatataaaaaatattgttctctttatttgaactaaataggtgatacatttgaaaaaaaaaacttgcttagggctcaatattccaccaacagcatacttaaatgcactcttcgatcatagcgtgttcccactgcactagcagttaatgcagccctggtgattaatcgccgagaatattgccatccgttgcaaatgcagagaatcatggcaaaattattcttatggttttactaccgaaacaatgcctaatgagatatgtaacttgcatttgaacaaattctcttatatttaaaccgatcccacaataagctgagcccattttcgcgtaatgaatataattcgaaatcataaacaacgtcggaatatgagactcgatagccgtgttatttaataattaaaggagttcagcgagtgcgtgcgccgagagtcgtaataaagaacaacgtaagccgccaattttgccggcaataaagttattaagaagtggtgtttacataatttactcccaaaaattggtaagtccgcagcaaagaaaataaagtgacccacatacttacattgatacttatgaatgcatgtatgtatatgagtaggtgtttgccttatacatgaaggcacgcagacaaccttggactctcacacacgtcaatgacaagcaacagtgcaaaagtagtgctggaaagtgtcctcgaaaat

SEQ ID NO: 15992 - DNA, 2585 bp, DROSOPHILA
tttgtttatatggctttagttttttgataaataacaacaagacattccaagtggctcagtaagtctacagaaaaaaggctagctatgttatccaatcgggcgtttggagaaacaattgaggactatgaagtacagcacttgctgggtaaaggtggttttgcgaccgtctacaaggcgcggtgcctgcacactcaccaggatgtggccataaagatgatcgataaaaaactaatccagggcactggactcactaaccgcgttcgccaggaagtggaaatccactcccgcctgaagcatccctctgtgcttcagctgtacactttctttcaggacgccaactatgtgtatttggtgctcgagctggcccataatggggagcttcatcgctatatgaaccacatcgccagacccttcacagagacggaagctgcttccattctgaagcaggtggtggcgggacttttgtacctgcactcccacaacatcatgcaccgcgacatttcgctgtccaacctactgcttagcagggaaatgcacgtcaagatagccgattttggactggccacccaattaaagcgacctgatgagcgccatatgaccatgtgtggaactccgaactatatttcgcctgaggtggtatcgcgaacgtctcacggactgcccgcggacgtctggagcgttggatgcatgctgtacaccctgctggttggacgcccgcccttcgaaaccgatgcagtgcagtcaacccttaacaaagttgtgatgtccgagtacattatgccggctcacttgtcttacgaggcgcaggacctgataaacaaattattaaaaaagctcccgcacgaacgaattaccctggaggctgttctctgccatccctttatgttgaaatgctcaaatggtggacactctgcgccgggagcgttgaatgtgttcagccagagtatggaaagtggcgatagtggaatcataacatttgctagcagtgactcccggaattcccagcaaattcgatctgtggaaaactcaggaccacaacaagtgcttcctcaaatacgggaggaatttaagcaagtccatcataaattgccttatgaacagacaggtttatttgggcaagcttcaactggcttggcagagccaaattggccaggagctgctaagtcctcagcgttctgcatggaggcgggcaatgtacccaattccaaacaggcatctcttaaggaagatcgcatttcggtgccaccattgaatactaaaagactgcttccgacgcgttataagacgaagaatgctataatgagtattttgcgcaatggagaggtagttctcgagtttcttaagtttcggccaacctataatgaagatcgcattaatgatatttgtcgcatatcggatgacggacagcgaatcataatttatcaaccagatcctgggcgtggcttaccagtgagagagcagccaccagatcttcaaataccaagcggagattgtgtatataactacgataatttgcccagcaagcactggaaaaaatacatatacggagctcgatttgtagggctggtaaaaagcaaaacaccaaaagtcacatacttcagtactctaggcaaatgccaattgatggagacaatgaccgactttgagattcgtttctactcgggagctaagctactaaagacgccgtccgaggggctaaaggtctacgatcgaaatggaatgttgctctcggattattcctgttcggagtcacgatccctaatagagcacggaaacgagtgtttcacccactgtgtcaacatcagtaatgccttggaagtagctcagacgaaagataattcgtgttttccagtcacaatcggacgaagacctataacagatgtacaacccgctcagagattggatggcctacgagataccaccaatattgcgttttccacaccaaaatctaatcagggctcaataaacttttccttaagcactatttcgtcgactcgaaatacttcagattttggaaccaactgctctaggtccaacatgctagccgcccatcaaaatatacccatcaaacgcataaacgttcctgaaatcggaatagctactgagctctcccatggagttgtccaagtgcaattttatgatggatccgtggtctctgttattccgagcatgcaaggtggtggtataacctatacccaacccaacggaacttcaacccacttcggcaagggcgacgacttgccattcccggtcagagatagagtcggtcagataccaaacattcagttaaagttgaagacagctccattgctgggaagcggcaggaaaactgactacaacaatgcaatgactcccaaaacgacaacgccttattataatcgcatgcttctttaattgaatcaaaacttaattccaaaatagttttttaagtttgaacaaatgtacttgtattgtaaattaagggtaaatatattttttacgttttccccgtgcttatcaaaataattgacacaaaaattattcaatgtaactatgctttcttttgtaagttttaaaagagtataaaggaagaaaacaaaaactga

SEQ ID NO: 15993 - protein, 769 aa, DROSOPHILA
MLSNRAFGETIEDYEVQHLLGKGGFATVYKARCLHTHQDVAIKMIDKKLIQGTGLTNRVRQEVEIHSRLKHPSVLQLYTFFQDANYVYLVLELAHNGELHRYMNHIARPFTETEAASILKQVVAGLLYLHSHNIMHRDISLSNLLLSREMHVKIADFGLATQLKRPDERHMTMCGTPNYISPEVVSRTSHGLPADVWSVGCMLYTLLVGRPPFETDAVQSTLNKVVMSEYIMPAHLSYEAQDLINKLLKKLPHERITLEAVLCHPFMLKCSNGGHSAPGALNVFSQSMESGDSGIITFASSDSRNSQQIRSVENSGPQQVLPQIREEFKQVHHKLPYEQTGLFGQASTGLAEPNWPGAAKSSAFCMEAGNVPNSKQASLKEDRISVPPLNTKRLLPTRYKTKNAIMSILRNGEVVLEFLKFRPTYNEDRINDICRISDDGQRIIIYQPDPGRGLPVREQPPDLQIPSGDCVYNYDNLPSKHWKKYIYGARFVGLVKSKTPKVTYFSTLGKCQLMETMTDFEIRFYSGAKLLKTPSEGLKVYDRNGMLLSDYSCSESRSLIEHGNECFTHCVNISNALEVAQTKDNSCFPVTIGRRPITDVQPAQRLDGLRDTTNIAFSTPKSNQGSINFSLSTISSTRNTSDFGTNCSRSNMLAAHQNIPIKRINVPEIGIATELSHGVVQVQFYDGSVVSVIPSMQGGGITYTQPNGTSTHFGKGDDLPFPVRDRVGQIPNIQLKLKTAPLLGSGRKTDYNNAMTPKTTTPYYNRMLL

SEQ ID NO: 15994 - DNA, 6398 bp, DROSOPHILA
tttaattataccattcatatgcttgctttcgttttgctgccttgctaagataaaaaaaaaaaacaaaaacaattgaactgcgattatgtggtatggtctgatttctacatgagcaagtgaattgaatcggtattattgggatcttgggagtttgcagtgaggtgagtgcttgcaacaactaaactaaacacaaggctcactaaacttgttgcatacatgtttaacattactttaagcaaacagtcgaatgtccgcaaggcgaactatattcgttacatagatctagtccgacttacgaatattcgaccgcatttgtttgttcattacgattacagtttttgttgcttggttttgttttcattacatttcagtattatctcaagttttgccggaaaacacttccattctgatcactggccactgcccagctgtggccttctcctgagttccactgccattttttacgagttaaaatttccaaacaaaaactaaagttaagcatagaatacaagaacgaaacgaactaatctaaaatctatagcgtgaaatccaggactaaggacagtggcagtggcaacagaacacttctgcgcccgtttgatcctttcacaattttacatttgctgcttttagtctattatatttaagggctttgctttttcgcttatttttctttttttttttgcttcgctttttctatttctcatacatgcgttaaatgttaattactttatgcttatgtatcaaggatttctactaccgcgttcttatttgctgcgtgttgtggtgttgcgtgtggtcatcgccttcagaaattgttgttgccattactgagcagattggaggcggcggccccaagagcagcagccgcaatggaagcggccgaggagctgcccgccgccgatccgttggacgccgcagccgccaccacagctgccacagcggctgccaccgtgttgagatgctgctgatgctgctgctgctgttgctggtgatgttgttatggcataaagtagtccggatgatctgtgtctttctcgaaccgcttggcctcctcgtgcatgctctccttgatcttcagaatggccgccgattccgtttgatcgttctcgccgggtccgccgaatccgcccagattgtagtcacccatgccgctgccagagtcttcgcgcggcgtcccaggtcctccgttggccggcgagtttttcatgccatccaaaccggatccgtccggaccgccgccgccattaagtacggggcccattgaatttggcccgccgcccatcggtcccattccgccgggaccacctccgccaccgccgccatccggccctccgcccatcgggaactcgggtttcatcagggcgtacatgctgtcgcccggtccgcccactggtccaccttgcgtgttatcctgcggcgacggcattattggcgttcccggtcccggcggtccattcgagccgggtccatagtttcctggcgatgatgacgagtacgcatttagtggcgccgaggcgtttggctgccattgcggcggtcttccgcccgctccgcccatgcccatgggcggcattccgccgggtcccggtgctgggccgcgcattcctcctggtccaccatagcccatcggtcccatgccaccaggaccgcgtggcggattcatgcgcggattcatcggtcccatccctccgcctggccgtgtcggatccatactgttgggcatcatgggctggccggggggtccattgaattcattgcccatgccctgcatacgcacgccgggccgcggtccgcccgggtatcggggtccgcccatgaacggcggctggcctggcatcatttgcgacggcggcggttgcggactggaggcgtgcgtcggcggcgacggtcgcatcgtcgagttagggaagaaattcggtcccattggtccgccgggacccattggaccgccatcgccgccgggcggcatttgcccgaggggactgggcgctggtccgccagcattgtggggtccacccggtccaattccattcactccgtagccggagctaacaaagccgtagtcgtggaaggccttggcctccgagctgtgatcgcactgatctcggcgctctggcgccgcacagtacaggtcccagaagacgcaccaccaggtgtgcaggaatcccggcggctcgcccagcgttatgttcttctcccatcggatctccgagaggaatgtctgtgccgccttctgggcgccaacgtgcagcagatattcgtacacgtacagggccaacttttcgcgggcctgggcgtccgatggaaccgccgatgtctttgatttgccgtacattttgtttgtgtgatgttggttgttggctgtagttgcgttttgtttctgctgttgttgttgttgatgatgatgttgctgttgttgctattggtgcgctgggtaaggtggttttaagatttcggagtttgggttttctcgcctctctttcgtcgctagttcgctttttgtctaccgacttcgagcgtatttaaatttttatactttttttatgtacttttcgaggctcttgctgtcttgctgcctcctcttcggttgtttcagcttcagcttcttcgtcgtcgacgtcttcttcttcttcttccctttagcggctgctactgctgtgctgttgttgttttttaattggccgcgctttggctcacgcagccgttctccgccgctctattacttccaccatttttaataaaatatatatttttgcgaatggagaatgaaacgcaccgtggtctttacttttgcctttacttttcagattttacttaataaactttttagcgcgctctcgccgtacgtgtgtgcgtgtgtgtgttgccacttcttcgttttaccgtttatttttttcaggtatttttttgcctgattgttgctgcttcttcttgcacaaccactaaaaacagaaaaagaagagcagagggagagagagaaaaagagagcatgagtgagagcgagcgacagttcgtgtgtatgtgtgttgcaaattttcgtgagcctgtgtgaagtgcggtgtgtcgtgtatttgtgtcagtgtgtgcgaccgtacttgcgtgagtgcgagagagggagcgcgcgcattgtcgacaaaacggcacaagtgccacactaaccgtcaaaacttttgtaccaccttgaacattttgctaaacagtttaaataaaatcaggagtaaagaagtggcgaaaaatttatttctaatttaacactttaaactcaatttaatgacgtaatttttgtattttttcttaaaattcttaaaatttcttttcgtgacacataaattaaattggaaattaaaagtgtctcgcttttactttgattaagtaattggattattttgatttattttaattaaaagtataacttgctagtgcatttcttaaggggaagacgaccttgtcacaaactattttgataaccatttagaattagaacattaatcttttacaactttttactgggtttttgtaaaacaaaaattagactaacagaggtttaagtacttaacgtgttcgctttcactaagagtttgttagagctgtattaaaggtaaaaactttattatttggtggaatacttttagaatccactttgttggattcccttctccctcgttccactcaggtgagtgaggagcagacagtgatgctcttggcctctcggcttagtacacattgtacacaggtaggttgctacctaaaagcctaaaggccagcgggcagcatagtccgcctgtcagtcaaacagacattcaaatcagaactcgtctccggggtcccaaaatattggtggcactgtgcgggggcgagcgggtgcaattggggttgggtgggtggttggtttggcagagtgacagctcggagagacagggcgcgtagcgataaggtcaattggctctgcggacaggtgcatcagttactaggcactatcggctatatatccaatggctgggaaaactgtacgaccgatttgaatgcggtcgaaggcgaactcaactcaaactagcgaatgtacacagagagcgaaaactatgggctgtcagctgttatcatttaaaacagaaggtgttatcggaatctattatgaaaccaggtggcgaaactattcgagtgcccaaaacctgtgatcaacgacgaagcccaagggctgagtacctaaacttgcagtgtggctgctacaaaaaataccggtccatctctcactctttcttgctgccgctgcccgcgagctctgctggcgtcgctgtcagcatgtacaacaataacaaaaaatatgagtaaaatctacattagtgccgatattgctgcattgttgttgtctatttgaagacgtcatcaaattgggtacgcgggttttctctcgcacgttctactttttgccacacactctcgcacacaccacacgcacgcacactcgaacgcacagcttcacagatggccgtttgttgatattgttgctgctgttgcatacgcacctttgttgtttattgttggctttggctatctgtcgttttgtgaacgccctaatactttgaatacttttattttggcgagtgtcgtgtgctgctgattgcaattttatcacaaaatcaacaagaaacacaaacacacaattcgagaggctgctgctgctgcgctcgcgaaagagagtagaagagaggcagagagagcgggagcgagtgcgagagcggcagggcgagagggaggagcgatagcgagaatacggaattttattacaatcattgatttttcgtattcgtatttgtattagcggctccccggctcttcacatgttttgcgcgcatacatataattatttattattaaaccgcgcgctattttacttcgtttttttattattagctttttgcaccaattctcttgtatttatgtgacggtgtgtgtgtgtatgtttattcgttttgcatggatgtgtgtatgtatatgttcgagtgtttttaatttcttttctaaacacacttttttgcctgccgccgctgtgttgttgctgctgctgtaatttttgcaagttttctcttcacacgcctttcattcgccgtgcgctttgtccgtgtattcgacgattgcttttactgcctgttcggctgctgctgcttcttcttccactaaaaatcggctcttttttgcctgtacgaaattttcacagagagctattgcgttgaaatgcattttaaattgatgtcatttcgaaagcaaacacaacgttcacattttcactttgattgcaaataactattagtttggtttaatcgtttaaacacggcaaaatcgtataaatatttttactgctacaagttgcgtcgtcgtcgtcttcgtctcgttcgagtgtgaccgtttgccgagcatttaaataatccgctgcgagctgagaaacgcactaaaatttactaaaagcacgccattttcagtgcttttaataaatgaatatttattatttaggtgtggtaaaggttaagcagtacgctttatatgaaataaatgggaggttgtgattaaatgagctaaattctattaaggtttaattatattatcgattaattatgacagggctgccagcgtgctggaaaaagctcatttggcgttgccacggtcgcctaagggtgtctggcagcgtagttggcaattcaccaaggaggaccgtacagaagttcgcggataaaatatatcttaaatgctaaaatagtacgccttaatgataaagagttcacgattacctaagttgccaatgggtaagttgtttgcttgcattatagactgcggtctgcacctaaactgctgggcggggacttacaaaagccggcgaatttccatgtatatgcatttacattgttgttggcccgcaactgcagtgctgttaggttaacagcggcagtgtgaccagacgcccgtttgtttatgtttggggctcgaaaaataacagtgtctgttcaaaacgcattcagtgcgcaagaacctccgcttgccgccaaatggaaaccccccaagcgaagcaatattgaagagatccgaggcataaacagtgctgaggtttagtgcaactgcaactgctcgcgattgcgctacgtgcgctgcggtttcctgctgtaattcaaagttctgcaattcgcgcgatttccacgccatgcagttgaagcaaatggactgttgattgactggccctcaagagaggaaagcggattaaacggctttaacagttaagttcgaaaatggttgaaaaaccaatgaaacgtatttttttctttgcacttacaaaacgagcacgtgatgaccgaattttaatggtaccccccccccccccccacaaggcactttaaaccattcaagtt

SEQ ID NO: 15995 - DNA, 2817 bp, DROSOPHILA
ctcgaacgagacgaagacgacgacgacgcaacttgtagcagtaaaaatatttatacgattttgccgtgtttaaacgattaaaccaaactaatagttatttgcaatcaaagtgaaaatgtgaacgttgtgtttgctttcgaaatgacatcaatttaaaatgcatttcaacgcaatagctctctgtgaaaatttcgtacaggcaaaaaagagccgatttttagtggaagaagaagcagcagcagccgaacaggcagtaaaagcaatcgtcgaatacacggacaaagcgcacggcgaatgaaaggcgtgtgaagagaaaacttgcaaaaattacagcagcagcaacaacacagcggcggcaggcaaaaaagtgtgtttagaaaagaaattaaaaacactcgaacatatacatacacacatccatgcaaaacgaataaacatacacacacacaccgtcacataaatacaagagaattggtgcaaaaagctaataataaaaaaacgaagtaaaatagcgcgcggtttaataataaataattatatgtatgcgcgcaaaacatgtgaagagccggggagccgctaatacaaatacgaatacgaaaaatcaatgattgtaataaaattccgtattctcgctatcgctcctccctctcgccctgccgctctcgcactcgctcccgctctctctgcctctcttctactctctttcgcgagcgcagcagcagcagcctctcgaattgtgtgtttgtgtttcttgttgattttgtgataaaattgcaatcagcagcacacgacactcgccaaaataaaagtattcaaagtattagggcgttcacaaaacgacagatagccaaagccaacaataaacaacaaagtggttgtgcaagaagaagcagcaacaatcaggcaaaaaaatacctgaaaaaaataaacggtaaaacgaagaagtggcaacacacacacgcacacacgtacggcgagagcgcgctaaaaagtttattaagtaaaatctgaaaagtaaaggcaaaagtaaagaccacggtgcgtttcattctccattcgcaaaaatatatattttattaaaaatggtggaagtaatagagcggcggagaacggctgcgtgagccaaagcgcggccaattaaaaaacaacaacagcacagcagtagcagccgctaaagggaagaagaagaagaagacgtcgacgacgaagaagctgaagctgaaacaaccgaagaggaggcagcaagacagcaagagcctcgaaaagtacataaaaaaagtataaaaatttaaatacgctcgaagtcggtagacaaaaagcgaactagcgacgaaagagaggcgagaaaacccaaactccgaaatcttaaaaccaccttacccagcgcaccaatagcaacaacagcaacatcatcatcaacaacaacaacagcagaaacaaaacgcaactacagccaacaaccaacatcacacaaacaaaatgtacggcaaatcaaagacatcggcggttccatcggacgcccaggcccgcgaaaagttggccctgtacgtgtacgaatatctgctgcacgttggcgcccagaaggcggcacagacattcctctcggagatccgatgggagaagaacataacgctgggcgagccgccgggattcctgcacacctggtggtgcgtcttctgggacctgtactgtgcggcgccagagcgccgagatcagtgcgatcacagctcggaggccaaggccttccacgactacggctttgttagctccggctacggagtgaatggaattggaccgggtggaccccacaatgctggcggaccagcgcccagtcccctcgggcaaatgccgcccggcggcgatggcggtccaatgggtcccggcggaccaatgggaccgaatttcttccctaactcgacgatgcgaccgtcgccgccgacgcacgcctccagtccgcaaccgccgccgtcgcaaatgatgccaggccagccgccgttcatgggcggaccccgatacccgggcggaccgcggcccggcgtgcgtatgcagggcatgggcaatgaattcaatggaccccccggccagcccatgatgcccaacagtatggatccgacacggccaggcggagggatgggaccgatgaatccgcgcatgaatccgccacgcggtcctggtggcatgggaccgatgggctatggtggaccaggaggaatgcgcggcccagcaccgggacccggcggaatgccgcccatgggcatgggcggagcgggcggaagaccgccgcaatggcagccaaacgcctcggcgccactaaatgcgtactcgtcatcatcgccaggaaactatggacccggctcgaatggaccgccgggaccgggaacgccaataatgccgtcgccgcaggataacacgcaaggtggaccagtgggcggaccgggcgacagcatgtacgccctgatgaaacccgagttcccgatgggcggagggccggatggcggcggtggcggaggtggtcccggcggaatgggaccgatgggcggcgggccaaattcaatgggccccgtacttaatggcggcggcggtccggacggatccggtttggatggcatgaaaaactcgccggccaacggaggacctgggacgccgcgcgaagactctggcagcggcatgggtgactacaatctgggcggattcggcggacccggcgagaacgatcaaacggaatcggcggccattctgaagatcaaggagagcatgcacgaggaggccaagcggttcgagaaagacacagatcatccggactactttatgccataa

SEQ ID NO: 15996 - protein, 445 aa, DROSOPHILA
MYGKSKTSAVPSDAQAREKLALYVYEYLLHVGAQKAAQTFLSEIRWEKNITLGEPPGFLHTWWCVFWDLYCAAPERRDQCDHSSEAKAFHDYGFVSSGYGVNGIGPGGPHNAGGPAPSPLGQMPPGGDGGPMGPGGPMGPNFFPNSTMRPSPPTHASSPQPPPSQMMPGQPPFMGGPRYPGGPRPGVRMQGMGNEFNGPPGQPMMPNSMDPTRPGGGMGPMNPRMNPPRGPGGMGPMGYGGPGGMRGPAPGPGGMPPMGMGGAGGRPPQWQPNASAPLNAYSSSSPGNYGPGSNGPPGPGTPIMPSPQDNTQGGPVGGPGDSMYALMKPEFPMGGGPDGGGGGGGPGGMGPMGGGPNSMGPVLNGGGGPDGSGLDGMKNSPANGGPGTPREDSGSGMGDYNLGGFGGPGENDQTESAAILKIKESMHEEAKRFEKDTDHPDYFMP

SEQ ID NO: 15997 - DNA, 3775 bp, DROSOPHILA
ttcagttccccccgagatactgtactactcgcggctcattttacacaacttaggcctccaattgtatcatctacattttacttttttaaattctagctttacttttaatttgtatatacattttgtaaacgatactcgactaagatcatgtcccactaatcccgaattgcaattacaccttgttaaatcaagtctacgatttgaaaagtacctgtaactctccgcagagcgagagcctagaggtgttaagagtattatgagcttaacgatgtcttgtacaatttatactgtgattgtgatctcgatgaaacaaactacatatgaatttatacaaaccattactgtctgttaagtcatgccaaagcaggtaatgttgtcccattcttctgggaccctatatatacactatagaatttttagagttttcttgttttatggacaagtaacagcacctagtcgcccaatttgccatagtttattatttaccatgtacaatgtttttagaaaatacgccaattaccttgtttttggatctagcgcgaaataaaaaaaacatttactagtcgtttcgaacttcgttgcttttcaaatggaaagtaggcagcgcgcgcaaccgaaaaacacgtcatagaatcatctggaagttcgaaaaatgtccgtttacccaacactgactcaggtgggcaattgtcgaaaacaccaccttatcaacagtgctgacggtgttctagttttgaaaaaaaaaaggctggtataaaatccaaaagatttatacaaaattgaactggagtattatttatttattcaattaacaggattatatgttaaacttaatttatagtatgttgtacaagtatttatgtgtatacggtgagtttaataatgaatacgagcataaagttcaaatctaaatgtagctgtaaaaagaccacgtcgtcagcactaacctatagcaacttatccaacactaaaagctgataaaacagatttcgtgaaatacagaaagaaaaggcaagaaaatagagccgagtaggccttacaaagtaaacagtcagttttaaaacatcagtgcaaacagttctaattcactcctccgtttgacaaacttatgtgtaatattactggaaactagcaagagcaagtgcgaaaaagactacaatggcagatactgcgaattacatcaacgaccgtttccagaccttcatgaacgggctcggtgaccgttagtaagtattacatgccgatgggtcacccccttagaggttggggtccaagtgcgttgcactgacgtgttgttttggtatccaaccacatcaacagttgtccatcggatcgatggaccttgaaactaatagtcctccttttatttccttcagtgagccctatgtgcgcgagcacctgtctaaggtttacatggtcctgggcagcactgccgctgccacggccatgggagccatgcttcagatgcgtgactttctcgatcttggagtcctggcggcggtggccactctagtcctggtcttgggtctgcacttctacaaggatgacggcaagaactattatacacgtttgggcatgctctacgccttcggattctgctccggccagacgctcggaccgctcctcggctatatatgcagcataaatccggcaataatcctgtctgcccttacgggcaccttcgtcaccttcatctcgctctccttgtccgcccttctggccgagcagggcaagtacctctatctgggtgggatgctggttagcgtcatcaacaccatggcgctgctgagtctctttaacatggtcttcaagtcctacttcgtgcaagtggtgagtgcccattaatttgcgtattaatttgtatcctctaaatctaatttctaatttccattccaaggcattgaaaactgaatatttcataattgtaatacttaacaaattcttattttccttatagactcaactttacgtcggcgttttcgttatggctgccttcatcgtctacgatacacagaacattgtggagaagtgccgaaacggaaatcgagatgtggtgcagcacgctttagatttgttcttcgatgtactcagcatgttccgccgtttgctgattatactgacgcaaaaggtatgtttccgcgacaagggtttatcccaacgatcagttgttatatagcccccttacccagctcaagaccttcatggtttaagatagctcaagccggagccagttgcccaaaatagctcaatcagattatcctcgaaaacatgctgatcactttgcaaaagcttccagtataaaattcgatgtgaaaaaccattttaaacggtatttcctgcagccaaggcaataagtgtactttcacagtcaggctaggatccttaggtctatataaaccacttgtgggaagtatatttatttccaaaaactgccaatgaaactttttgcaaagttctctagctgtttgtgaaattatatttatgtcctttgcttttgcaccgtttaaaggcaataccagtaatgctcttaattatttgcaggaggagcgaaaacagaatgaacgccgccagaacaaaactaaataaacttttatgtgtaacagccaccacaagaaaaacatctgacacggattttggaggcagatttctcattctagaaaattattcgcattgaatattaataatgccgtgtacatttggctttaaatttacagacatatatatccaatataaaacccatgaaatttttccatttaataaacaccacaagaagtaagctcatccgcgtttcttgtcccaaacatggcgcagtagatagaccatgttgatagtatcgattaggggcggaggggtcaattaattaggctaagtgcactctgcaggtaataacttgatgttagtgggaatcggttattcaaagctgtagtgttcaatggacaacatggcgcaggcggaggacgcagtgcaaccactattgcagcagttccagcaactgttcttcatatccaagatagctggaattctgccacaggatctcgagaagtttcgatctaggaatctgctggagaaatcccgtaatggcatgatttacatgctgagtactttaatactctacgttgtgctctataatattttgatatattcctttggagaggaggaccgcagcctaaaggcctcgcagagtcagttaaccatccgccttgaaaggtgcaaactcataaccatgttattcattcttcccaggcaccttgactttcgtgattggcttgttcctgacctatatcggtctgattatgatggtctccgaccagttgaccgcgttacgaaaccagggtagaattggagagctttacgagcgcatccgtctggtggatgagcgcctttacaaagaggggtgtgttatggacaacagtacaattggacggcgcatacgaattatgctgatcatgacggtcatctttgagttgtccattttggtgagcacctatgtcaagctggtggactatagtcaatggatgtccttgttatggatagtgtccgccattcccacgttcatcaacacgctagacaagatctggttcgctgtttcgttatatgcgttgaaagaacgcttcgaggccataaacgccaccctagaggaactggtggacacgcacgagaagcataagctgtggctgcgaggcaatcaagaggttccgcctcctctggacagctcccagccgcctcagtatgacagcaacctggagtatctgtacaaggaactaggaggtatgga

SEQ ID NO: 15998 - DNA, 1085 bp, DROSOPHILA
agaaagaaaaggcaagaaaatagagccgagtaggccttacaaagtaaacagtcagttttaaaacatcagtgcaaacagttctaattcactcctccgtttgacaaacttatgtgtaatattactggaaactagcaagagcaagtgcgaaaaagactacaatggcagatactgcgaattacatcaacgaccgtttccagaccttcatgaacgggctcggtgaccgttatgagccctatgtgcgcgagcacctgtctaaggtttacatggtcctgggcagcactgccgctgccacggccatgggagccatgcttcagatgcgtgactttctcgatcttggagtcctggcggcggtggccactctagtcctggtcttgggtctgcacttctacaaggatgacggcaagaactattatacacgtttgggcatgctctacgccttcggattctgctccggccagacgctcggaccgctcctcggctatatatgcagcataaatccggcaataatcctgtctgcccttacgggcaccttcgtcaccttcatctcgctctccttgtccgcccttctggccgagcagggcaagtacctctatctgggtgggatgctggttagcgtcatcaacaccatggcgctgctgagtctctttaacatggtcttcaagtcctacttcgtgcaagtgactcaactttacgtcggcgttttcgttatggctgccttcatcgtctacgatacacagaacattgtggagaagtgccgaaacggaaatcgagatgtggtgcagcacgctttagatttgttcttcgatgtactcagcatgttccgccgtttgctgattatactgacgcaaaaggaggagcgaaaacagaatgaacgccgccagaacaaaactaaataaacttttatgtgtaacagccaccacaagaaaaacatctgacacggattttggaggcagatttctcattctagaaaattattcgcattgaatattaataatgccgtgtacatttggctttaaatttacagacatatatatccaatataaaacccatgaaatttttccatttaataaacaccacaagaagta

SEQ ID NO: 15999 - protein, 245 aa, DROSOPHILA
MADTANYINDRFQTFMNGLGDRYEPYVREHLSKVYMVLGSTAAATAMGAMLQMRDFLDLGVLAAVATLVLVLGLHFYKDDGKNYYTRLGMLYAFGFCSGQTLGPLLGYICSINPAIILSALTGTFVTFISLSLSALLAEQGKYLYLGGMLVSVINTMALLSLFNMVFKSYFVQVTQLYVGVFVMAAFIVYDTQNIVEKCRNGNRDVVQHALDLFFDVLSMFRRLLIILTQKEERKQNERRQNKTK

SEQ ID NO: 16000 - DNA, 5572 bp, DROSOPHILA
gaaagttatagacattctaaaggccacggcctcagaatccttttcgccgattgttggagaccttcacggcatcctcccacaacagcccagtgagctggtgaaaagctatcgcagacagattcctattctgacaggattcactcaacacgatggttcctttgtgctagcaagtgagtaaaaccattaaaaaggtcttcaaaatataataaatttaataaatgttctaggctattatgatgcgctggctgcaaaggtggccaatgtgagttcattaagtgtccgtcagttttcccagggtatcaatgatctggtcaatgacacatcgggactcacggataacatattaaatcggttgctctttaagcctcaggcgcttaacagtcatgatcatagtgcagcagtgtcctcgtacttcgatgtaagttcgagaaaagctcagcaaaaacagaaagtttaaatttgtaaatttcctacagctcactacgaacatcttcatgaagtccccggtaataactctggctaccaaaatgtacacccagcaacggtccacgccagtttacgtctacagttttgagtacgagggaacatacactcgatttggatatgagttcggcaactcgcactatcccttcaatggaggagtgcatcactcgaacgacaacatctacctcttcgccacgcatcccctggaggggcaggacactcagatgtctcagaaaatggtcgatgtgtggacttcatttgccatcgaaggtgttcccagaaatcttagtccgctaagtagcgcaagtggtccgtataacaaacttaatttggaagtaactaagggcgacgatttgttggacactttaactgccgctattgacgatcctgacaatggaagactacagcgagaagacatggagttttaatagccaccattcgacatacaatcaaggaagtgtaaattattgtttcaataacaaattaatgttacattttaaattaaagcaaacgttttttagcttagtaaacaaaatagaataccagtagacatttcactcacctttccgtttagttcctcattaggcaaagcgctggccacaatgttggagcaataccgatcgatgttctttccacaggcgctttgcagtgagggattgaatcgaaagtcggtgttttgctcgatcatgcgattaacaaccaccaggtgacaccgctggtcgaactgcgtgtcatccttgtacgtcttgaggcagtccagtagttttgacgaatccgtgctggggcagaacttgtagatcatttccttgcacgtggtgagaagcgtatagtcggtgccactgtcgcccaactcagacttctttaccatgaagatcgcatgatgacacggcttccccaaactatgggtctttcttataaggcactccagagcctgcaaggatagtaaacatagaagttggtatgtaatattgattaaattttgtttgtgatgtgaacttcgagtgcctgaagctaattttcatcgccacatatttcccatttcattctttcactaagttaacatcggttttgtttaagcgtattagtggttaaggatgagttagaaaaacttgctttttcattcacctgaccgggccccttttcctcctcgcagaattgctccagttcacgcttacaggcgttggccagcttggggtccagttgaatgctctcgcgctgctggtagagttgtgccttcacctggtggcggcactccttggggatctggtgacgctgcgccttgattgtgtcgttgcgcatgacctcactgaggcaagctaccacttcgtttttggtggcactggaggagcaaaagcgctggacatacggacggcacgcctccttgaactttgtagtgaagtggaagctctttagcgaaatgatctggaagtgctcgatggcagcccgacagcggagatccttgcgcagatctgcgtcgttcttgtgcgctataagacagtccatcatgtcgcctggaatcgattagaatacatatttgagtgccaaaattgggtattgttaggcgttttaaatctatatttttattaccattgtcttttccgcttttgaggatcgccgagcagtgctgctgcatggcctctccgcaaacgttcattatgacggggttgagctcgacgtgggctgcctcctcctccgtatacttgaccacaactgtcttgcactccggctgcagttggtccatgttcttttgcagacactccatttcacttcccttctctgtgcagtccgcgcagaacgcagaaagatcgttcaaacagtaatcctctacctcaggaatcaagtccatggatattgcgcgttgtctcatcactcgcttcacctcctgaaaacagtccttcctcaaagtttggtgctcgtcctcgctgaaggccatgcgatgtaggcagggcaggatcatgggtcccctttccggatccatttgtatgttctgcgcatcatcccattgcttctttgcacggcagtacttcacagcgtcatcgcggcagtgtttgtacagctggggatccaacttgaaatctctggcaacgaaatactcaataatgagaagggcctgctcgcaatcgggcagcataaccggagtgccaatgtgctccatcaaacaacccatgactcgtgcttcaccgccctgcacatccctgcagaccacatccaccactggtttgcatgcgcgtctaagcaccggatcgactcgccaatcctctccagcatcgctggccttaatcagtgtctccagtcctcgctgacattgtgccgtcacccgtctttgcggacgcctagccttaacgtgctctaacaggcagtggatgatctcgccacctgtacttgtcatgccattcaccagctgcgccttgtgctcgtccggacagaacttgggtatgtcatccgcacagtcgttgagtagctccggtgacagctggtagtcggtcatcagcatgcggcggtgatctgttaactccgtgagacaagggggcgccagtttagtcccgtttttggacactgattccaggcatagcaggatctgagccaaccgcacgtgcttgtcttcagagacgccgcgccggcagtggtacaacttaatgtcgtccttacaggccttagccagaccgtgggacacgcggtagtcgcggcctatttgctggtccctcaaagtgattcgtgcggagcactgggaagacatggaggggtggttcttgtgccgcacgaggcacttgtacccggcagcagtgccggacttttcctgaaacaaaaacattttttaaattatttttcattcacgctaatcttatctgcagcgctttatagtgagacaaatcaaaatatgattcacattgcctttcaactaatgaccctcgtggcatgtctttttttcctagctctaagcatagttaattcaaaagactagctcaaaaacatatggttgccttttgaatcccactcacctgcgagcaaaaggacgaaaaatcctcctggcagacgcgaaagagctcaatagaattgatggctgcctggcaaactggctcgatgccggtcttggtggcactctcctgtaggcattgaaccgttgtcagctgcgacagcacggaaggcaggtggtcgacattcagtcggccacacttgttttcctccacgagtggtccgcaggcggtgtagaactcgtctacggcgctgtagtcctgccccaaggactcgtaggcccttcgaaggtgctgatggcaggcgttgttctgcagtagctttaatcgctgctgctccaggcagctccacaggtgcactgcgttcaggcagctctccagcttgggccgctcggcgggacaataagcgggcaggaaagtgctctctaaccaagcgggcaactgcaactggcgctgctgcatccacagagcgttctggcaaccctccgggagatccatcaactggctagagctgaatgtcagggcgcactccagcatggacagattgtcggtggacttgtggtgcgcgcagagtttctttagatcctggcactcggccaagtcgataatgctgtgcatgtcttttgcgttatccacgtcgattgctactcgccggctgcgctggagggtgtccgcggccgtgttggccgtggccatgaggagaacggaaaacaggacgtgtagcatgttcgcggatggctcttctgtctgtctggacgaccaatcttctggacagcggtctcagtgaccgatcatcgaaaccaactccaccggcgaattgcgtatgtaaagaagcagctacttgtgcagtcgtcacagcgattcggtgctctttttttgaccagaaaacatatgtatattccgtcgggtctcaatgtgcagtgccgagcaacaacaacaagtacgtggaaaatggtgggccggttcgccggtctcacgtcctggtcatctcttgtacggcttttctggctgcttaatatgtgatccaagtactggcacagcctggaatgctgctaatgcggcatctatagtgctagcttagtttctattcgcaataaattcaccgacgaccaacaggcgatagaagatggctagaactatcggctgcaccgagatctatcgatagccgaagattaagctggagatagattttcgactagacagggtcggagcaaaaggggttggtaagtacctagttcgaattatatatttagatatattccacagaaggtctcccataacaatatcaactttttaacttgttgctacctgattttgatcgctgtagaattagtttgtattttaattcacaaaaaataacgtaagaatttagtaaattcaattgaattgtgaccagttttaaaataatataccgaaacatcgatagtaccaccgataaatgtatcttcagcacttcgatacgctcgttattgtgtagatactatttgtttttgagcgaattcagttggctgcttcgctggcctaggataataattgcgtgctggcggacaaaattaagctgaattagttaaccacctgtggttttgtcttcgatcgcaattgaatagcatctaagtgcaaatagaacggcttaagcgcgagtttaatttcccctcctccactgtcaagctcacaccttgaaacttgtttcgagtttaccaagtagagcgaggtatttgtgtgtttgtgtatacatacaagcatatgcaaaaggctttagaaattccaacgcaactaacaaattgcagtgcagagccacttgcattgccagttggaaacacttaaatgatataacttcatttcggagactggtaaccattcacaatgggtaagttggccaacaccttctggctacgagtggttcaaagtttagatttacattttgactaagctgtaagccactggggattgattatctattttatatttccctttttccaattggacacacatctatgttacgtgtgaaagttattcaaataagtattgtttttgacgtactcttgtgctctaacgatggcagtcattgttttggttagaaatttgaagaggctactgaaaaaagtatgaatgggttt

SEQ ID NO: 16001 - DNA, 3100 bp, DROSOPHILA
cctgttggtcgtcggtgaatttattgcgaatagaaactaagctagcactatagatgccgcattagcagcattccaggctgtgccagtacttggatcacatattaagcagccagaaaagccgtacaagagatgaccaggacgtgagaccggcgaaccggcccaccattttccacgtacttgttgttgttgctcggcactgcacattgagacccgacggaatatacatatgttttctggtcaaaaaaagagcaccgaatcgctgtgacgactgcacaagtagctgcttctttacatacgcaattcgccggtggagttggtttcgatgatcggtcactgagaccgctgtccagaagattggtcgtccagacagacagaagagccatccgcgaacatgctacacgtcctgttttccgttctcctcatggccacggccaacacggccgcggacaccctccagcgcagccggcgagtagcaatcgacgtggataacgcaaaagacatgcacagcattatcgacttggccgagtgccaggatctaaagaaactctgcgcgcaccacaagtccaccgacaatctgtccatgctggagtgcgccctgacattcagctctagccagttgatggatctcccggagggttgccagaacgctctgtggatgcagcagcgccagttgcagttgcccgcttggttagagagcactttcctgcccgcttattgtcccgccgagcggcccaagctggagagctgcctgaacgcagtgcacctgtggagctgcctggagcagcagcgattaaagctactgcagaacaacgcctgccatcagcaccttcgaagggcctacgagtccttggggcaggactacagcgccgtagacgagttctacaccgcctgcggaccactcgtggaggaaaacaagtgtggccgactgaatgtcgaccacctgccttccgtgctgtcgcagctgacaacggttcaatgcctacaggagagtgccaccaagaccggcatcgagccagtttgccaggcagccatcaattctattgagctctttcgcgtctgccaggaggatttttcgtccttttgctcgcaggaaaagtccggcactgctgccgggtacaagtgcctcgtgcggcacaagaaccacccctccatgtcttcccagtgctccgcacgaatcactttgagggaccagcaaataggccgcgactaccgcgtgtcccacggtctggctaaggcctgtaaggacgacattaagttgtaccactgccggcgcggcgtctctgaagacaagcacgtgcggttggctcagatcctgctatgcctggaatcagtgtccaaaaacgggactaaactggcgcccccttgtctcacggagttaacagatcaccgccgcatgctgatgaccgactaccagctgtcaccggagctactcaacgactgtgcggatgacatacccaagttctgtccggacgagcacaaggcgcagctggtgaatggcatgacaagtacaggtggcgagatcatccactgcctgttagagcacgttaaggctaggcgtccgcaaagacgggtgacggcacaatgtcagcgaggactggagacactgattaaggccagcgatgctggagaggattggcgagtcgatccggtgcttagacgcgcatgcaaaccagtggtggatgtggtctgcagggatgtgcagggcggtgaagcacgagtcatgggttgtttgatggagcacattggcactccggttatgctgcccgattgcgagcaggcccttctcattattgagtatttcgttgccagagatttcaagttggatccccagctgtacaaacactgccgcgatgacgctgtgaagtactgccgtgcaaagaagcaatgggatgatgcgcagaacatacaaatggatccggaaaggggacccatgatcctgccctgcctacatcgcatggccttcagcgaggacgagcaccaaactttgaggaaggactgttttcaggaggtgaagcgagtgatgagacaacgcgcaatatccatggacttgattcctgaggtagaggattactgtttgaacgatctttctgcgttctgcgcggactgcacagagaagggaagtgaaatggagtgtctgcaaaagaacatggaccaactgcagccggagtgcaagacagttgtggtcaagtatacggaggaggaggcagcccacgtcgagctcaaccccgtcataatgaacgtttgcggagaggccatgcagcagcactgctcggcgatcctcaaaagcggaaaagacaatggcgacatgatggactgtcttatagcgcacaagaacgacgcagatctgcgcaaggatctccgctgtcgggctgccatcgagcacttccagatcatttcgctaaagagcttccacttcactacaaagttcaaggaggcgtgccgtccgtatgtccagcgcttttgctcctccagtgccaccaaaaacgaagtggtagcttgcctcagtgaggtcatgcgcaacgacacaatcaaggcgcagcgtcaccagatccccaaggagtgccgccaccaggtgaaggcacaactctaccagcagcgcgagagcattcaactggaccccaagctggccaacgcctgtaagcgtgaactggagcaattctgcgaggaggaaaaggggcccggtcaggctctggagtgccttataagaaagacccatagtttggggaagccgtgtcatcatgcgatcttcatggtaaagaagtctgagttgggcgacagtggcaccgactatacgcttctcaccacgtgcaaggaaatgatctacaagttctgccccagcacggattcgtcaaaactactggactgcctcaagacgtacaaggatgacacgcagttcgaccagcggtgtcacctggtggttgttaatcgcatgatcgagcaaaacaccgactttcgattcaatccctcactgcaaagcgcctgtggaaagaacatcgatcggtattgctccaacattgtggccagcgctttgcctaatgaggaactaaacggaaaggtgagtgaaatgtctactggtattctattttgtttactaagctaa

SEQ ID NO: 16002 - protein, 902 aa, DROSOPHILA
MLHVLFSVLLMATANTAADTLQRSRRVAIDVDNAKDMHSIIDLAECQDLKKLCAHHKSTDNLSMLECALTFSSSQLMDLPEGCQNALWMQQRQLQLPAWLESTFLPAYCPAERPKLESCLNAVHLWSCLEQQRLKLLQNNACHQHLRRAYESLGQDYSAVDEFYTACGPLVEENKCGRLNVDHLPSVLSQLTTVQCLQESATKTGIEPVCQAAINSIELFRVCQEDFSSFCSQEKSGTAAGYKCLVRHKNHPSMSSQCSARITLRDQQIGRDYRVSHGLAKACKDDIKLYHCRRGVSEDKHVRLAQILLCLESVSKNGTKLAPPCLTELTDHRRMLMTDYQLSPELLNDCADDIPKFCPDEHKAQLVNGMTSTGGEIIHCLLEHVKARRPQRRVTAQCQRGLETLIKASDAGEDWRVDPVLRRACKPVVDVVCRDVQGGEARVMGCLMEHIGTPVMLPDCEQALLIIEYFVARDFKLDPQLYKHCRDDAVKYCRAKKQWDDAQNIQMDPERGPMILPCLHRMAFSEDEHQTLRKDCFQEVKRVMRQRAISMDLIPEVEDYCLNDLSAFCADCTEKGSEMECLQKNMDQLQPECKTVVVKYTEEEAAHVELNPVIMNVCGEAMQQHCSAILKSGKDNGDMMDCLIAHKNDADLRKDLRCRAAIEHFQIISLKSFHFTTKFKEACRPYVQRFCSSSATKNEVVACLSEVMRNDTIKAQRHQIPKECRHQVKAQLYQQRESIQLDPKLANACKRELEQFCEEEKGPGQALECLIRKTHSLGKPCHHAIFMVKKSELGDSGTDYTLLTTCKEMIYKFCPSTDSSKLLDCLKTYKDDTQFDQRCHLVVVNRMIEQNTDFRFNPSLQSACGKNIDRYCSNIVASALPNEELNGKVSEMSTGILFCLLS

SEQ ID NO: 16003 - DNA, 3654 bp, DROSOPHILA
taacaaattcttattttccttatagactcaactttacgtcggcgttttcgttatggctgccttcatcgtctacgatacacagaacattgtggagaagtgccgaaacggaaatcgagatgtggtgcagcacgctttagatttgttcttcgatgtactcagcatgttccgccgtttgctgattatactgacgcaaaaggtatgtttccgcgacaagggtttatcccaacgatcagttgttatatagcccccttacccagctcaagaccttcatggtttaagatagctcaagccggagccagttgcccaaaatagctcaatcagattatcctcgaaaacatgctgatcactttgcaaaagcttccagtataaaattcgatgtgaaaaaccattttaaacggtatttcctgcagccaaggcaataagtgtactttcacagtcaggctaggatccttaggtctatataaaccacttgtgggaagtatatttatttccaaaaactgccaatgaaactttttgcaaagttctctagctgtttgtgaaattatatttatgtcctttgcttttgcaccgtttaaaggcaataccagtaatgctcttaattatttgcaggaggagcgaaaacagaatgaacgccgccagaacaaaactaaataaacttttatgtgtaacagccaccacaagaaaaacatctgacacggattttggaggcagatttctcattctagaaaattattcgcattgaatattaataatgccgtgtacatttggctttaaatttacagacatatatatccaatataaaacccatgaaatttttccatttaataaacaccacaagaagtaagctcatccgcgtttcttgtcccaaacatggcgcagtagatagaccatgttgatagtatcgattaggggcggaggggtcaattaattaggctaagtgcactctgcaggtaataacttgatgttagtgggaatcggttattcaaagctgtagtgttcaatggacaacatggcgcaggcggaggacgcagtgcaaccactattgcagcagttccagcaactgttcttcatatccaagatagctggaattctgccacaggatctcgagaagtttcgatctaggaatctgctggagaaatcccgtaatggcatgatttacatgctgagtactttaatactctacgttgtgctctataatattttgatatattcctttggagaggaggaccgcagcctaaaggcctcgcagagtcagttaaccatccgccttgaaaggtgcaaactcataaccatgttattcattcttcccaggcaccttgactttcgtgattggcttgttcctgacctatatcggtctgattatgatggtctccgaccagttgaccgcgttacgaaaccagggtagaattggagagctttacgagcgcatccgtctggtggatgagcgcctttacaaagaggggtgtgttatggacaacagtacaattggacggcgcatacgaattatgctgatcatgacggtcatctttgagttgtccattttggtgagcacctatgtcaagctggtggactatagtcaatggatgtccttgttatggatagtgtccgccattcccacgttcatcaacacgctagacaagatctggttcgctgtttcgttatatgcgttgaaagaacgcttcgaggccataaacgccaccctagaggaactggtggacacgcacgagaagcataagctgtggctgcgaggcaatcaagaggttccgcctcctctggacagctcccagccgcctcagtatgacagcaacctggagtatctgtacaaggaactaggaggtatggacataggttccattggcaagagttcagtgtctggttcggggaaaaacaaagtagcaccagtggcccactccatgaactcctttggtgaagcaattgatgcggccagcaggaagcctccaccgcctcccctggccactaacatggtccatgaaagcgagctgggaaatgccgctaaggtagaggagaaactaaacaacctgtgccaggtgcacgacgagatctgtgaaatcggaaaagctttgaacgagctgtggagctatcccattctatctctaatggcctatggttttctgattttcactgctcaactttatttcctctactgcgctacacagtaccaatcgataccatcgcttttccgttccgccaagaatcccttcatcactgttatagttctaagttatacgtctggaaaatgcgtgtacctcatctacctgagttggaaaacgtcgcaggcctccaagcgcacaggaatcagtctgcacaaatgtggcgtggtggccgatgataatcttctctacgaaattgttaaccacctatcgctaaaattgctcaaccactcggtggacttttcggcttgcggcttctttaccctggacatggaaacattgtatggtgtgagtggcgggatcactagctacctgatcatcctgattcagttcaatttggccgcccagcaggccaaagaggctatacagacgttcaactcgcttaatgacaccgccggcttggttggtgccgccaccgatatggataatattagctccacgctgcgtgatttcgtcaccacgaccatgacaccggcggtctaaactttgttttcttgaatgttttattcgatgtttcgagcacgtcctcctggcacttttacttatatttatttgtcacgaaataaactctcacgaagcagttctgcgtttgtactccgcacgggcatcctctatttcattaagaagatctgcgtaggttgcattcgctccgtcaaagtcaaggatagcaacgcaacaaatttgcgctcgcttttggagggcataagaaagctcccttctcagcagaggaaagcaatagggcacttgttgctgctggcattggaatttcaagccttctatagtcgcatctagaccacctttttaagcggatattattaatggctgatttgcgaacaattcgattactcactttcgccggggcagatttcgcagtcagtggccaggaacaacaatttcaccttgtttatccttagcctcgccagagcttctcgaacacccaaaaccaggcggggatgtgcacgcgctttaatctcgtttttggcaaaggcgcgcttctgaaatcgatccaggtcccttaacaactgagtggacaactccttgaggcgaggacgggtgcagttgtcacaatagctggaagagatcaaacatgatatttcaacgtttaaagaaggtacaaccagtgtaatcaaaccttctaaatcgccgtgagtgaatggcatgtactgtttttgcttgtgaagggttgttgggtgcaggggttttactaagtgataggttttgaacttgttgctccagcggaatagcattcggattgatatcttgaccaactactgggactccttcaagatcattctctgcgacttctctctccgccttctttgaagtgcgatatacacgtacggacttcttcaacctggtgatcttcttcttgggatcaaggcgggttttgcccttgggtttgtaaactatgtagctacctcttgttatggctaaatgtgtcttttgaagtttatgtgcctttgtttgcctttgtgtttttggt

SEQ ID NO: 16004 - DNA, 1497 bp, DROSOPHILA
atggacaacatggcgcaggcggaggacgcagtgcaaccactattgcagcagttccagcaactgttcttcatatccaagatagctggaattctgccacaggatctcgagaagtttcgatctaggaatctgctggagaaatcccgtaatggcatgatttacatgctgagtactttaatactctacgttgtgctctataatattttgatatattcctttggagaggaggaccgcagcctaaaggcctcgcagagcaccttgactttcgtgattggcttgttcctgacctatatcggtctgattatgatggtctccgaccagttgaccgcgttacgaaaccagggtagaattggagagctttacgagcgcatccgtctggtggatgagcgcctttacaaagaggggtgtgttatggacaacagtacaattggacggcgcatacgaattatgctgatcatgacggtcatctttgagttgtccattttggtgagcacctatgtcaagctggtggactatagtcaatggatgtccttgttatggatagtgtccgccattcccacgttcatcaacacgctagacaagatctggttcgctgtttcgttatatgcgttgaaagaacgcttcgaggccataaacgccaccctagaggaactggtggacacgcacgagaagcataagctgtggctgcgaggcaatcaagaggttccgcctcctctggacagctcccagccgcctcagtatgacagcaacctggagtatctgtacaaggaactaggagcaattgatgcggccagcaggaagcctccaccgcctcccctggccactaacatggtccatgaaagcgagctgggaaatgccgctaaggtagaggagaaactaaacaacctgtgccaggtgcacgacgagatctgtgaaatcggaaaagctttgaacgagctgtggagctatcccattctatctctaatggcctatggttttctgattttcactgctcaactttatttcctctactgcgctacacagtaccaatcgataccatcgcttttccgttccgccaagaatcccttcatcactgttatagttctaagttatacgtctggaaaatgcgtgtacctcatctacctgagttggaaaacgtcgcaggcctccaagcgcacaggaatcagtctgcacaaatgtggcgtggtggccgatgataatcttctctacgaaattgttaaccacctatcgctaaaattgctcaaccactcggtggacttttcggcttgcggcttctttaccctggacatggaaacattgtatggtgtgagtggcgggatcactagctacctgatcatcctgattcagttcaatttggccgcccagcaggccaaagaggctatacagacgttcaactcgcttaatgacaccgccggcttggttggtgccgccaccgatatggataatattagctccacgctgcgtgatttcgtcaccacgaccatgacaccggcggtctaa

SEQ ID NO: 16005 - protein, 498 aa, DROSOPHILA
MDNMAQAEDAVQPLLQQFQQLFFISKIAGILPQDLEKFRSRNLLEKSRNGMIYMLSTLILYVVLYNILIYSFGEEDRSLKASQSTLTFVIGLFLTYIGLIMMVSDQLTALRNQGRIGELYERIRLVDERLYKEGCVMDNSTIGRRIRIMLIMTVIFELSILVSTYVKLVDYSQWMSLLWIVSAIPTFINTLDKIWFAVSLYALKERFEAINATLEELVDTHEKHKLWLRGNQEVPPPLDSSQPPQYDSNLEYLYKELGAIDAASRKPPPPPLATNMVHESELGNAAKVEEKLNNLCQVHDEICEIGKALNELWSYPILSLMAYGFLIFTAQLYFLYCATQYQSIPSLFRSAKNPFITVIVLSYTSGKCVYLIYLSWKTSQASKRTGISLHKCGVVADDNLLYEIVNHLSLKLLNHSVDFSACGFFTLDMETLYGVSGGITSYLIILIQFNLAAQQAKEAIQTFNSLNDTAGLVGAATDMDNISSTLRDFVTTTMTPAV

SEQ ID NO: 16006 - DNA, 3672 bp, DROSOPHILA
cgcatctagaccacctttttaagcggatattattaatggctgatttgcgaacaattcgattactcactttcgccggggcagatttcgcagtcagtggccaggaacaacaatttcaccttgtttatccttagcctcgccagagcttctcgaacacccaaaaccaggcggggatgtgcacgcgctttaatctcgtttttggcaaaggcgcgcttctgaaatcgatccaggtcccttaacaactgagtggacaactccttgaggcgaggacgggtgcagttgtcacaatagctggaagagatcaaacatgatatttcaacgtttaaagaaggtacaaccagtgtaatcaaaccttctaaatcgccgtgagtgaatggcatgtactgtttttgcttgtgaagggttgttgggtgcaggggttttactaagtgataggttttgaacttgttgctccagcggaatagcattcggattgatatcttgaccaactactgggactccttcaagatcattctctgcgacttctctctccgccttctttgaagtgcgatatacacgtacggacttcttcaacctggtgatcttcttcttgggatcaaggcgggttttgcccttgggtttgtaaactatgtagctacctcttgttatggctaaatgtgtcttttgaagtttatgtgcctttgtttgcctttgtgtttttggtctcggcttgatgacaaagtccagaagagaggtttgctgctcccgtttcctgtgctggtttttgtacttggagctgcgtggagtaatcttgatcgctgtatcctggacatcctgattcctgctcctccttattttttcagtcatttattgtggattcttagtgcatctctaaaatagtgttggtcgtcgcggtaaatggtgaaatcgctttttcaccacacatgaatgcgaagaatcagcgcggtacaacaacgtaattaataaaatcaagaaccgcagcaaatgcggcctcattcgttcctaaaagttttgatttggaagttcaacgttaggcttctgtgaaaaaatgagtaccgctaatcattttcaaagaattcttgagaaattgtcaatctctgacaatgaaagggccgtatataccaaggaagccgaggaaattcaaaactatgtagttgacgaacttaagcgggtagacaaaacctttcgccaggtattcgacggactcagtcttggaggtaagttatttaattttaaatatctacatatattctacatatattctacatatatttctatataaaaacaaaacaaataaatagaataatgttagttacaagacattgtctggtcgattttctaatgcattcaatattatttttaataaaagtgtaaattgacggaagtaatacaaatgtaagtcgagataatccaacgctatacaattacaattgatatctcttgctttattttgttttatcatttttgcaagaaatgttgtactttcgtaaattcatcgttatgtatgtacattatgtacctaaaaatatatgtacacgtatcttttaggaagttacttggatcgcgtcaagctaaatttgcccgatgaatttgatctgcacatgaaactaaagtttccatttgatatccgaccgactcggatcgaccaagggtttatttatttagaggctgatctcaccgtaatcaatccccaacgcatccatcgtattgtacttcaagactggctacgcaatgcattccgcaaggtattcaggtctaatcagacaattgccactaccagtaatcgagtctacaaattaacctatactcttgaggggtatggttgtgcccataccattttagccgtttgtggtagtcgctcgatatcttttgatttggtaccagcattcgaattctctggaagccaatggccgtttgatatttgcccggttcctgctgatgttagcaataattggccatggttcgccattccgcaacagaagaagaagtcggctaaaccgagaaccacattcatggtttgtgcaccacattgggagcgcgaaattatgaagggcaaggataatttgaagaacgttctacggctgatgaaaggattgcgggatgcccacgccaggaaattgcctcacttgtccagctacatgttgaaaacagttttgcttcatcgcctcgaaagtgctgactgggaaagagacctgggcaccctattggttgagatgtggagtcatttggtggatcatctacgcgctcgtagactggagttctttttggctaaggatcataatgtattcaatcgtatgaatcaaaatgaaatcaagatatgtctagaaaacgcaagcactctgctaagaaagctttgtattgctcagacatgcggtggtagctaccatcatgtggcccaactattcaatattccaaattaagaagaatttaatttcaaaacaataccgagcctttttcatgccatttgcagaaaggaaaaagcgtacatgcacacatttggctcattcacaagggcgcagaacaaatattcgattatatccgaggctgaataagcacatatcttgctgagtaacagaactttagtggaagaaaaaagaagttgaatcaaaagtcatttcggccgcacatttgattgtttacattgtccctgaactttgtttaaaaataaagctacgaaaaaaaattgatttaccctttgtttatatgtatgtatatttatacaactatgagtgttaaatatcttatgaagagacaactttagccttacgatctacaggaaatatcaacggtaacttttaactaaagttatatttcagggggatttcgctataatcgaatgctgctttcgatggacatgtgcaagttgttgaactcccttaggtgcgaaaggatgtcgtcccgctcccgttcatagatatcccagaatttgagatattggttaacgtgctggagtaccaggttgcgggcaaagtcaagacagctcctaacgttacgcatccgccgcctgcagctggtcaagaccgaacgcacctgctgctccggctccaattgggcgatcacaaatgcaaaaacgttttgcacatcaatccgcacatcggttgggaaaaccacggattccgcgctctttgcctgggggaagacaattagagacggcgtggttggcatggccaactcccagggcagatcattagcctggctatcgaagcgtacaaagtgcacctcggggctgccgagcagcgccgaaacctgcagaaatgcttgggatagaacggctgacagagcgcagtcaggacgatgcataaataccacattggtgacatttggtcgctggattgcctgcaacagcatctgtctattgtattttctactgaacccagattccatcatggcaagagcatttttgtgagtccttggcaatgttctggcgtaaaactgccgtataaaatctttaagagctacgtaggagaatgtgtgttgctgtggcataacatacagtgactcttcagccgcatccaagatgaaaacctgcacctgctgatgggtttgctgaatgccaagctggtgtagatagtctctatatttcacagaatcgaagatcaccacgcccagcgaccgattgtgggctgcgcgctccgtcgagtgctgccaaatgagctggccatatttggttaccat

SEQ ID NO: 16007 - DNA, 1341 bp, DROSOPHILA
taaaagttttgatttggaagttcaacgttaggcttctgtgaaaaaatgagtaccgctaatcattttcaaagaattcttgagaaattgtcaatctctgacaatgaaagggccgtatataccaaggaagccgaggaaattcaaaactatgtagttgacgaacttaagcgggtagacaaaacctttcgccaggtattcgacggactcagtcttggaggaagttacttggatcgcgtcaagctaaatttgcccgatgaatttgatctgcacatgaaactaaagtttccatttgatatccgaccgactcggatcgaccaagggtttatttatttagaggctgatctcaccgtaatcaatccccaacgcatccatcgtattgtacttcaagactggctacgcaatgcattccgcaaggtattcaggtctaatcagacaattgccactaccagtaatcgagtctacaaattaacctatactcttgaggggtatggttgtgcccataccattttagccgtttgtggtagtcgctcgatatcttttgatttggtaccagcattcgaattctctggaagccaatggccgtttgatatttgcccggttcctgctgatgttagcaataattggccatggttcgccattccgcaacagaagaagaagtcggctaaaccgagaaccacattcatggtttgtgcaccacattgggagcgcgaaattatgaagggcaaggataatttgaagaacgttctacggctgatgaaaggattgcgggatgcccacgccaggaaattgcctcacttgtccagctacatgttgaaaacagttttgcttcatcgcctcgaaagtgctgactgggaaagagacctgggcaccctattggttgagatgtggagtcatttggtggatcatctacgcgctcgtagactggagttctttttggctaaggatcataatgtattcaatcgtatgaatcaaaatgaaatcaagatatgtctagaaaacgcaagcactctgctaagaaagctttgtattgctcagacatgcggtggtagctaccatcatgtggcccaactattcaatattccaaattaagaagaatttaatttcaaaacaataccgagcctttttcatgccatttgcagaaaggaaaaagcgtacatgcacacatttggctcattcacaagggcgcagaacaaatattcgattatatccgaggctgaataagcacatatcttgctgagtaacagaactttagtggaagaaaaaagaagttgaatcaaaagtcatttcggccgcacatttgattgtttacattgtccctgaactttgtttaaaaataaagctacg

SEQ ID NO: 16008 - protein, 346 aa, DROSOPHILA
MSTANHFQRILEKLSISDNERAVYTKEAEEIQNYVVDELKRVDKTFRQVFDGLSLGGSYLDRVKLNLPDEFDLHMKLKFPFDIRPTRIDQGFIYLEADLTVINPQRIHRIVLQDWLRNAFRKVFRSNQTIATTSNRVYKLTYTLEGYGCAHTILAVCGSRSISFDLVPAFEFSGSQWPFDICPVPADVSNNWPWFAIPQQKKKSAKPRTTFMVCAPHWEREIMKGKDNLKNVLRLMKGLRDAHARKLPHLSSYMLKTVLLHRLESADWERDLGTLLVEMWSHLVDHLRARRLEFFLAKDHNVFNRMNQNEIKICLENASTLLRKLCIAQTCGGSYHHVAQLFNIPN

SEQ ID NO: 16009 - DNA, 3140 bp, DROSOPHILA
atcatgcatctttcttgatttcacgcgttcagtatgatagagaaattttacatagtttttaaatgaagttttcaataaagattttcaaacacattttcttctatcattatcatttgctaatcaagcatagcttcgaatcgagatcaatcccacattcagtttttaattattaaccaagacttagccacagaaaatgaagattcgtacctgtcaatgcatccaaaagatgcgagcttagaaggcgcactgctgctgctcagaagaaatatatgtcaaactaaattctgtggtcatcggaaaatacaagcaggcaggcacataaagcgacagcgcttctgcgtcaaatcagaagtgtccacttaagctgaatgtatagctgggccagaagcaacacgaaaagtgggtctagtggccattgttttcagtttgctgatgtgcacaatggaaaagccgtgtgcatacagatacaaatactaagatatctatatttaaaaatctggacaacagctggaagaggcgaaggtaaggaaacagcaaagggcccgaatgcggtttagttgcgaaacgttgctcgagtctcggagatggcactgcagctgcaaattgagaagctcaaaggtttggacaactacaaggcctggtcgatgacggtgcgggcgtatctggagtcggaggaactctggacggtggtggagaatggtcccgagaacaacgaggaggtgagtgatggtgtggcgccgtttatggctacagaaaacccatgtccatgccatactccttgcagtccctgctaaaggacaagcgggccaagttcttgattctctgcctgatcgagaccaagttgtgccaattcatggtcagcatccgcacggctcgggatctgtggaattacttgcgcacccagcattcgctgcgttaaagtagaaatcaatatagatcagtttcagtccattgtattacaaatatatgaattacacttcacatgcgtagcgcccttctcctaggcttccggaagttcgatgactacaggctggtcctcgggatcctcgtctagcaggccctcgaattcccatcccaattttttctccagccgcttagttagccgctcagcgctgacacttaagccgcccgcatgcagattgaccagcagttcgcgtacatctttgtagacggtgttatgcggaccaggcaccatcagctcctcgggcagatggggcagctggtgggccaaaacctcgctgtatttcatgtacgttaacttgtgcttggtgaccgccgtttgcgagtgagccagcaagcccaaaagcttgcgccagtgggccagagactccacagagtagcccactaggaaaaatgcgtaagccagctgcagttcctcaatgagtccatcggccgtttcaaagccttcgagcagtttgtcaacagcatcgatgcagtccaaggcatggcgggaaacatcagcgggcagggcatcttgtggaacacgcaggggtacggtagtgaagcgcggagctgttccttccacgggcttaaggtccggtaggagttcgctctcatctaagagaatccgagctgcagcattccggcggcttatgctgacagtagcggctccacctcgcggccgatctgcgtccgggcaggattgcagttcgatgttcgtacggatggttccttctgtcggacggcagcgatccacgcaagactccgtcacgctgccggtgagttccttccactggaccacgtaacgatagtcgtacggcgccagcacgcgctccagttgggctaggtttttgcgtattcggtctcgctccacttccggttcggcaatcctccgcgggcgcaattcctccagttcgtggtcccactctcgtacgacaatctcattcggatggaagaagtgcacgaatccaacacgaggggctgcatcgccgtagggaccacgggaggagcaccatacgtagtggactccgggtggaatcatcttgacgcctcggaaatccggaccaatggtgtaggcacaaagatcaatgccgaattccgtgccctcgggtacaccggcgatgaccagcactccgccatcagccaggaggcgtagggctagctgcggatccattttcatgctggagttgtccttgttcattgtgaaatattgttcgcttgcaattattaggaaaaagaaaacaattgcaagtgcgggcctttcagcaagttgccagatgtgacggctatttcgataagttctttcatgtgagcagtctggcaacactagacaaacaattctttcaagcggcaaattcaatttatatatacttttttttaagtaaatcttttgtttgatataattacattgtatttagactttgttgatttttgttacagtgtatattctgcatttacttaaaattcttgctgttcttcactttattgtgtaagtggaccatgactttatatctaaactatatttatacgtagtagtaattagtattgtaagctgcgtttagtgccgatatcgtcgagtatttggcgcagctcctcatcctcgaagcgaccctctagtgaaggaatcagcgccttggcctcctcgggcgcctccggacacaaattacccagtgccgccagttcgaatttgtgcagctttttctgcatcagcaagctgaatttgaaataattgaatattactactcgtacgtgctttgttcggttttgctacattaccttcgcgcagacattatggtctccttgtttttgaactttcgaaaactatccgtgtaggcgtacgtcttcatgaagacctcggagaactcttgctcctcgtcggcggattcgttttgtcgctttcggtgatcgagaagcatgtgcacctccgatatcagcagcgtctcggcattttcgaactctgaaacaaagagaaacgaaagggtttttttttcttgaattagttacttgacgacattcaggaaatttacaagtgaaacattggagaaaaaattagccctagccataggacggtggtctgctgatatggccatgttccagcagaaaatcgtagatctgacgcgttttgttcacgtcaattttgatgagacgtcgcgcatcggccagtcgtagatatccgagctttgcttgctccgtaacgagtt

SEQ ID NO: 16010 - DNA, 1140 bp, DROSOPHILA
atgaacaaggacaactccagcatgaaaatggatccgcagctagccctacgcctcctggctgatggcggagtgctggtcatcgccggtgtacccgagggcacggaattcggcattgatctttgtgcctacaccattggtccggatttccgaggcgtcaagatgattccacccggagtccactacgtatggtgctcctcccgtggtccctacggcgatgcagcccctcgtgttggattcgtgcacttcttccatccgaatgagattgtcgtacgagagtgggaccacgaactggaggaattgcgcccgcggaggattgccgaaccggaagtggagcgagaccgaatacgcaaaaacctagcccaactggagcgcgtgctggcgccgtacgactatcgttacgtggtccagtggaaggaactcaccggcagcgtgacggagtcttgcgtggatcgctgccgtccgacagaaggaaccatccgtacgaacatcgaactgcaatcctgcccggacgcagatcggccgcgaggtggagccgctactgtcagcataagccgccggaatgctgcagctcggattctcttagatgagagcgaactcctaccggaccttaagcccgtggaaggaacagctccgcgcttcactaccgtacccctgcgtgttccacaagatgccctgcccgctgatgtttcccgccatgccttggactgcatcgatgctgttgacaaactgctcgaaggctttgaaacggccgatggactcattgaggaactgcagctggcttacgcatttttcctagtgggctactctgtggagtctctggcccactggcgcaagcttttgggcttgctggctcactcgcaaacggcggtcaccaagcacaagttaacgtacatgaaatacagcgaggttttggcccaccagctgccccatctgcccgaggagctgatggtgcctggtccgcataacaccgtctacaaagatgtacgcgaactgctggtcaatctgcatgcgggcggcttaagtgtcagcgctgagcggctaactaagcggctggagaaaaaattgggatgggaattcgagggcctgctagacgaggatcccgaggaccagcctgtagtcatcgaacttccggaagcctag

SEQ ID NO: 16011 - protein, 379 aa, DROSOPHILA
MNKDNSSMKMDPQLALRLLADGGVLVIAGVPEGTEFGIDLCAYTIGPDFRGVKMIPPGVHYVWCSSRGPYGDAAPRVGFVHFFHPNEIVVREWDHELEELRPRRIAEPEVERDRIRKNLAQLERVLAPYDYRYVVQWKELTGSVTESCVDRCRPTEGTIRTNIELQSCPDADRPRGGAATVSISRRNAAARILLDESELLPDLKPVEGTAPRFTTVPLRVPQDALPADVSRHALDCIDAVDKLLEGFETADGLIEELQLAYAFFLVGYSVESLAHWRKLLGLLAHSQTAVTKHKLTYMKYSEVLAHQLPHLPEELMVPGPHNTVYKDVRELLVNLHAGGLSVSAERLTKRLEKKLGWEFEGLLDEDPEDQPVVIELPEA

SEQ ID NO: 16012 - DNA, 2384 bp, DROSOPHILA
acacggtattcacatgcattgtaaattttacaaaatatgcccttcaccttagaagttctttggctttaaatctatattatttttgatcaattggcaccatgcgaaaaattcttgttttgcattgccttaacgttattattatttgaaaatagattagaaatagtcaaatctatgtacatattatcacaaaaataaatttcaaaaatgactttatataagaatatttgtcattagagtattcatcttgcggcgtgtgaaaaattaataaggcaatgattgttgagtgcttgtgtccgcacttcgtgcctcaagatatgaacaaagcaaagacactagaataattatattgtctttgatattacttttgcaatttaatttaattgcatatttaattatttagtatatttattaaatcatttgacttaatatgatgtaacattaacattaaaagtgtttccataaaaatatttcgcttttaaaaaattgtcagatgagagacaaattagaattaaccataaatataaatgtgtaaacggtagctaattcgagcggcgattttaccaaacaaatttaaaaagctttaaaattataatagtcagggcgcgaattttttaaattttttttattttatcatattgctaggaaattggcaaaaactaccctaatatgtacaatgtaaattcgtttcttcgatcagaattgatttcggcccgaaaatcgtcttctagcacaacacgcacacttatacgcgttctcggtctcttgtttttactcacacaagcaagcaaattatatttttagatttcttacgctctcagcgggagtgagccgaaagagagtaattttggccgtcaccaaaaaagtggctgcatagtgccaaaccaatgtatggccgttacgcatcttgttattctagtgtctttggcctggcgacgcccttggatgctaagaataactatcaactttctgttcaatggggaactaactaatatgtcgtatattattttaactcactgcgtccattgccagctgccactttggaacagtatctcagcagatcgaccgtgcacgccgtttcaagaatgggatcaacgtgaatgtctgccttggcttcggcgatcagagtggccacctccatctggcactgccggttgatgatctgcttctgcaggaaggccgtcttcaagcactccgccagctggccgtgctcgtcggaatccacatttgccttgcacagttcctggatctccgacttgcagaacacctgcagcagggggtttaacttgtagttgagagcctgctcctgcaggatcttgatcatctccttcgcacatggttcgtccagcgcagattggcggaacttgtcttttagacagtgaatcacctaaaaaacattgaagcaaaataaataattgaaaaaataaaagatcaatttttgtcaaataaattaataaattaaaatctatgaaatctataagttgacaatagacatttgtgtgtattgtgggcgtgagagctttccacgatctgggggcactagagtgggcgtggcgacgtcctaaaataaacttctgcattcataatctacttttatagattccgagatcacagcgttcaaacttgttttatactttttaacaagtccagtataccaaagaccctagaataattcttctagtgtctttgagtatacctttataatatacgagtaacaggtatcagaatgttttgactcgttaaattatattcaattgaaaggttttcagcggagataaggaagcacatgtgattagagattacaaaagtaaaaagaaaacaactaaaatctcactgcctttcatattagccggcaattcgttagcctccagcgacgtttcattctcgatccagtcctcgttcgaagtcgaatcagtcaggtctgatgcgtagacgcggcgtatacgtgatgctgacgctgtgcggggttttaaccgctgggctaaccgcctttcttgtgatattcctcaccggcggccagggtgccgatgcgtccgaaacagctacggtgacagtggaactgtataatggccaggggacggttcttggcaactatgcctacacagcctggacggatcgagcctttatgcagtttcggggcatcccctttgccgaaccaccaatagaggaactacgttttcgggtaaacgatctcatttgtgtaaaaatgacactgcaaaaactaaagtattacttcaaggtcacaattattctagctcaaaccaaattaatccattagttcgtactcgatcaaaaatatgcttgcgggggagaatgttattcattgtcaaatgaaggtttgaactatataagttcaagagcagtcaaatcaaaatactactaaaagt

SEQ ID NO: 16013 - DNA, 384 bp, DROSOPHILA
gtgattcactgtctaaaagacaagttccgccaatctgcgctggacgaaccatgtgcgaaggagatgatcaagatcctgcaggagcaggctctcaactacaagttaaaccccctgctgcaggtgttctgcaagtcggagatccaggaactgtgcaaggcaaatgtggattccgacgagcacggccagctggcggagtgcttgaagacggccttcctgcagaagcagatcatcaaccggcagtgccagatggaggtggccactctgatcgccgaagccaaggcagacattcacgttgatcccattcttgaaacggcgtgcacggtcgatctgctgagatactgttccaaagtggcagctggcaatggacgcagtgagttaaaataa

SEQ ID NO: 16014 - protein, 106 aa, DROSOPHILA
MIKILQEQALNYKLNPLLQVFCKSEIQELCKANVDSDEHGQLAECLKTAFLQKQIINRQCQMEVATLIAEAKADIHVDPILETACTVDLLRYCSKVAAGNGRSELK

SEQ ID NO: 16015 - DNA, 4147 bp, DROSOPHILA
cttcttgaaatgtgaagattatgcaatgcttaacaaaaaagaactcatttaacttgatacatatatgtatcatgttatttggtgatgtttctactttcttttagtttttaagaccttagcgccggtatcttaaagtccatagctgtgtaacttacaccattgactggcttacccttttcaagtttcccttttcacgggagcgcagcgaaagtgtcccaaagtttttcaatgacgccgacaccgcctacttattctctgttttccaaaggggggtggccaggaggccaaagcacaaacaattgattccaatgagcctccgacatgaaaatggcaaatccaagccgtcaaagtaataaaaattagaccagaagccaagtggaaggcacggggaaagatagcaaaagttgccctttatgtcggtgagacatgcgagtcttcaaaactatgaagtacaaagtgcttcactgcggatacgaatacttagagatctgtctgtccgatgtgtccttaaatgcaattgcagtttgaactgaagtttgaaatgaaatgaaataaacttttttgacgcttccgattgcatttccctagtcattagagcgcaatgcgccaaaaaaagcaacgaagagcagatgaaaggtgtctggaagtgttgacggggtctacaaaattgatatttttggaacaccacaaactttgccttagccccaaaaatgtgtaaaccacaaaggggcttacaaaccacttacgctacgccacattttgctttcatatcaaccacagactagcagctaataaagttcaaacattattcttagggcaacggcttgttctgccatcaaacgatattattggttaggaaaacttatgtctggctgggttttcttacaaatttaatttcactagataacatcttttctactcctaataagttaagaacaaaagttagtatattaaatattttaattgttgcttgcagttaaaagaagtggagcgcgaacgaatgctgattatcgagggcaagtcagacgtaataccagacgaactagccaacgatcccatattcatggttaacaaagatgccaacatggagattcaaaaggagcgctccaaggtgggcttgattcccgactagactttagtttagtttaaaccactttttttttgccaaacagctgaagaccgctcgcgagaagaacgcggagcgtttgaagctgcagggcgttaaatgggagcgggaaaggcttcaacatgccgccaaggaagccgaactgctggccaagaaacgcgagcggcaccgccaacagaaattactggtggagcagtacaggaccgaggatgcggagaggggaatggatctgctgcggtaagtaacttaaactccggcgccattaaatgccggcaaaattaaaaatgaataacaatacattattcctcgctgacgctcggcgtcttctggggaagctttttatccccaacgagttggggcaacacaaaaaaaaggggggccaagcttcatgtattgtaaaaagatgaacccactggcttaaacggccttcggtgggggtggaaaaatgtgggtgccggcacagaaattccagcaaatcatagactgaggttaaatgctctaagttccaggaaaagtttattgtacaatcaaggaaaaccaagacaaattcttggaaaaaaaagaacagaacatgtgcttcaaatgcagattattgttttccatttaaatgcattaaaatattgtgattctgaagaacattcccttttcgcggagtacattccgttttatttgctgtggtaataataataaattttatgaggcggctctaataattcgtagcataaaaacttataaatagatgaggtaaatattttggtggccaattaatcttttattgctgcacataaaaatgccaaaaatagcacttcacaactatgtgctatctatcaataactcttggacaaagttaacaaaatttgtaacgtttgtttaggtaaatattcaactctgtatgtgttttaaaaaaccattgtgtccttcgaagaaagggtatcgccaaatgatgataaaaacgtttcgttcccagggcgcaaacttaaaccctgtttcttatttcgccattaatatgcatgagttgaatgtttagtgagttcgcttcagaatggaggctaatgaaaggaaaacttccccacttttccagcatcgataacgaagactggcgggagtgcgaaaagagcctgaaggagttcctcgaacaggagcgtgccaaaatgaaggagcgttcgttgcgcatatcccagccctactcctcggatccccaggatatacagaatatagtcagggccaggtggggattatacatgttaatatgatactactgctgtgatataatcaaatatgttgcacataattaggcaaaagttccgggagaccgagctgcgtattcgcaatcagctggaggacaagctaaaggatgtcaaacttgcggtcaccactcaacaactaaccgaacttatcgaggatgcccatcgttccagcggggagatcattatgccacaagaaccttcgatggaggacgatgacttccagggcggcgcagtgaactctaaatatctggacgatgccaccgatgtctccgaggagacggtgatcagcgaggatgccatcagcctgacgctggccaagcagcagtacgccgaggaactggaggccgaaatggaggacgagttcaatcgaggtctgctcatctccaagcagcagtacgatcagctgcgcttcgaggatgagaagatcgtggcgctcagaaatgccaaggtgagtccatcaaaatgttcacattaatttatatttttatactattatttttcgatcaggatattcgcgagctgtatcaactggccgaggagatcatcatgggtgagaactacgtcgaggcaccggaggagtgcgaggaggaggcggtggtggaggagccggaacaagatatctcctccgatcacgaggcccaggagccagccaaagcctaatgagaagctatagaataaaaccattttttacgttcggtggacagcggctggtcgtttatcctgctgcaccagtttttagcgagttctacaatatttggcaaaatatttggtttcccatccatgagagtccagatatttcaccaaatcgtgcaaacatcaattaggctggggtacctaccacagtttgttagacgtcggaagaggtagcgcaatcgaaaaacgttagctaaactgtcactcaatctcagcgtttaggttgataacttgataactgtcaatggggtttaattaaagctgtaacgacttgattgtacccgcatgacaacaaaaataaagcggccgaaaaatccaaaaacaaacgcgtgagtcaattgcacatttcactcgccaacgcccgacaagtatgctacaaatatttgctcagcgatacggatatgcgtaacggaaagatatgcgggccaaatagtgttctgaaaaccgaatcctcgaaagaagattacacggaaaactaatttagtaaatgataaggtccgctgagttttcatgtgtataatgatttttgggtaatgatttattttatttatttttacaaataaatgtatatgatgatatatattaatttcattataacttcataagaaatatatttatatatgacatatcaggctctgtttcccggaacaccaaccacaaatttcagagtaattagctgcgctaatttgtttatcattttgtttggcacgtcggcacatggcgagattgcatgtgccaaaccagaagggcgtgacgcatttggatgaatcggtggccatttgggtgggtggacttcggactgatgcaacttaagtcgcacaatccgcttgccataaggagcgtaaagtatgaagaagtggaggagagcgaacgaaataaataaagacgactataaatagcaggttctggccaaaaatatgacttttgccgcgctacatgaggaagcctccatccagtgacactttcccctgcccgcgagcacttaaacttttcagcgggctattattggttttctctgcgtaagtgtcatcttctgttgccccaggcgattttcaagaaaaccctatatatgcttattttc

SEQ ID NO: 16016 - DNA, 1116 bp, DROSOPHILA
atgctgattatcgagggcaagtcagacgtaataccagacgaactagccaacgatcccatattcatggttaacaaagatgccaacatggagattcaaaaggagcgctccaagctgaagaccgctcgcgagaagaacgcggagcgtttgaagctgcagggcgttaaatgggagcgggaaaggcttcaacatgccgccaaggaagccgaactgctggccaagaaacgcgagcggcaccgccaacagaaattactggtggagcagtacaggaccgaggatgcggagaggggaatggatctgctgcgcatcgataacgaagactggcgggagtgcgaaaagagcctgaaggagttcctcgaacaggagcgtgccaaaatgaaggagcgttcgttgcgcatatcccagccctactcctcggatccccaggatatacagaatatagtcagggccaggcaaaagttccgggagaccgagctgcgtattcgcaatcagctggaggacaagctaaaggatgtcaaacttgcggtcaccactcaacaactaaccgaacttatcgaggatgcccatcgttccagcggggagatcattatgccacaagaaccttcgatggaggacgatgacttccagggcggcgcagtgaactctaaatatctggacgatgccaccgatgtctccgaggagacggtgatcagcgaggatgccatcagcctgacgctggccaagcagcagtacgccgaggaactggaggccgaaatggaggacgagttcaatcgaggtctgctcatctccaagcagcagtacgatcagctgcgcttcgaggatgagaagatcgtggcgctcagaaatgccaaggatattcgcgagctgtatcaactggccgaggagatcatcatgggtgagaactacgtcgaggcaccggaggagtgcgaggaggaggcggtggtggaggagccggaacaagatatctcctccgatcacgaggcccaggagccagccaaagcctaatgagaagctatagaataaaaccattttttacgttcggtggacagcggctggtcgtttatcctgctgcaccagtttttagcgagttctacaatatttggcaaaatatttggtttc

SEQ ID NO: 16017 - protein, 333 aa, DROSOPHILA
MLIIEGKSDVIPDELANDPIFMVNKDANMEIQKERSKLKTAREKNAERLKLQGVKWERERLQHAAKEAELLAKKRERHRQQKLLVEQYRTEDAERGMDLLRIDNEDWRECEKSLKEFLEQERAKMKERSLRISQPYSSDPQDIQNIVRARQKFRETELRIRNQLEDKLKDVKLAVTTQQLTELIEDAHRSSGEIIMPQEPSMEDDDFQGGAVNSKYLDDATDVSEETVISEDAISLTLAKQQYAEELEAEMEDEFNRGLLISKQQYDQLRFEDEKIVALRNAKDIRELYQLAEEIIMGENYVEAPEECEEEAVVEEPEQDISSDHEAQEPAKA

SEQ ID NO: 16018 - DNA, 2278 bp, DROSOPHILA
agagctattttaatagaacctgttttggctgcatctgtgtgggtgcctgtgatgtgaatgaattggtcttgcttacttggctctttgaaaattcttattggacgtctgttatcaccattcttgagcttttaaaaacatctatttttcgaggcacttggttaaagttatgttacttccggtcagttacgatattttcaggcactttgtgcctattttgaaccttttctaacgcaataaaatctccttgttccaattcacttgcgagcagtgtgaccgcagttgggctctttcaacataccatccggtcccatatactaaaaaaaggcagctcattgtgcaaatataccaaaacacctgtagagctacagttcgttgaaattgtaatttttaacgtaaaacaaaggataataatagaattactaatatcaataataacaaaggcgtgtctagggtacaaattagagtcaagcttaatcaattaacacaaattttaattctcataagcccacaaggacataatattaaattttatactttgagttaccttggctatttgattaaattgataagcctatcccaagtttttacttaacttttgtactcaaaactaggcgctctgccgtattagcgctctggtattgatccaaagagaaacatctgttgatgccttccatgtggatatagttaaaaagaaggggcttttgtttacaaaaatacaatttaatatacaagtgaaattgttacaaaaaagctataacgaaaagagccctaagaatggaactagtatatttgattgtgttctcctttctcgcgtattttttggtcttacaaacgactaagccacaaattgctcacacaaatatcgaaaggcagacagggttgagtgaaagtatacttctgggtttcggaatggggtcatggatgggccgaaatggaaatcagcaagctcacaaacatgcacactccgcctacacagtgccactacagtctaatatttcaattatttattctttaagcccattgcccgtttggtggcccgtcccaggaagatgccggtgaggaagaccaggcccgtggcgctcattagtatcacaaggaagaatttccgcgccggagaggcgacgacttgttgcactagctgctgcacatcctcgggcggaagcgccaacgtgtcgtctgcgttcctgaacatctctatgcgtcgctgcagcttttctcggcagtccgcctctaacgagttcggcgtatccttcagcagcgtccttaagcaattaagttctagaacatagagagaaaaacattaattattatatttataaccacaccaaccacacacacacacacacacacacacacacacacacacacacacacacacacacacacacacacacacacacacacacacacacacacacacacacacacacacacacacacacacacacccccctgcaccaaaaaggaatgttcaagaaatttcataatttgctgcctatcacgtaacttcccgttgtttatttacactatgtactgttcttattctcttagtcaatctgcctccaattatatcgatctgcttcaaatacataagctgtttgataggtgctttcactaagagtttccagtgtaggaagaggaattctactatctgccccccctggctgatggcctggccaaagaccctagaataacaagatgcgtaacgccatacgattttttggcacacgattttttggccgtggctctagaggtggctccaggctctctcgaatttttgttagagagcgagagagcgaagagcgctacagcgaaccgctcttttctacgcatacagtgatagcagacaactttatgtgtgcacacgtatgctcatgcattgtaaatttgacaaaatatgcccttcaccttagaagttctttggctttaaatctatattatttttgatcaattggcaccatgcgaaaaattcttgttttgcattgccttaacgttattattatttgaaaatagattagaaatagtcaaatctatgtacatattatcacaaaaataaatttcaaaaatgactttatataagaatatttgtcattagagtattcatcttgcggcgtgtgaaaaattaataaggcaatgattgttgagtcaaagaccctagaataacaagatgcgtaacgccatacgattttttggcacacgattttttggccgtggctctagaggtggctccaggctctctcgaatttttgttagagagcgagagagcgaagagcgctac

SEQ ID NO: 16019 - DNA, 278 bp, DROSOPHILA
aacttaattgcttaaggacgctgctgaaggatacgccgaactcgttagaggcggactgccgagaaaagctgcagcgacgcatagagatgttcaggaacgcagacgacacgttggcgcttccgcccgaggatgtgcagcagctagtgcaacaagtcgtcgcctctccggcgcggaaattcttccttgtgatactaatgagcgccacgggcctggtcttcctcaccggcatcttcctgggacgggccaccaaacgggcaatgggcttaaagaataaataa

SEQ ID NO: 16020 - protein, 63 aa, DROSOPHILA
MFRNADDTLALPPEDVQQLVQQVVASPARKFFLVILMSATGLVFLTGIFLGRATKRAMGLKNK

SEQ ID NO: 16021 - DNA, 3540 bp, DROSOPHILA
gatatccaggagttccaacagctctacaagcaaaactggccaaaatattgccaggaatactactgccttgataactttgtggaatttctgaaaaaacagccccatatgaggaatattaagatgtacacattggatgcaaaacaagccagagatgaaggtctttttgttatagtggtgagttctacatatatgtatagactgcaactcactaagagaggcggccctctcttaggatcgctatcaactattcgtaggttgcttgaacaacacgaacggccttgttggaaaagctctggatttactggactggtcgtcgggtttgaaatgcagttctataccctccagacacattggtgccctggatagtctggtggagtccaaaaagttgaatctggtgtacagggactgcacgaatttgttttttatgaaagccaacgacgctctcaagctgaaagtcgagtaagaaataataatccatttaacataacgagttttatatgatctaagtcttgtagacctccatctggatttgttttaaagtcgttgagtgtggcagatgctccattggttaacgcagagtggcccaatcatcatgagggatctttgttcttcgtagaaaggcagattcgcctgtgcgtcagtgttggattgtaccaggaagacacccaggaactagttgcctggtgcattaggtaagacgaatgtatttttataaagacacattacctgatatcgaaatctgtaggttacaaggcggctacttgggcgccctgcaagtcaaagatacacacaagcgacgcggatttggcagtgtggtgactagggaaatagcataccgcctagccgtccaaggtcacgatgtaatggctctcgtgggcccctcgaataagccgtcatcggagatgttcagcaaactgggattccaggtcatcgatcaatgctactggctaaggacggaacccaccggtgggcagttcacatggcccgagggcgagtaattggtgtttaaatgtctgtattaaaatattacgactttcggttgtatatgaatacaagtattggtataaaaatatgccgaggcatttgagctgtgcttattctaaaactctaaacgagcgagcaatccctggcagcgatcttctaattggaggggactacactggatagtcggatcctctgttagagtccgggtgatcttccataagcactcgagatcgtattgcacatgataatcgttcattgtgtaactatcgaatagtaaaaatttggtggctacggttccctctgccaatcggcgagcggctataaactccagtagttctataaaatcgaggtagttgataccaaagctggccctcagcattgtctggcagtgggcctcaaagttgtccatctgctggcagtcggagatctcattgcaaacggccttcaggttgttcttaaggttttgccagaccatggatatgttgcagccattgaaccagttgtgattgacggatatggtgtctgttaggttccacacctgatgaaaccagccactgggcacgaaaacagcttcattggcccgctgattaatggtgtaatatcgcacgttgtgctcatccagcattttctcgtctatactaaagggcaggtttcccaagcgatcgttgagtttgagttcttctcccggcggcattatcagccatttcttaaggcccactatattggtggaccaactgaaggagccaaacacgtccgcatgataggaggtcctagaatggaaggtaatttagcatgagaaaaccaggtaaggcatcaaaatagaccatgagttcttgggccccatatagacgaatcgatagtcgtctttcccctgctgaatcagttgttcgttgagccagtcggaggcaaagtatttaggcaccttgtagaagttatagcccggcatttgggcagccagatgccagtccttgaggtagagattgtccccgctcgcgggagccacattactattcacttccgccgacgtccacgctgctgacgattgactttcgatgctactcctccacttggccaggtagtcgtggaagttgagctccagtttggtgtgactattgaagtacgacgaattgcaattggcaactggaaccgggccatcgctgatcttggttttgaggtagtcaaagttgatggaagatgcactcggattggagttgagatcccgcgactctggactggactggcctacagtccagttctggcactcccagtcgttagacacattggctatgatgaccggtatgttcttgtgcatgtagcgccagaaaaaatcgttataatctagtccagaacagcgctcgatttcctcgggcagctgtgggtcagtttccacgacttcctcgggatgcaactggagcaggacatccccatcccgctcttcggacgccattcgatctggctgtgggtctttgaggcgctcaaattcctaatcatgcactggctgttcctttttgagttccttgtaaaaaattccaaaacgatatttggttgcaacttttctgtgtgaccatcgcaaataaaataacatatggtcttgccgttatatcaatgtgaccgtttacaagtgtctttatagacgatagacgatttggtatttttcaaggatgggtttgaatgaaggctacgaattcatttaaattaacttaaatggaatctatgaaaaaaattcttaaaatgataaagctagcaccccaataagttaacttcaccagatgtttaatcaataaatcccacatggttatttaatacgattttttatcagcgattacatgtatgtacgttggctgttatttatctagcacagcttcgaacacaatgaatgtaaaaacgtgtcgtaacagaaaaattcaaactccccgaaaactgtggataacattttaatggaatttttcgcataaaaaattcataaaattaaaaagtttttgacataccgtgacttgtcgcgccatgtaccgtcggcttatcccgtcgatttattccgccgactgtatatatatatatatatattcttcatcaagatcaatagccgagtcgatctggtcatgtccgactgtccgtataaggagctataaaagctagagggttgagattcagcatacagattctggagacatagactcagcacaagtttattgacacatgttgccaagcccactctaacgccctaaaatcgtccaaaacttcgacgtccacaaaattattatttatttttgataatttttttttataattttattaaccttgcaaatttctatcgatttgccaaaaacctttttgcaaagcccactctaacatcctaaaaccgcccaaatctgacctccacatttttgaaaattgttggatattttttcataattttattgatcatgtaaatttctgtcgacttgcaaaaagcttttggcacgcccactctaacgctctaaaaccacttttaacaaatttcaaattttttactcattttattccccaatatctatctatgtatatcccagaaaaatg

SEQ ID NO: 16022 - DNA, 1486 bp, DROSOPHILA
aaaagttgcaaccaaatatcgttttggaattttttacaaggaactcaaaaaggaacagccagtgcatgattaggaatttgagcgcctcaaagacccacagccagatcgaatggcgtccgaagagcgggatggggatgtcctgctccagttgcatcccgaggaagtcgtggaaactgacccacagctgcccgaggaaatcgagcgctgttctggactagattataacgattttttctggcgctacatgcacaagaacataccggtcatcatagccaatgtgtctaacgactgggagtgccagaactggactgtaggccagtccagtccagagtcgcgggatctcaactccaatccgagtgcatcttccatcaactttgactacctcaaaaccaagatcagcgatggcccggttccagttgccaattgcaattcgtcgtacttcaatagtcacaccaaactggagctcaacttccacgactacctggccaagtggaggagtagcatcgaaagtcaatcgtcagcagcgtggacgtcggcggaagtgaatagtaatgtggctcccgcgagcggggacaatctctacctcaaggactggcatctggctgcccaaatgccgggctataacttctacaaggtgcctaaatactttgcctccgactggctcaacgaacaactgattcagcaggggaaagacgactatcgattcgtctatatggggcccaagaactcatggacctcctatcatgcggacgtgtttggctccttcagttggtccaccaatatagtgggccttaagaaatggctgataatgccgccgggagaagaactcaaactcaacgatcgcttgggaaacctgccctttagtatagacgagaaaatgctggatgagcacaacgtgcgatattacaccattaatcagcgggccaatgaagctgttttcgtgcccagtggctggtttcatcaggtgtggaacctaacagacaccatatccgtcaatcacaactggttcaatggctgcaacatatccatggtctggcaaaaccttaagaacaacctgaaggccgtttgcaatgagatctccgactgccagcagatggacaactttgaggcccactgccagacaatgctgagggccagctttggtatcaactacctcgattttatagaactactggagtttatagccgctcgccgattggcagagggaaccgtagccaccaaatttttactattcgatagttacacaatgaacgattatcatgtgcaatacgatctcgagtgcttatggaagatcacccggactctaacagaggatccgactatccagtgtagtcccctccaattagaagatcgctgccagggattgctcgctcgtttagagttttagaataagcacagctcaaatgcctcggcatatttttataccaatacttgtattcatatacaaccgaaagtcgtaatattttaatacagacatttaaacacc

SEQ ID NO: 16023 - protein, 425 aa, DROSOPHILA
MASEERDGDVLLQLHPEEVVETDPQLPEEIERCSGLDYNDFFWRYMHKNIPVIIANVSNDWECQNWTVGQSSPESRDLNSNPSASSINFDYLKTKISDGPVPVANCNSSYFNSHTKLELNFHDYLAKWRSSIESQSSAAWTSAEVNSNVAPASGDNLYLKDWHLAAQMPGYNFYKVPKYFASDWLNEQLIQQGKDDYRFVYMGPKNSWTSYHADVFGSFSWSTNIVGLKKWLIMPPGEELKLNDRLGNLPFSIDEKMLDEHNVRYYTINQRANEAVFVPSGWFHQVWNLTDTISVNHNWFNGCNISMVWQNLKNNLKAVCNEISDCQQMDNFEAHCQTMLRASFGINYLDFIELLEFIAARRLAEGTVATKFLLFDSYTMNDYHVQYDLECLWKITRTLTEDPTIQCSPLQLEDRCQGLLARLEF

SEQ ID NO: 16024 - DNA, 5382 bp, DROSOPHILA
acattgtacgttattcatcccgacttgcggctggtcacactgcgctaaacaaagtacgaaacgtgatttttcgtttcaataatttttaaagtaaataagcaaccttgtccaaataaaatggagatgatggtatgtagtggctaaaagaaattaaccgattctgattaatggacttgttagcatggagcgtcgctgctgtcgcggccagcggaggaatttggcaacgacaccctggtggaggaaatgtgggccgcaaaagctctggaacacgccgaggtgcactttaatgtgagtacactttgaacgatgttaaggaatggtagttgacactgcttcatcgtattcccggcagctcatcaccagcgtccatccctcccagctgaagctcacgccctacgacgaccagatatacgccactttccggcaggattttcccgatcttcacgttggccggcttaccgatgatattctcaaatccgccacggcgaagctcaagtggcgccagttcgccgagaagtttaacaagttggacgattactcgtatggcaccctgatgcgcgccgatgccagcagggaattctccccggacaactctatcttcgtgtttcgcgtccagtttctggccatcgagattgcccggaatcgggagggactcaacgatgaggcttacgagaagcacaagcccgccagaaaggtacccgaagaggaacagtaatccctcgctctagcttagattaagttgtaaagactggatgcatatttagctgcagttcgtctatctactttagtaaacaatcaaattatttttatacaaaaaataaaaatataacgaccgcctttaaattgttccctacacgttgccatttcttgactttgtattctgctttctgccaatctgtgggatgagatccacatctttaataaaaattagattaacatttgatcaaagttgtgttgtaataatctaatgtatacatctcaaagttctgatgcaaacattctgtttaaaaacatattcgcttttattgggaaatcgattccattttatctgtgaacaacaataaacccatggttttatgttagaatattgtatcctaaactatatattgtatatattaaatatataattaatgggatttgcctagttgctacatgtattgcccgcacttggtccatcttcagtcttgcttttgggcagtctagcgaatctgcttgcgccctgttcttctcaattccgcctacagtccactggtgttgctggtcatcagtatgaacggaataagagcatccatctgcatctgccccaccaagttggcgaagaacagctcctccatggcctctgcgtccaggctgctgagcggaagaaggcgagccaccagaacattaaagcgctcctcgccgccgccgatgccaccctgccttctcaaacttgacagagcgtagagttggactctgcggacgtagcctcgcaacgaccgctccttgcgctgctgcaagagcgttggattgaagagcaagatcagacgcagcaagccaaactccatatcagtaacatccagtgactggagctcctggacaaagtcgtgcagggtcctggtgagatttgccatcttcgagatcttcaacggttcgatcttatcgatatccgctagctggcgagtgctttgaataaactgcccgataatggtgggcaccgaaagctgaccctgacactgcgccaaagctatagccattaatgctggccacactcctctcaggagtttcacctgtgtatgggcttccaattgttcgaaaactggaacctttcgaagggtatggatggtgagaaaaatgattcgcgagcccgtctcacacacataatgaatatttaaatacgagtggaccaaagtcggcggttgcacatgaaaggcacactgcacatcggtgagaagatcctgttcaaagaccgcctcattgatagcaaaatcgcttccaccgcttcggttcccaccgcactcaaagtctagttccatgtgctccagctccgcgtctacggcatcctcggtgccactgtcctccgcctctgaatcgcactcgggcttcacactcagattaccatttcgctccagttggttttggatgggctgcaggatctgcagtcccttgtggatgacccgcatgtccagcgaactctgaataagccccattgtcgaggtggtaggcagagcggtgggtacttccccagcattaaagttcaggtgctgcgagttgttgttgctggcgctgttggcgagcaactgcaagcacagcgtgctgctgttgtccattgagtcgtcctcgtcatcctcgggatctgccttcggaatatctggcgaatagctaccactctgttgatgctgttgctgttgttgctgctgctgttgggtagcgaacactgcaaagtcaataggagattattaatggtgaattcgtttaaaagaagttaaatatggatcaatcatggcagttaagtatatatgaccaaccagaatgtaaatcaaagttcaacttactcaatgtctgcgttagttctgcgaaattcaaacccatcgggaatatattctcattcaaattgaaggccgttgctggcgcgctgtgcactggaggcgtggccgcggattcggcctttacactgtgccccttgccacgcccctgctgatagccggacttgccggataggtaggtggacgagccattaccgccgccagaagtggatgagctaccggcagcagcgatgatcccctccttcctgtccacaatcggtttcctctcgtgctgcacagctgtgaacaaaagttgatgagaacggaaggcaattaattagagcgagaagtgaggtgaggatgcggtttgatgattttcaaagcgaggtgatggtgagtaagtgggtgaattggttaatgttcgtgcaggctgggaatcttttgtgcctccgccgctgcagttttaagatgtgcaagttactgaagtggatattcacgttacagaagcaaacactgggatgcaattagattcacgtgattacttggtgtaaaatgcacttcacagacgaaaattgaattgaattcaattgaaattgaactttctctagattagactatttatctttgagtccaattcgaattggagatcatccaaccagttcttgattaagctctgggaaactgagttcctgtgaatcgataacgtttcattacttgtcagagttaaatgctacatatatgatatctcctaatttctacaatgcaattctgctaaagcctgctggagcacgtagactctggccaggccagagattggttatagcttgagacgacgacttaaacgaaaattacaatcacttcgcatgccgctggccaggcacttctgtagtcgacagaactggcaccgattcctgtggtgcttggtgacctcgcagttcatagccccgcgacactggtagcccagctgcttccggatcgagcgcttgaagaatcccttgcagccttcgcagcttatggctccgtagtgccgcccggaggcgcggtccccgcacaccaaacacagctccacgctcaacgttgcggatgctccggctcccattcccacgccgcctcctggcagaggagtgccgcctgaggcactgcctcctccgatcaagggcatcgctcggttttctgcaaggtcagagggcaatggcaacagtcgcgttagaatgggctccaaggtggcatggctcgggtgattggactcaccttcgcttttgatgaacgtctcaaccttaacgccgtccattgtcgccacagcaggcggctaaaaaatagtcgtcggctgtataaataactgaaacccaaacatcttcacatatgtaatttaaattttacttgcaatataaagtagagaagagataaatatggagtgtgtctagaataaaggaattacgagccgaaaagagaggtatgaggtggttaattctatcacaaaatatatttatatagtagataataataataataataataaatgtattataatatattatattgatgttttcaaaaaataaatcattgaattttacgcaatataaaacaccgttgctgctgccaacaaaagtgctactattttggacgcagctgtagctaacgtagccagagctattttaatagaacctgttttggctgcatctgtgtgggtgcctgtgatgtgaatgaattggtcttgcttacttggctctttgaaaattcttattggacgtctgttatcaccattcttgagcttttaaaaacatctatttttcgaggcacttggttaaagttatgttacttccggtcagttacgatattttcaggcactttgtgcctattttgaaccttttctaacgcaataaaatctccttgttccaattcacttgcgagcagtgtgaccgcagttgggctctttcaacataccatccggtcccatatactaaaaaaaggcagctcattgtgcaaatataccaaaacacctgtagagctacagttcgttgaaattgtaatttttaacgtaaaacaaaggataataatagaattactaatatcaataataacaaaggcgtgtctagggtacaaattagagtcaagcttaatcaattaacacaaattttaattctcataagcccacaaggacataatattaaattttatactttgagttaccttggctatttgattaaattgataagcctatcccaagtttttacttaacttttgtactcaaaactaggcgctctgccgtattagcgctctggtattgatccaaagagaaacatctgttgatgccttccatgtggatatagttaaaaagaaggggcttttgtttacaaaaatacaatttaatatacaagtgaaattgttacaaaaaagctataacgaaaagagccctaagaatggaactagtatatttgattgtgttctcctttctcgcgtattttttggtcttacaaacgactaagccacaaattgctcacacaaatatcgaaaggcagacagggttgagtgaaagtatacttctgggtttcggaatggggtcatggatgggccgaaatggaaatcagcaagctcacaaacatgcacactccgcctacacagtgccactacagtctaatatttcaattatttattctttaagcccattgcccgtttggtggcccgtcccaggaagatgccggtgaggaagaccaggcccgtggcgctcattagtatcacaaggaagaatttccgcgccggagaggcgacgacttgttgcactagctgctgcacatcctcgggcggaagcgccaacgtgtcgtctgcgttcctgaacatctctatgcgtcgctgcagcttttctcggcagtccgcctctaac

SEQ ID NO: 16025 - DNA, 2245 bp, DROSOPHILA
attgcgttagaaaaggttcaaaataggcacaaagtgcctgaaaatatcgtaactgaccggaagtaacataactttaaccaagtgcctcgaaaaatagatgtttttaaaagctcaagaatggtgataacagacgtccaataagaattttcaaagagccaattatttatacagccgacgactattttttagccgcctgctgtggcgacaatggacggcgttaaggttgagacgttcatcaaaagcgaagaaaaccgagcgatgcccttgatcggaggaggcagtgcctcaggcggcactcctctgccaggaggcggcgtgggaatgggagccggagcatccgcaacgttgagcgtggagctgtgtttggtgtgcggggaccgcgcctccgggcggcactacggagccataagctgcgaaggctgcaagggattcttcaagcgctcgatccggaagcagctgggctaccagtgtcgcggggctatgaactgcgaggtcaccaagcaccacaggaatcggtgccagttctgtcgactacagaagtgcctggccagcggcatgcgaactgtgcagcacgagaggaaaccgattgtggacaggaaggaggggatcatcgctgctgccggtagctcatccacttctggcggcggtaatggctcgtccacctacctatccggcaagtccggctatcagcaggggcgtggcaaggggcacagtgtaaaggccgaatccgcggccacgcctccagtgcacagcgcgccagcaacggccttcaatttgaatgagaatatattcccgatgggtttgaatttcgcagaactaacgcagacattgatgttcgctacccaacagcagcagcaacaacagcaacagcatcaacagagtggtagctattcgccagatattccgaaggcagatcccgaggatgacgaggacgactcaatggacaacagcagcacgctgtgcttgcagttgctcgccaacagcgccagcaacaacaactcgcagcacctgaactttaatgctggggaagtacccaccgctctgcctaccacctcgacaatggggcttattcagagttcgctggacatgcgggtcatccacaagggactgcagatcctgcagcccatccaaaaccaactggagcgaaatggtaatctgagtgtgaagcccgagtgcgattcagaggcggaggacagtggcaccgaggatgccgtagacgcggagctggagcacatggaactagactttgagtgcggtgggaaccgaagcggtggaagcgattttgctatcaatgaggcggtctttgaacaggatcttctcaccgatgtgcagtgtgcctttcatgtgcaaccgccgactttggtccactcgtatttaaatattcattatgtgtgtgagacgggctcgcgaatcatttttctcaccatccatacccttcgaaaggttccagttttcgaacaattggaagcccatacacaggtgaaactcctgagaggagtgtggccagcattaatggctatagctttggcgcagtgtcagggtcagctttcggtgcccaccattatcgggcagtttattcaaagcactcgccagctagcggatatcgataagatcgaaccgttgaagatctcgaagatggcaaatctcaccaggaccctgcacgactttgtccaggagctccagtcactggatgttactgatatggagtttggcttgctgcgtctgatcttgctcttcaatccaacgctcttgcagcagcgcaaggagcggtcgttgcgaggctacgtccgcagagtccaactctacgctctgtcaagtttgagaaggcagggtggcatcggcggcggcgaggagcgctttaatgttctggtggctcgccttcttccgctcagcagcctggacgcagaggccatggaggagctgttcttcgccaacttggtggggcagatgcagatggatgctcttattccgttcatactgatgaccagcaacaccagtggactgtaggcggaattgagaagaacagggcgcaagcagattcgctagactgcccaaaagcaagactgaagatggaccaagtgcgggcaatacatgtagcaactaggcaaatcccattaattatatatttaatatatacaatatatagtttaggatacaatattctaacataaaaccatgggtttattgttgttcacagataaaatggaatcgatttcccaataaaagcgaatatgtttttaaacag

SEQ ID NO: 16026 - protein, 599 aa, DROSOPHILA
MDGVKVETFIKSEENRAMPLIGGGSASGGTPLPGGGVGMGAGASATLSVELCLVCGDRASGRHYGAISCEGCKGFFKRSIRKQLGYQCRGAMNCEVTKHHRNRCQFCRLQKCLASGMRTVQHERKPIVDRKEGIIAAAGSSSTSGGGNGSSTYLSGKSGYQQGRGKGHSVKAESAATPPVHSAPATAFNLNENIFPMGLNFAELTQTLMFATQQQQQQQQQHQQSGSYSPDIPKADPEDDEDDSMDNSSTLCLQLLANSASNNNSQHLNFNAGEVPTALPTTSTMGLIQSSLDMRVIHKGLQILQPIQNQLERNGNLSVKPECDSEAEDSGTEDAVDAELEHMELDFECGGNRSGGSDFAINEAVFEQDLLTDVQCAFHVQPPTLVHSYLNIHYVCETGSRIIFLTIHTLRKVPVFEQLEAHTQVKLLRGVWPALMAIALAQCQGQLSVPTIIGQFIQSTRQLADIDKIEPLKISKMANLTRTLHDFVQELQSLDVTDMEFGLLRLILLFNPTLLQQRKERSLRGYVRRVQLYALSSLRRQGGIGGGEERFNVLVARLLPLSSLDAEAMEELFFANLVGQMQMDALIPFILMTSNTSGL

SEQ ID NO: 16027 - DNA, 3358 bp, DROSOPHILA
tagggaggaggatatgtcttcagattgtttatcgaattttttccagtagtcttcgcacccctccgactgctttttttgagcgtaagccatctcctcgcccatgacgctagcatggtgatattggttcattcgaactcccatagccagcacggggacatgtcgtgccttcatggcgatggtcataggagtgccatagccattggagaacagcgacatatttttgagtgtgctccgtacccagcgcagaatgtcgatggtcttccatactccagatgtaccattaaacgtatgaactccatttcggctgtcgataactacaaactggggcagcttggcctccgaggacttcaacatcttcctggcactgttgccaaagtacacggtgaagcggatattcctctccggatccagttccagccagcgcagaccggcagccaagtaaagattgtaggccttgtcgtctggcgagtcaagcagacccaaaaccaccgcatccgagtgcttccgaatggcggcgagatcctgactactgtgtgcccggtccagtggctgaagcaggttattcatgaaccgggcgagatcttcaaagctccacgagccctggtactggagtaactgcttttggccgtagcgcacgatcagcgtgggccatttgtcaggataacctcctgcgccggcgactcctggtgccggcatcaaagtacggctgcaattgcactgcaagtgccagcaatcgatggctccaaagaagccatactcctggtaatagtgggccagtccattgtagaccagtcgtgcctgccgtgcttcgctggcccaggacacgtagtaaaatagcagcgagatctctgactctgacgcttccgcacggagctggggaacactgcgtccgggacactcgacaatgggagcctggtcggatgtggctgaccttgaggcgtccaactgagcgatagagagagccaggagcagcaggctcaaaattattttcattgcaaccggtgggaagctaattagatgttaagaacaacacaacagcaaccgccgtgaacagatgtttgccgcgaggatggccacactggtaacgtcggtagtgttgttaataataataatttataagtaatgactaaatctaaattttaaatttgaaaataattctttaaataggttcaatattcaaaaataacttgttttggaaatgcaaaagaaacgttgttaagcactaaatggttacggtctcattaagctttactttcttccccacactgcccgcagttatcgatagcagcactatcgattccaagtgatattaattaatcacttctgctgtttactttcttaattaaaactctgttaattaaattatcaacaacggctgttctaaacccactgcgacgcgtaaacgaagtagcgtttcccgctgcaacgaaacgaatggaaaccacccaaaggcaaaccacctgaaaatcgctcaccaatccccccaaaaaaattcccatttggcgaaaacaacaacagtaattagggtgtgagagtgtggagtgaatagctgaatagttaaatcagtgaataatttaccgtacggccttcgccttcccctgcggaaacaacaacaaagctcagcgttcacttacacccacacacacgggtctaccacgcatacacacgcaggccagccgataacctgtgtgtgaggcaatcgccgtcatcgttcgaaatcaaatctctaatcggtggaagcagcaacaacaataacagcagctgcagcataatcaacaattgattatatacgtatatagctaaaaataaggttcaaatatgggactgttattatcgcggctctggcggatgtttggcaacgaggagcacaagctggtgatggtgggtctggacaacgcgggcaaaaccaccatcctgtaccagttcctgatgaacgaagtggtccacacaagtcccacgatcggttccaacgtggaggaggtcgtctggcggaatatacactttcttgtctgggatcttggtggtcagcagagtctgcgcgccgcttggagcacctactacacgaacacagagctggtgatcatggtcatcgactccacggaccgggaacggttagctgttacgcgggaagagctctaccggatgctgcaacatgaggatctgagcaaggccagtttgctggtctatgccaataagcaggatctcaagggctctatgtcggcggcggaaatctcacgacaactggacctcacctccatcaagaagcaccaatggcacatccaggcctgctgtgcgctcaccggcgaaggactctatcaaggattagagtggatcgtgcagcgcatcaagaacaaatgacccgccacacatgctacatattagctaattaatcattaacgactagctgtctagagaaagtaaaccaattttgatataaacaatttttaagcgtttccaaattgtttgaaaagttgttgccaagccaattttatttagtgtaaaatacgtccgaacaggagtccctcgatgatttaaatctacgtgtatatggataatgtctaggagctaagccaatttaactacgatacttccaataaaattacaaaataaacgagtttatttcgacactgtcgcatatcaaattgaatacaaattacaaatagagaagtggacgtatttgcctctctgagcattgccttgtaattgacattgttggctcgattcgctgatgtgtgagattgtttgtactctatcgtcaaaaataaatacatggttgtgtaaaagttagtgtctaggattaggttaaagcattagaatactaatatatagccacaagaacaatttgatcacaaaagtaaaagcaaactaaagagcggatttaggtctaggtgagattgcatgagctgctgcaactctttaaaggctttccctggcccaaggtgatggtgttttctggcacctcctccacattgttggcatcgtgttggcgctgtaattggaacatcattagcttaggtaacaatagccggaatcgtactttaagttcgttggccaggcagcggaaggcgtcctccacgttcatgttctccttggcggaggtctccatcacgaacaggatctcaggtatatattgacacatctggcgcgcctcttcaaagtccacctcgcgctgctcctccaaatcgcacttgttgcccacgaggattatcaaaacattagaagcagtgtatctacgcacttcttcgatccatttttgcagattggaaaaggaagaccgcttggtgatgtcgtaaactgtcaggaggaaacacatggtattcaagtagggtaaacaaacaccccgctgataaggcgcttc

SEQ ID NO: 16028 - DNA, 1358 bp, DROSOPHILA
ggtgggaagctaattagatgttaagaacaacacaacagcaaccgccgtgaacagatgtttgccgcgaggatggccacactggtaacgtcggtagtgttgttaataataataatttataagtaatgactaaatctaaattttaaatttgaaaataattctttaaataggttcaatattcaaaaataacttgttttggaaatgcaaaagaaacgttgttaagcactaaatggttacggtctcattaagctttactttcttccccacactgcccgcagttatcgatagcagcactatcgattccaagtgatattaattaatcacttctgctgtttactttcttaattaaaactctgttaattaaattatcaacaacggctgttctaaacccactgcgacgcgtaaacgaagtagcgtttcccgctgcaacgaaacgaatggaaaccacccaaaggcaaaccacctgaaaatcgctcaccaatccccccaaaaaaattcccatttggcgaaaacaacaacagtaattagggtgtgagagtgtggagtgaatagctgaatagttaaatcagtgaataatttaccgtacggccttcgccttcccctgcggaaacaacaacaaagctcagcgttcacttacacccacacacacgggtctaccacgcatacacacgcaggccagccgataacctgtgtgtgaggcaatcgccgtcatcgttcgaaatcaaatctctaatcggtggaagcagcaacaacaataacagcagctgcagcataatcaacaattgattatatacgtatatagctaaaaataaggttcaaatatgggactgttattatcgcggctctggcggatgtttggcaacgaggagcacaagctggtgatggtgggtctggacaacgcgggcaaaaccaccatcctgtaccagttcctgatgaacgaagtggtccacacaagtcccacgatcggttccaacgtggaggaggtcgtctggcggaatatacactttcttgtctgggatcttggtggtcagcagagtctgcgcgccgcttggagcacctactacacgaacacagagctggtgatcatggtcatcgactccacggaccgggaacggttagctgttacgcgggaagagctctaccggatgctgcaacatgaggatctgagcaaggccagtttgctggtctatgccaataagcaggatctcaagggctctatgtcggcggcggaaatctcacgacaactggacctcacctccatcaagaagcaccaatggcacatccaggcctgctgtgcgctcaccggcgaaggactctatcaaggattagagtggatcgtgcagcgcatcaagaacaaatga

SEQ ID NO: 16029 - protein, 179 aa, DROSOPHILA
MGLLLSRLWRMFGNEEHKLVMVGLDNAGKTTILYQFLMNEVVHTSPTIGSNVEEVVWRNIHFLVWDLGGQQSLRAAWSTYYTNTELVIMVIDSTDRERLAVTREELYRMLQHEDLSKASLLVYANKQDLKGSMSAAEISRQLDLTSIKKHQWHIQACCALTGEGLYQGLEWIVQRIKNK

SEQ ID NO: 16030 - DNA, 2981 bp, DROSOPHILA
gccgacaattgacacttttattgaaagcctaggcatttttcgcttatcatgttttccgtcaagtctattttcggtcaaaatgttggggcattaagccagtatatttaatatttttgtattgaactcaccatatgggataccctgaaaattataattttaaatgtcttataaaaaaatatatagacataagaaagaacgcttgagtcgatttcctcaactatcagttactccttactcagccgctggaagtgcaaagaagaaagttcaactatatttttggcatactgaaattattaatatttaatataaattgcaatttactattcatatatttcactagatataacagcatatagtcctatatatcccatcggaatcgggatcatcgcctaacgggtttcaggggtctgcagtgggcgttaaggcggatttgatctgaaccgcattactttgcatgggcattacttaacttcatcgcggccatatcaagtttgtgcacatttttctattaataattgcaagtgcgagtgtgcggcgatcaaggcaaaccgcccctgctccagatcgagtagtactctcgttttcagttcaaagaccagttcggttcgacggcagtttgtactatgagttggcaacaaagttgtccagctgccgagcaactgcgtctcatttctggagcggctttttgtcaacgcccctgctgtagcgccggtctgaggccccggaattgattaattactggcatcggtaatcggccatcgatcgagattgttttaagccatttagctgtccaatgtttgctgcacttgaaggcgtgggagttgggctaagggtgtggcttctaattgccgttaaaaaaggtgagtcgatcccctggtaattgcgtaaaaattatttgaaataaatattctgggaccacgatctagatacatctgctaatggcatataaatagttacttaagcgctagcaaccgtaactaaaacgcctttcaactgttttaataacatttttttattcaaaaagaaacaaatttccatgtgacaacagcggggtggataaatatagaccagagagtaaagcggaaagcgatagactggataggattgacttagattgctgaagaaatgagaacccaacgggatctcagcagaggacagacctttcggtaacttaaaaaaccaaaaaatgtggtaaagatgcgagcaagtggcggtcaggatcaatgtaggggtaatccagaagtcatttcaggtgattaccaggtgcctggtgcgggttccaagttcacggaagcagcggactgcacatgtcctggcagaggagccacatggacagctccacgggtcttggccacatagctggcctccggagcggcgacggccaccacggcgggggcgtgggcagcaaccacagcggcgggaacgggagcggcaaccaccgctggtccagactggatgagcacgggtccggctggggacagggacaggggaacggcagcgggaaccgcagatgcctggatggccaccgaaccggcgacggcgggagaaccgaccaccagaccatgggcggaggtcaggagaggcaccaccgagctgttgacaccccaggccaaagcgaacaggactacgacaacggcgaactgaaaataagaatcttgatttagatggaaactcaggaactatgataaaaataacttatttgaagtttttttaattttggagtttctctgaatggggtcgtaatgtgttcagcgatctgatattaatttatgtataactcgataaagatcttttatgtctacttttgcagcataccaatttgtatagaaatgttttactaaaaacaacataaatcccttcatgttgtccttttacataacactagctgtaactaagctccagttatccgatatcccttcaatctcaccttcatgttggcttttgtgatctcagtgacgcttgaaacgaaactaactgacatctgcccgttggccaagtgcttttatagctccgatccataatttcatttagcatataaggccagttctcggattgatcagccatgtgtatgtttgctgcacaaatgcggaaaccgggccagagaacaaaccacgtaataccttcagtcccaaccccaaccccaacccgaaccccttgaccttcccgaatcaataaccacaattcattgacgacaattcaagtgcgcgacaattagccacaccggttgacatgacgaaaacaagactggtctcatttgattcggccaatccataaccatgacttcaatatctgtatatgatatacactaaagccatgtctcgggtgcccctaacaacaatggataggcaaattacaagccaccgcagcaccactgtgcctctgtaccaccatcgccccacacacattcagcaccactggctgtccatttaaatttcatcagcagaatgtaattaaattcacttcggttagctcgccctgaaattaatgtgccggccgccagttgtcggcaaactgatccattttggtcaccgactatagatttctcgattgcatttgcatatcactaatgcagtcaacgccaacatatgtccaggaataccatataaaaatcagagtccatatgtaggaaacgatttcactacaaatattaccaatccttaaaatatgaaaattaaattttgtaaattttatttggtatttaaatataaaataatggtttataatttaatatatgttaagttatacccccttttgtagagtaatccgtaattgtatatatagaacatatttattgattccattaagaaacgataagtaaatcaaaccactttcgcttttaagtcggaaagcaattctacgtaataaattacaaaacatttgaatatcagtagagattgtcatacgtttaattttttctaagtaagagctgtacattttagggtaaatttttgtgaaattaaaaatttaacaacactatatct

SEQ ID NO: 16031 - DNA, 694 bp, DROSOPHILA
atgtcagttagtttcgtttcaagcgtcactgagatcacaaaagccaacatgaagttcgccgttgtcgtagtcctgttcgctttggcctggggtgtcaacagctcggtggtgcctctcctgacctccgcccatggtctggtggtcggttctcccgccgtcgccggttcggtggccatccaggcatctgcggttcccgctgccgttcccctgtccctgtccccagccggacccgtgctcatccagtctggaccagcggtggttgccgctcccgttcccgccgctgtggttgctgcccacgcccccgccgtggtggccgtcgccgctccggaggccagctatgtggccaagacccgtggagctgtccatgtggctcctctgccaggacatgtgcagtccgctgcttccgtgaacttggaacccgcaccaggcacctggtaatcacctgaaatgacttctggattacccctacattgatcctgaccgccacttgctcgcatctttaccacattttttggttttttaagttaccgaaaggtctgtcctctgctgagatcccgttgggttctcatttcttcagcaatctaagtcaatcctatccagtctatcgctttccgctttactctctggtctatatttatccaccccgctgttgtcacatggaaatttgtttctttttgaataaaaaaatgttatt

SEQ ID NO: 16032 - protein, 145 aa, DROSOPHILA
MSVSFVSSVTEITKANMKFAVVVVLFALAWGVNSSVVPLLTSAHGLVVGSPAVAGSVAIQASAVPAAVPLSLSPAGPVLIQSGPAVVAAPVPAAVVAAHAPAVVAVAAPEASYVAKTRGAVHVAPLPGHVQSAASVNLEPAPGTW

SEQ ID NO: 16033 - DNA, 3829 bp, DROSOPHILA
tggtactttagaaaccaaaatttcatttgtgcttctcaaattggcattaggcgcaacttatgactttaaagttgtttatagctttcaagccttagagatgaaggcaatttatttttgttttacaaggtttaggtaattaaatagtaggaaacgttgtaaaggttatgctacaaatcacccttttatttcattccttttcttgagtttccttgcagccacttgtgcactaccagaatctcccctaacacctcacatgtatcaaagattttgcaccactagaaacgcccaccggcctgcttgatatcttgtttataacagttgtaacgttaccaaattgagagaaactctgtcaaaccttttggaaaattaagtccatgagtttgaaggagtgtgtggagtaggctggaatgccttggtctagatagctgttggaacctgcacctcccagttggccatcaaattgcagcctttgggaaagtgctggcgcatctggctggagctctaatgattgcccggatcgctaacggatagcaaatactccatctatctatggatacctcaaagcgaaccaaaccgaaccggctgtggcaagttcttcgatgcatcagttgcatcattggtggtgcggtaaaagtgcgtcttgctccatttagattctattcggggtgaaatcgacttctggagtcaacaggtttcgtttagacttataaatcaatttgttaacatgctttcactgaatacacatgcgtattgccaattcttcttgcaactgcgattgatgtcgatatgtgtagctatagctgcaagtcgtaatcgaaattcatgctgccaatgctaacggtttgagtcagtgcacctggaacaatgccaagaaggctaagaagtgtggaaaagctttcccaaaaaatcgacatgagccacaacatagagctccaagcaaagaaaccagttgaaaatatgaaaatcgagggggatgcttcgaggggaaatctagttgagaatgcagaatggggtgagcgatttagtaggtgagtccatgtgtgcgccacaattgctgttatacaaccgttgtataatgatggccattaggccagtcttttgccaactcaattgctaggcggtcgaaattggaatgggactccgtgtctagttgagtttgttgcctaagtcttttgtttgagttttcacctctgcaggagcaatcaaattagttacccatgctgcctacttactcccagtgaaaataaagtaatcaaggatctccattataataatgatcaatcaatcatttgcactctaatcactattatcagcatctaatcattattatgacagcattcaatggatgttcagcaacgagcttggaaaaaactatttaatacgagaatatctaaaaactaaagtgttatgtttgagttatgttgatcttatctttaaaagcctctaacttatgagctgtgtttacttattagaccataatttgtctgtaaagctgtttctccacctttgcaataacaattttttattaccatctcagcactcatcactcaacgtgaccatggagaaggtgttaaggcgatgcagtcgcctgctcctcctactgctgctgccacttgtcagcttgtgtccaaatgcattggcactcaatcgacaggcggatgctggccaggctttggatatggcagcgcagctggcggatgcggaagccgaagccaggccggattacgatgccgattccccggatacgccgcacatacgcaagaagcgactcatctggattacggatgatggcagattggccctgccgccgggcacttcgctgacattcgtgccaaccattgccatgcccctggttcggcatccgcccgagggattcttctccaacctgaccatcagttttcccgtcaccagtgcgtagacagctctcaatgtcaatgattaatcaattaactctgatttttgttgcctcaatccacagttgacttcgacaaactgggcctgacagacaaccaaaatcctctgggggatctgccgccgctgttcgcccgctcctttggtcacgaggcaggccacatggttggtgaatatgtggcgaggtatctgcatgtccagcgcaggaagagggatctcagcgagcagcggagcagaagcaacgaggatcatccctttaggatacacgaagagggtccaaagtatccggagctgccagccggactgcagcatattttccatggcggagagcgggttttgctctatggcgtagtggaggactttctatccacctttggcatggatggcaaggcctgtttgctgagaaccatttgtgagatgcactcacgaagtttggagaagttcggtgtctttggagaaatgacaaagctatttttaacgtgagtaatttcctcctttcaatcgtgattctttgttacacagatctctcttatagggtaaccaaatctccgttttccgacctggtacccgactatgtacaagcccaggaggtgggcgagggaaagcaagcaccaggagaatgttttccctacttcaaggactgtccgaagagtatatttaaggccttgtccagcaagtatagcaaaccagctcctgcgagcaagacgaaaaagacaaaacccacagacagaccggtgggcgaatatcatgaggagcaggtcattcaactgcccaccactcgggatcaggacaacaatgtgtatatgtagaacaatgaccaactcccatgcgaacccctattgttgacctcgtctagatgttaggattacgattgagttgagcgcgtcctcaaagtcacttgcttgtaattaacgtgtactaattaatttataattatttattttatttacgcattgtatttattgttagtcgtaggcgttgttaattgcttagatttgtatccatgtttgtctagtggtctgtaaataattgaaattgtggcataattccttcctttcaacaaatgaaaacgtgtcgaatgaatagaaaataaatttcccttgaaaggtgctttataattgttttcattcaaataacaacttacggcaataatggccaagatatgtacaacattgcgtttttagatttaaactggcgccaaaaacgacaactgcctgcattgcacagcactatcagcagttacaaatcaaagtttgaaaccaaattaaagtggttacactggcagctagatttgggtactctccatgtttttgtgaaagtaatatatgaagcaaaataatacttaacggtacttagtgctcggtttgtagttatgtaattacttaactaattgctcattttaaagggaagatttaaattcaaattttgtgtatttataagaagaagaaaaaggcacttctgacaactatcgagagtaagacatcgatagcgtaacgacttatcgaaggaaccgtcggtcgtcagaccatctctaggtcagctttgttttggttttgcagcgaaaaaaacatcagcgtcgtgagttctcttcgcttatttaccaagcctcccacaaacaagccagagcattacgtgttgcacagatgtttgcggatcgtcgaggaaatcaataaacgaaaggtgagtgctcctgggtgggggccagctggcgcttcagaaccgcgaaaaggcggtgctgtgagtcaggcgatgcgatcgctgattgaattggattatcacgataggagctcccatcaaattgccagccggcattgtagttgtttacattgcgcggacgtggcgcaatatatttttaatcttctgcggcaacctgctgattaagatacccccgaaccgtttcattgtatagataacttgg

SEQ ID NO: 16034 - DNA, 1180 bp, DROSOPHILA
atgcagaatgggcactcatcactcaacgtgaccatggagaaggtgttaaggcgatgcagtcgcctgctcctcctactgctgctgccacttgtcagcttgtgtccaaatgcattggcactcaatcgacaggcggatgctggccaggctttggatatggcagcgcagctggcggatgcggaagccgaagccaggccggattacgatgccgattccccggatacgccgcacatacgcaagaagcgactcatctggattacggatgatggcagattggccctgccgccgggcacttcgctgacattcgtgccaaccattgccatgcccctggttcggcatccgcccgagggattcttctccaacctgaccatcagttttcccgtcaccattgacttcgacaaactgggcctgacagacaaccaaaatcctctgggggatctgccgccgctgttcgcccgctcctttggtcacgaggcaggccacatggttggtgaatatgtggcgaggtatctgcatgtccagcgcaggaagagggatctcagcgagcagcggagcagaagcaacgaggatcatccctttaggatacacgaagagggtccaaagtatccggagctgccagccggactgcagcatattttccatggcggagagcgggttttgctctatggcgtagtggaggactttctatccacctttggcatggatggcaaggcctgtttgctgagaaccatttgtgagatgcactcacgaagtttggagaagttcggtgtctttggagaaatgacaaagctatttttaacggtaaccaaatctccgttttccgacctggtacccgactatgtacaagcccaggaggtgggcgagggaaagcaagcaccaggagaatgttttccctacttcaaggactgtccgaagagtatatttaaggccttgtccagcaagtatagcaaaccagctcctgcgagcaagacgaaaaagacaaaacccacagacagaccggtgggcgaatatcatgaggagcaggtcattcaactgcccaccactcgggatcaggacaacaatgtgtatatgtagaacaatgaccaactcccatgcgaacccctattgttgacctcgtctagatgttaggattacgattgagttgagcgcgtcctcaaagtcacttgcttgtaattaacgtgta

SEQ ID NO: 16035 - protein, 356 aa, DROSOPHILA
MQNGHSSLNVTMEKVLRRCSRLLLLLLLPLVSLCPNALALNRQADAGQALDMAAQLADAEAEARPDYDADSPDTPHIRKKRLIWITDDGRLALPPGTSLTFVPTIAMPLVRHPPEGFFSNLTISFPVTIDFDKLGLTDNQNPLGDLPPLFARSFGHEAGHMVGEYVARYLHVQRRKRDLSEQRSRSNEDHPFRIHEEGPKYPELPAGLQHIFHGGERVLLYGVVEDFLSTFGMDGKACLLRTICEMHSRSLEKFGVFGEMTKLFLTVTKSPFSDLVPDYVQAQEVGEGKQAPGECFPYFKDCPKSIFKALSSKYSKPAPASKTKKTKPTDRPVGEYHEEQVIQLPTTRDQDNNVYM

SEQ ID NO: 16036 - DNA, 3471 bp, DROSOPHILA
taagatcttcaagtggcggagagtagcgtttgcgtattttaaactgttcttttacaaaatcataatttccctttccttgcttagtaacgtattccgtattctgtaagcctacagttttttgccaatttgtttgtaattgcctgaaaattaaatggatatccgtagattttacatgctaaatgctaaatttgattttgtgtacataaaagtggagggtgagattcgcattattcgctaaatgaactgaaaaactttccgctactggaatttcccaaaattttacgagcacgttgttttcctcatgtctttcgcaactataaatattgattcaccctatttaacactcccaaatacatacactttgtatagcttaagttatcgcgcggcaataaagtcgtcactatcgagagtaaagcacagaattttccaccatgggagtgagtttgggaggagagaaaccaccgcgctgggcgaacgctgcgtacgctttgagctcgatctggccgacgaagcgggcaagtgaactccagcggatgtggggaatcctctgccgttgcttcgatcttgtttgcccagccgataaggcgcaatcaaagtcggcaactccagcgtacggctaattaaagccaaacaagcgagccggccatcttcgatcggaggaagcccttccgggccacgcggattggctatctctagaacgctaatcgccaggcaaatatatccagaaacaaactttattatacgtagcaaatggcagtcaaatctgatcttctaatatgtgcaagtttttagtcttgggtgaacacgtcgtcagtggccttcctctgaatgtatgctagatgatgtttgtgggtataaagattcattgtacttcatgtatgccgcggtgcatcttgcttgactggtcgatccctttcgcccgccacccgatcccgtatcacaaacgcagtcacagtctttcgtatactaaatgtaaggtgggagctcggacggcatcgagttaatcgccgaagccagcgaactcatccacataggtggacatcagatcagagcgacaggagacctgaatgttggaggcattggccttgagccgaaggttcgcgtcgttggtgagcaggatcatgtggggaacctgcgcctgcagctgcaggcagcaattcaaaatgctgtcatccgggcagtcgatcttgatcaggtgatccgcctcctccaaagcggattgagctgcaacaaagataatacacataggtaagttccaacgatttacatacacaatccacgacccaccttgtatttgaaagctttcgtcgaacttggtgttcaaaaagcgtattgctcgcatggcaatcacacgctgcaggcagtccgactggtacttgctctttagcttgtccagctctttgattactatgtacggaaggtacagcatgctgcccaccgtgcccggcagcaccacatcggtcagtctctccacgaacttgtggttgtgtatgaggacgttggtgtccagcacaaagtacatgtaatcctcaagccttgggggcagctcctcggcatcggccgcctgcagcatcaatatagtgtcgtcctcttccttagcctcatcctgacctttctgtggcgcctcctcttcaatggactccgccggcagcatcaatagagtgtcgtcccctttcttagcctcatcctgatcattctgtgccgcctcctcttcaatagactcctgccattccatgggctcgacctccatatcgctggccgtcgagccatcaaatgcacttggatttgtgatgttgcaggcttctggttgtttttctatcacctcttcgttgatcttggccacaatattgttgttgcgctcctcatatagctgcttctgctgcagcgaagctcttaacagcatgagacgctggtaggctagggagacgataaggagaacatgggatatgagtaactatatgcaccgggcactcaccagtttgggtacgtcccgccttcaggcgattggcatcgaccagggcttttggcttttcccaggcattcatcgccaccttaggcggaaacttcaggagtcgctggggcgtagatgtggacgcacttgatcgacgagatgcggaggaactgtgggtgatccgcttggtggtcccctgctccttctcgttgtcctgcacccgctttagttggccctgcaggcgcttgaggcggtcctgggcgggatgctggctcactccttgccatattgcgtggaaaagtggagttgaatcttggttctggcattctggcaaacgcgcagtttgcatgggttttaccatttgacggacgtggcgtgctgatgatcctaaccagctggtcgtcgtccaacggcctcagattggaagactttggcgtgtgcttactttctccaccgagcgacatattgtgttctttaacatttgatttctaggaagtactcatttattttgtatttcaataggcaatctgacttagaggtggagaaacatcgatgacatcatcgatatcatcgatcttttcaaacaatcacaagcatcgatgtttttcgaggaatcatcgatgttcttccatacatcggaggacaaaagtatataaattgggggtataaattaaattcggatataactttgttatgatttatttaaaatactccttatttatataagcaatatttttttttaattattatttattaagtgaagtaataagaaatattaaaaatgaaaataatcttaaattaaacagaaacaatgttttgtttttatttaaagcataaatgtttatgttcaaattaatttaagttataaaccataaaataaattaaatgagtatatgtaattctacggcatacattttggcgtggaagctaaatacgaattcatacaatgaatagcttataactaaaatttactgtaataatctatagcataagttgttttaagccattgaatttgaatagctaaagatttcatttataaagacttgaatgctgccaccttaattgttgcaaaaacatgttcttgaaataataagttgccaagttagttagcttgccaaataaaatcttcactgtttgcctgctcgaggtaatttatatttaaaagttctttcaaaatcttgcaaattaattgcttggtaataaacaaattgatttaaatttaaatttaaaaaaaaactcaaaatttaaaagctaagccaatgataggagccccctaaccggtaggcagtattttcaagcggcgcacatacggtcacactgcacggtttcgaatcgcttaacaagtttttgcttaaaaagctttgccgagcactaagtaaccaccgcctttcgcacccacaacacaacgccaccagccagaacaatgatcaaggtacgtggggtgctgtaaataaggatcacactgcgattagacgggaattagtgcagcaaaagcggccgatgactgcgcggccggggtg

SEQ ID NO: 16037 - DNA, 1329 bp, DROSOPHILA
attgaaatacaaaataaatgagtacttcctagaaatcaaatgttaaagaacacaatatgtcgctcggtggagaaagtaagcacacgccaaagtcttccaatctgaggccgttggacgacgaccagctggttaggatcatcagcacgccacgtccgtcaaatggagtgagccagcatcccgcccaggaccgcctcaagcgcctgcagggccaactaaagcgggtgcaggacaacgagaaggagcaggggaccaccaagcggatcacccacagttcctccgcatctcgtcgatcaagtgcgtccacatctacgccccagcgactcctgaagtttccgcctaaggtggcgatgaatgcctgggaaaagccaaaagccctggtcgatgccaatcgcctgaaggcgggacgtacccaaactggtgagtgcccggtgcatatagttactcatatcccatgttctccttatcgtctccctagcctaccagcgtctcatgctgttaagagcttcgctgcagcagaagcagctatatgaggagcgcaacaacaatattgtggccaagatcaacgaagaggtgatagaaaaacaaccagaagcctgcaacatcacaaatccaagtgcatttgatggctcgacggccagcgatatggaggtcgagcccatggaatggcaggagtctattgaagaggaggcggcacagaatgatcaggatgaggctaagaaaggggacgacactctattgatgctgccggcggagtccattgaagaggaggcgccacagaaaggtcaggatgaggctaaggaagaggacgacactatattgatgctgcaggcggccgatgccgaggagctgcccccaaggcttgaggattacatgtactttgtgctggacaccaacgtcctcatacacaaccacaagttcgtggagagactgaccgatgtggtgctgccgggcacggtgggcagcatgctgtaccttccgtacatagtaatcaaagagctggacaagctaaagagcaagtaccagtcggactgcctgcagcgtgtgattgccatgcgagcaatacgctttttgaacaccaagttcgacgaaagctttcaaatacaagctcaatccgctttggaggaggcggatcacctgatcaagatcgactgcccggatgacagcattttgaattgctgcctgcagctgcaggcgcaggttccccacatgatcctgctcaccaacgacgcgaaccttcggctcaaggccaatgcctccaacattcaggtctcctgtcgctctgatctgatgtccacctatgtggatgagttcgctggcttcggcgattaa

SEQ ID NO: 16038 - protein, 157 aa, DROSOPHILA
MSLGGESKHTPKSSNLRPLDDDQLVRIISTPRPSNGVSQHPAQDRLKRLQGQLKRVQDNEKEQGTTKRITHSSSASRRSSASTSTPQRLLKFPPKVAMNAWEKPKALVDANRLKAGRTQTGECPVHIVTHIPCSPYRLPSLPASHAVKSFAAAEAAI

SEQ ID NO: 16039 - DNA, 3446 bp, DROSOPHILA
tgaacgagctgctcttcgagtgctacggtattccgtctgtatcctacggcatagatgcgctctacagctggaagcatcatcagcaaaagcagaaaaatgttgtttattggcccttgcaattgctaacatccaattaatacgagatttcccctttagatatccgatgccctgatcatttcctttggctacagcaccacccacgtcattcccgtgttagatggcaaactccagctggagcatgtgcgtcgcctgaatgtgggtggctaccacatcatcacctacctcttccggctcatgcaaatgaagtatcccgtccatctgaatgccatcaccatcagtcgtatggagaaattggtccatgagcactgccacattgctgttgattacaaggaggagctggtgcaatgggcccagatggactattacgacgagcacataatgaagatacaactgccgtacaatgcggtgaccgccactaacgccatgctaaccgctgagcagaagcaggagaagcgtcgcgagctggcacatcgtctgctggacataaaaaaaaaccgggagcaggagaaactgcgcgaggatgagcagcagttattcgtctacaacaagctgaggcaactgtacgagcagaaaaagctggacaagtttgagcgagctctacagcaacagcagattggtacattggaggacttggattccctcattgcaaccataaactcgcgtattaagcgtgcccaggagagagctcagagtggcccgcgccccagcaagcagcaggagaggctgaacaagatgccgaaacctccagagggcatgtcccaggcggactggttggccgaactccagggcaagcgggagaaaatactcgggcgcaagcaggcgcgccagcagcagcgatccgagcaggccaagcgacacacccacgccgcgcaggaacggatgcgaatcatttcatcactggccaagaacgagaagcggcgcaaggcgaacggcgaggaagaggacgatggctttgggatgaacgacaacgactgggatgtgtacaagcgaatcaatcgctacaacgacgacagcgattcggatgcagataacgaaaagttgatgcagttcgataagatcctaaatcactatgatgccaacaccgatggcaactccaatgttccgccacagagtgccgccgagaactaccagctgcactttggggttgagaacattcgcgtgccggaggttctattccagcccagcatgattggttgctcagaggcggggctagcagaactaatagcattcgtgctgaagctatttcccgccgctgagcagcagcgcctggttgagcacgtgtacctaaccggcggttgtgcccaattcaagggtctcaaggagcgactaatcaaggagctcatggaaatgcgaccgtttcaatcaaagttcgccatctacgagtcggatgagccaactttaagcgcctggctgggagcatgtgtgcacgcaggagagcccaccttcggtcagacgctgaccacgcgtcaggaccaccaggagcatggcagagagttctttcgggagcacacagctagcaatatcttttatcctacaccaaaagattaacatttatttgaaagcaccgaaaaatacatgtagacgcttaaaaaagaagttccgtaacatcattgccgaatagtaggttccaggacttgggcacggtgagcttaaaactgccatcgcctccgttgcgcagctgaaggaagtcttcgcagagttcgttcagttcccggacgattagagatgcatcggtggagttgtcgccctcgaggagatagcggaataacagcatgacgggcaccttctgctcatcgaaggctttaaacaactgcaaggcattgccgccgccatagatggcatcgcccttgtgctccttccacttgatcagctcctcattgcccagctgggcagcatgcgcttccttgaagttttcgctggcgcggtatgcccatggcgactcctcaatgactcgtttctcgaagccgaaactgccgcttagaatgactacgcgtctggcgcccttgaggagctccactagttccttctgaaaatgcgcggtgtggcgggcaacccatggcgcccggaattgcacgaccagtagcttatcctccgtaccctcgtacagttcgcaggaggagaccttctctttgggctcgtgctgataggcggagggtccgtagaccggaatcagggctggatgtgtgatggatccaattcgccggagttccttggacgcaatcaacaggtcacaggccagctgcgccgcgtttcccacgcaaatgctcggtatgattactgtgtgctctgctacgtccagagtggtacgcttgtcctttagaaacagcataattgggttaaatctcttggtgtccggaatgagttgaagatgctaattcaagtcaagtcaaaaatatgaaagtaatgattccagtgttggtgtgtttaccaattgacactgggtggcaactctggcaaggagcttaataaaagtgcggttcaaaaatcaaaagagataacttcgttgtttaaggtaaacaaattttatttacatttaaggacatttttttgactgctgcctacttatacttcgcatataaatgaatataagcacgtggccaagccattaaatttcaaagttttgtcttaaataaataaaacttaatttaaagcaagaaagtaattttataacacatattaattaaatattaaacatttttaaatatcaatattttatacattacattcgttactaacctggaaaaaagtgttgtttttgagcactcatttatcgatagccggccgcagacgttttgcagcactattctttagttttgctttgacaaaccaaatgttttgtttcccggcgcaaatatgtcgaattccgtgaatatatcagtggaaacgacttgcgagaaccagatacgtgagattggctacgatggcaccgaattgtatcagccgtatgtgtttccgctagccagcaagccctcttctcaatgatttattgggttctttgtttttttctccttaggccgccgactttgtcggaaagtctggcgaaatgtgcggcgcgcatagacttcagcaagacgtcgctggacgacctcaagaaggaggagaagtcggcggcagcggccgccgacgaggacaaggacgccactcagttccaagagagcctgtggccctgggatgcggtgcgcaacaagctgaaggatgcgctcacggagatatgtgtgctgtccgatgtgatctccattgccaaggacaagcgctatttagtgctcgatccactgctcgaggaggctgacgacaccaagcccattgtgcaggtgtacagccgcaagaaagccatctctcaggcagcccaagtgctcctaagtggcgctgaacgcctgcggaacgcg

SEQ ID NO: 16040 - DNA, 1446 bp, DROSOPHILA
cttgacttgaattagcatcttcaactcattccggacaccaagagatttaacccaattatgctgtttctaaaggacaagcgtaccactctggacgtagcagagcacacagtaatcataccgagcatttgcgtgggaaacgcggcgcagctggcctgtgacctgttgattgcgtccaaggaactccggcgaattggatccatcacacatccagccctgattccggtctacggaccctccgcctatcagcacgagcccaaagagaaggtctcctcctgcgaactgtacgagggtacggaggataagctactggtcgtgcaattccgggcgccatgggttgcccgccacaccgcgcattttcagaaggaactagtggagctcctcaagggcgccagacgcgtagtcattctaagcggcagtttcggcttcgagaaacgagtcattgaggagtcgccatgggcataccgcgccagcgaaaacttcaaggaagcgcatgctgcccagctgggcaatgaggagctgatcaagtggaaggagcacaagggcgatgccatctatggcggcggcaatgccttgcagttgtttaaagccttcgatgagcagaaggtgcccgtcatgctgttattccgctatctcctcgagggcgacaactccaccgatgcatctctaatcgtccgggaactgaacgaactctgcgaagacttccttcagctgcgcaacggaggcgatggcagttttaagctcaccgtgcccaagtcctggaacctactattcggcaatgatgttacggaacttcttttttaagcgtctacatgtatttttcggtgctttcaaataaatgttaatcttttggtgtaggataaaagatattgctagctgtgtgctcccgaaagaactctctgccatgctcctggtggtcctgacgcgtggtcagcgtctgaccgaaggtgggctctcctgcgtgcacacatgctcccagccaggcgcttaaagttggctcatccgactcgtagatggcgaactttgattgaaacggtcgcatttccatgagctccttgattagtcgctccttgagacccttgaattgggcacaaccgccggttaggtacacgtgctcaaccaggcgctgctgctcagcggcgggaaatagcttcagcacgaatgctattagttctgctagccccgcctctgagcaaccaatcatgctgggctggaatagaacctccggcacgcgaatgttctcaaccccaaagtgcagctggtagttctcggcggcactctgtggcggaacattggagttgccatcggtgttggcatcatagtgatttaggatcttatcgaactgcatcaacttttcgttatctgcatccgaatcgctgtcgtcgttgtagcgattgattcgcttgtacacatcccagtcgttgtcgttcatcccaaagccatcgtcct

SEQ ID NO: 16041 - protein, 247 aa, DROSOPHILA
MLFLKDKRTTLDVAEHTVIIPSICVGNAAQLACDLLIASKELRRIGSITHPALIPVYGPSAYQHEPKEKVSSCELYEGTEDKLLVVQFRAPWVARHTAHFQKELVELLKGARRVVILSGSFGFEKRVIEESPWAYRASENFKEAHAAQLGNEELIKWKEHKGDAIYGGGNALQLFKAFDEQKVPVMLLFRYLLEGDNSTDASLIVRELNELCEDFLQLRNGGDGSFKLTVPKSWNLLFGNDVTELLF

SEQ ID NO: 16042 - DNA, 3328 bp, DROSOPHILA
acccacaatggcaatccttaccttaaacttaccttattttcgtgtttgttcacggcgaatgcgtatttaaaatgtggcaataagcacaggaattggcaatctgtaaagatgttgctatgacaagggttgtactccttctgaagtgaataggtaagtcgtaaggcttatatacaaacatgtcccaaggtcgtttggttctgtaaaatgggcaacatagcatatttaacaatgttacctgggtcaggtgtcatcaaagaagggctttccagcagctgcactcatctttttacggtgcgtcccaactaatcttacgattttctgtagatccaagcaggtcaatgcataatgtgatacatgcaggtaaaagtaactatggttaaagaaaaaatctttccttggtcgaccccaaagtgctaaatcattattgctgaactctaaaaccatgtgtttgtaacgaaatatacttattggggtggtggaaaacaggggaaaaccatttacccaatgaccaataaagctagccatacccttctattcccaatataccccatggcggaatcattctagtagcaaattattcaataaaaaacatacagtacaaaaaaacgaataattcaattttaaatacaagactaaaacaaagtaaatggcatcgatttctggtgttaattaagtacatatgtacattattaataactttgtaaatcaaaaggagtaagcgattattgcctttatagataatgtgctagaattattccttaaattccttttcttgatgacattaaaacactcgaaccccaaagtttttaaaaacatttatgttaaatcaactacaataataaaactagaaagtaacctatagtcgagcaagccttatttgatgcgatgccctttttctatggaaccatttcccttgtattaccaactactaaagataaacgtcgttgaattgctagtaacattgtttattccgagtgaaatggatgattttgaagactcctcatatgaggatgttgtggcaccgcatgcccgttaacatgggcatcttctttggtccggagatgaaccttcccgccacctgcaggaactcgctctgcccccgaccgaacaaagaagcgttctgggtgagctcgacgttcacgtggttctcggtcaggtagacctgtccgttgatgtggaagtggctgttggtaatgtagatgttttgtgtggagggggagttgaccttttcggcgtgcaatgagccggagaccgtaccggtcagggagtccgatcgcctccacaccaccattgattcttcggaggacttggccattgctacccggtttccggatctgacacttccatagctactggagctactgctgatatccagctcgtgcagaagttcgcgcatttccagacactgcaactgcaggatactgagctgctccttcagattttcattgtggtcctgcaggagatcgaagggattcgaatcgtcctgctggcttggcgccttctgctcaacaactgggtcctgcactttggcagcagatttgggatgcagcgcctttttgctcttgaaataccttttggcctgcagctccgccagttggagcagcttggacagaccaaaggtcagggcaaagatcacgccgaagctcgtcgcaaactggtaggtgctgtcggagctgtcggagctactctgctctgagggactgtggcacagctgcggctcaaacgtaatcccaggacgctctgtacaagtgaataaaaggcaaaaggtaaataacaactttgtgaaaaactttaagggtcgataagtatttggaacaccaaattacatcaacttttctaggtatctacgttcagtcggacggaaagacggacatggccagatcactggcaagtgatcttaagaaagattaatacatatacttaatgtctgatatctatttcatatgttaaatcaaatctcgaataccctttaataccacaaataacgattaaaataatatagacattaacttctaatgtatccggctttaaaaggatcacttttaagagtgattaaaaaatcataagtgtagtgttggattcaaccaccatttcttcacttaactcaaaacaacaatggacatcctcacctgtgtataattcgactcggaaatcagaggagagccgcgtctggacctggacgaagtgctggaagcagagaacggcccaggccacgaaggccaaggcagccaggaacaagaaacttatgcattcgaacatgattcccgaaattttgttgtgtgctgataacgtgtgtagttataaaaacagctttcgaacaagtcgggcctcgtgtggaaaataaagaaatatcggacactaaaatcaaagcgaataagattgtaaaaggactctgtttctttcggtttctttttaatttcttgaaatcttaaaaaagctattagaatttcaacttatttattttaaagaaatttctttttttttttgatgttttaagatatttgatttgaaacaattttattccaaattaattttcgactgtttggtacaacaatgcatatcaattacttaaatttatttatttaattttgaattcaatattgtcttcggtatttgtacgacattgtacgttattcatcccgacttgcggctggtcacactgcgctaaacaaagtacgaaacgtgatttttcgtttcaataatttttaaagtaaataagcaaccttgtccaaataaaatggagatgatggtatgtagtggctaaaagaaattaaccgattctgattaatggacttgttagcatggagcgtcgctgctgtcgcggccagcggaggaatttggcaacgacaccctggtggaggaaatgtgggccgcaaaagctctggaacacgccgaggtgcactttaatgtgagtacactttgaacgatgttaaggaatggtagttgacactgcttcatcgtattcccggcagctcatcaccagcgtccatccctcccagctgaagctcacgccctacgacgaccagatatacgccactttccggcaggattttcccgatcttcacgttggccggcttaccgatgatattctcaaatccgccacggcgaagctcaagtggcgccagttcgccgagaagtttaacaagttggacgattactcgtatggcaccctgatgcgcgccgatgccagcagggaattctccccggacaactctatcttcgtgtttcgcgtccagtttctggccatcgagattgcccggaatcgggagggactcaacgatgaggcttacgagaagcacaagcccgccagaaaggtacccgaagagga

SEQ ID NO: 16043 - DNA, 939 bp, DROSOPHILA
gcccgacttgttcgaaagctgtttttataactacacacgttatcagcacacaacaaaatttcgggaatcatgttcgaatgcataagtttcttgttcctggctgccttggccttcgtggcctgggccgttctctgcttccagcacttcgtccaggtccagacgcggctctcctctgatttccgagtcgaattatacacagagcgtcctgggattacgtttgagccgcagctgtgccacagtccctcagagcagagtagctccgacagctccgacagcacctaccagtttgcgacgagcttcggcgtgatctttgccctgacctttggtctgtccaagctgctccaactggcggagctgcaggccaaaaggtatttcaagagcaaaaaggcgctgcatcccaaatctgctgccaaagtgcaggacccagttgttgagcagaaggcgccaagccagcaggacgattcgaatcccttcgatctcctgcaggaccacaatgaaaatctgaaggagcagctcagtatcctgcagttgcagtgtctggaaatgcgcgaacttctgcacgagctggatatcagcagtagctccagtagctatggaagtgtcagatccggaaaccgggtagcaatggccaagtcctccgaagaatcaatggtggtgtggaggcgatcggactccctgaccggtacggtctccggctcattgcacgccgaaaaggtcaactccccctccacacaaaacatctacattaccaacagccacttccacatcaacggacaggtctacctgaccgagaaccacgtgaacgtcgagctcacccagaacgcttctttgttcggtcgggggcagagcgagttcctgcaggtggcgggaaggttcatctccggaccaaagaagatgcccatgttaacgggcatgcggtgccacaacatcctcatatga

SEQ ID NO: 16044 - protein, 289 aa, DROSOPHILA
MFECISFLFLAALAFVAWAVLCFQHFVQVQTRLSSDFRVELYTERPGITFEPQLCHSPSEQSSSDSSDSTYQFATSFGVIFALTFGLSKLLQLAELQAKRYFKSKKALHPKSAAKVQDPVVEQKAPSQQDDSNPFDLLQDHNENLKEQLSILQLQCLEMRELLHELDISSSSSSYGSVRSGNRVAMAKSSEESMVVWRRSDSLTGTVSGSLHAEKVNSPSTQNIYITNSHFHINGQVYLTENHVNVELTQNASLFGRGQSEFLQVAGRFISGPKKMPMLTGMRCHNILI

SEQ ID NO: 16045 - DNA, 3230 bp, DROSOPHILA
ataataaaacattcgcgtgtacttatgtgaagcagacgatgttaaattatgcctccagtacaaggacacttcgtgccatttagacttacaatccgatctagatcgatttcaaatatggtgccgtgataacgtgttagacttaaatggctccaagttgttgtgccaacccaatacgcacgacttacactctaagtgggtgctccttggacagaataacacgagttgatgatcttggatgatctctggacccaaaactaaaattttctgaccatatttcgtctattgtcaataaggccagggttgttcttggttttataaaaaggtggtctaaggaatttgatgatccttacttgactaaaaccttatttatttcgttagtccgtccgattctcgagtacggatcacctgtttggagtccacaatacgcagtccactcggaccgcattgaattggtccaaaaaaaaattcttactttttgccttgcggcgcctaaattgggatgcaaaccgtatattacctccttatattagtagacttcctttaattaatttaccgtccctagctaaccgtagaactatgcttggaacagtctttatttgtaagcttattcgtggggatgttgagagtcccgactttattagtcggcttaacttttcggttccaagtagattcactagaaactatataccccttatcttaaatcattgtagatctaactatgagttgcatgacccttacagagttttatgttctgactataatagacttaactctctgccgctcttaaagcaatcgattttaacttttttattacataattagatcctactaacagtaatatttaatatagttattttacattatattcatttcctcgttcctgttctcttttttatatcgcgtctatatcttctcgcgaatcgagccgtacgatacacggcagcgcccctcggtcggttgggcgggaggtgtggacgtaggacccgtgcgaacaaaaaaaaaaaaagaatcgaattcttttagccttctcaaacggttctttcttctacatgcgatttgtgcccagttttcctgtgtgggtttgcaagtgtgttagcagtgcggatttccgcgaaaaagtccttgggcagctggaacacttaaacggttttctttgtgcgttactatgtgccggcttagatcctgaagatttgcaaggaccttcgagcaatggcttatttttggtgtgtgatttcaagtgagtggacagagccgaacggtcagtgaaagtttttgggcacttaccacacttaagtgcctttgagtggcctagtgttttgtgagcagatgcttttgagctttgagagcatctcgcgttccttgacaggtgtcgcttgagatacgcatgtagcgcaaagtcctttgagcaatggccacaagtaaagaggcgttcttggtgcactcgcatgtgcatccaaagttcatgttcgacttgaaaggacttcgagcactgggaacacttgaactgcgtttcatcagtgtgcgtggccaaatgctgcttgagaattaaagaagttagaaagcacttttggcagtatgggcaccttaacgatcctcttctttcgtgcatctgtatgtgggccttgaggtggtgcccagctgtaaaggaccttgggcaatgcgagcactggaagggtcgttctcctgtgtgggttcgcatgtgattctgaagaccagagctatagccaaaggacttggggcagagggaacacgtgaagggacgttctcctgtgtgtgaacgcatgtgtaccttcagatttgattttacttgaaaagatttagggcagtgagaacagctaaagcctggtttctccttggccttgatatcacattcgttaatatcaggttcattgccggaatcgacgtcgtcggcaccatcctggagatccctctcagctgcctccacttcttctgagcatccggatccatcattttcactctcctcctcccgtacatccttgaggaagcggtaaaactggtgacttctctcgtacgtttctatgatatcgaatgcattctgcgcatcctccagacaggacttgcatatggtgttggacagtggatcgtgcttctcaacttgccagccggtgcacttgtatattatgtacgcaatggataggcccggttcatgagactcatcgaaaacactggccatattttcgtaactgaccaggcaaactcggcatattgacgattccatcgatctgaaatgacacgaactgtgtgaatataaaattgcgaatatacaaaatcgtgcacttaaacggtttcaaaaaagtataatggttattcccagatctttgagtattagcgtttctggaatctacatcctgaatgctaaatacactgagatctcaactttcaaacaaacggacagaataggtacgactagatcgtagtcatggatgacacatacactttataaggtcagtgacaaacgtcatcttttagttgcatagcatcaaaaagaaccctctgcactctttcttatatttaataatcaatgaaatttaatacttgtgtagagctttaaacataaattgcactaatttccaaatacatcttggtttatttatgactttgctaactcggcacgaattgacccacaatggcaatccttaccttaaacttaccttattttcgtgtttgttcacggcgaatgcgtatttaaaatgtggcaataagcacaggaattggcaatctgtaaagatgttgctatgacaagggttgtactccttctgaagtgaataggtaagtcgtaaggcttatatacaaacatgtcccaaggtcgtttggttctgtaaaatgggcaacatagcatatttaacaatgttacctgggtcaggtgtcatcaaagaagggctttccagcagctgcactcatctttttacggtgcgtcccaactaatcttacgattttctgtagatccaagcaggtcaatgcataatgtgatacatgcaggtaaaagtaactatggttaaagaaaaaatctttccttggtcgaccccaaagtgctaaatcattattgctgaactctaaaaccatgtgtttgtaacgaaatatacttattggggtggtggaaaacaggggaaaaccatttacccaatgaccaataaagctagccatacccttctattcccaatataccccatggcggaatcattctagtagcaaattattcaataaaaaac

SEQ ID NO: 16046 - DNA, 1230 bp, DROSOPHILA
tcaatatgccgagtttgcctggtcagttacgaaaatatggccagtgttttcgatgagtctcatgaaccgggcctatccattgcgtacataatatacaagtgcaccggctggcaagttgagaagcacgatccactgtccaacaccatatgcaagtcctgtctggaggatgcgcagaatgcattcgatatcatagaaacgtacgagagaagtcaccagttttaccgcttcctcaaggatgtacgggaggaggagagtgaaaatgatggatccggatgctcagaagaagtggaggcagctgagagggatctccaggatggtgccgacgacgtcgattccggcaatgaacctgatattaacgaatgtgatatcaaggccaaggagaaaccaggctttagctgttctcactgccctaaatcttttcaagtaaaatcaaatctgaaggtacacatgcgttcacacacaggagaacgtcccttcacgtgttccctctgccccaagtcctttggctatagctctggtcttcagaatcacatgcgaacccacacaggagaacgacccttccagtgctcgcattgcccaaggtcctttacagctgggcaccacctcaaggcccacatacagatgcacgaaagaagaggatcgttaaggtgcccatactgccaaaagtgctttctaacttctttaattctcaagcagcatttggccacgcacactgatgaaacgcagttcaagtgttcccagtgctcgaagtcctttcaagtcgaacatgaactttggatgcacatgcgagtgcaccaagaacgcctctttacttgtggccattgctcaaaggactttgcgctacatgcgtatctcaagcgacacctgtcaaggaacgcgagatgctctcaaagctcaaaagcatctgctcacaaaacactaggccactcaaaggcacttaagtgtggtaagtgcccaaaaactttcactgaccgttcggctctgtccactcacttgaaatcacacaccaaaaataagccattgctcgaaggtccttgcaaatcttcaggatctaagccggcacatagtaacgcacaaagaaaaccgtttaagtgttccagctgcccaaggactttttcgcggaaatccgcactgctaacacacttgcaaacccacacaggaaaactgggcacaaatcgcatgtagaagaaagaaccgtttgagaaggctaaaagaattcgattctttttt

SEQ ID NO: 16047 - protein, 382 aa, DROSOPHILA
MASVFDESHEPGLSIAYIIYKCTGWQVEKHDPLSNTICKSCLEDAQNAFDIIETYERSHQFYRFLKDVREEESENDGSGCSEEVEAAERDLQDGADDVDSGNEPDINECDIKAKEKPGFSCSHCPKSFQVKSNLKVHMRSHTGERPFTCSLCPKSFGYSSGLQNHMRTHTGERPFQCSHCPRSFTAGHHLKAHIQMHERRGSLRCPYCQKCFLTSLILKQHLATHTDETQFKCSQCSKSFQVEHELWMHMRVHQERLFTCGHCSKDFALHAYLKRHLSRNARCSQSSKASAHKTLGHSKALKCGKCPKTFTDRSALSTHLKSHTKNKPLLEGPCKSSGSKPAHSNAQRKPFKCSSCPRTFSRKSALLTHLQTHTGKLGTNRM

SEQ ID NO: 16048 - DNA, 10327 bp, DROSOPHILA
cgaggatgagattatcacgcccaaggcgctgcccgtccagatctatgagttgcccaagtaaagggcgggatcatgacagctgggttagtgtcagagtatatatatcgcgatggtaaatgcgaaaataacacaggcggcactttgagattgtttttgggatccctcaatcggccttcgagtcttgtatcagtctatttccgaagtaggagacattccaggcccttcgacaattagtctattgtcgctttatattattttggcaattaattagcagtatgtacaatatttttttgcaattgatctgcgttagaggaacgaatgtgagagggaggcgagcgctaaaagcgtttttgtatagttctgggctaattttgtaacgaatttttctagtttagttcttagtttttcatgtatgttttaagtttagcattgaacgaggcggtgaaacgaagtatactacaaagtcaacatcaagagcagcagcagcagcgacaacagcaaatatataaaatctaatcctaaagaacttatcagcgatttagacaaagcttgtagacatagcgagaaattgcagccaacaaattactacaaatatttaaagagtaaacgagtaagaataaagcattcccgtaatattggatttagaagcaaaatttcaaaaaatataaaaatatacgtatactatgcacattagcgctcatcagtgtttatgcttttttgagtctatccatatgagggagcataggaaaacatatcggctaaatcggcgaatcgagcctagagcgaccaaaattcaaacgcaaaaatccctggcatgatatatctatagaacgagtatattacgaacagatattgtattttttaatttacggtattgatatttaatgtatctgtgtatatgaacaacaaagcaatgagaacggagcatccaattttataatagtttgttaaaataaaaacaaaaatcttccagaaaaataattccagtcgcatagcatttcgttgaactattttattatgaattagttaaactcaatacatttgtaagtatgattatatttatgtaccgatctggagtattgtatatgcgcttgtatatatgtatatgcatgtaaataatacctgtaactctaattgacttaaacaataggattctagtggagagcttgtacaatagttggctaaatattattgttccggtttaaagccataacttaacatactgaaacgaagcggtccatgtgccaaatgccatggggtaatggaaatttgagtaggcagtggaaaaataatggaactatcatatcaaatgcatattgcttaaagtggttacggagagtgatatgatgtggctcttaggttacctataactcgacatgacacacaaaaattcttgtttcaactacaactacagtatgcaacataataatatacgatcttgagcgttggctggtcacacaaagtcgcccgattctagagtaatatcaaattctacaatgtttaagtgtatatctttttgatttttaaaatgaatttataattttgctcgaagttcatttggtcgattcgttatgcttgtattgttttgagatccaattttgtagagcagcgttgtaattagaaattccgcacagtaaaagttctctgtccctggagacataaaatcttacaaaaattccttgcacatagcgaattgaaaactgaagtaaaaactggtctttctactataaactggtatcacttttgaatataaatataaaacccagcttacttttaatataaaatcgtaaaagccgtacaaaatttatgagtttgagagaagtttaactccatacttaaatattttaactacaacgctgatctaccagaagcaacttattttatccacatttaatcattgtgctcgttcagattattgctgttggtagtgcttggaaggttgttttgactgctggttgtctcagtctcgttatcacttaagctgacaggatctacaacttcgatatccacttcaggaagcgctatttcagctacagctccaccaacagctccctcgagttcatcggcagcgataggcttaggcttgaaggtgttgttatcagcattaagtttgtagttcttgtagggatctggcgacccaggaggcttaggctgctgcgattgctgttgagcttgagctccttgccgctgaagtcgcctctgctgattgctgaaggtgggactctccgatctagcccgttgcagcagagggcgctgctgatgataggtggaattgggatcgtagtcgcgggatcttccgaattcaaaaccattctgccactgaacgtgcacattttcgtaggaaggatcctcgtactgatagttaccagccaccctattggggtttctcttttcaccgttcctcaggcgactcaaagtgctgtgcagtgggcgagctgatgcatttgcgtctcttcgtattgtagaagctgctccggctgccgcacaagctccagcgcaggaactctggaagcgtaccatatcctggggaagaccactcaaacggggtgtgccatacggatttgacatctgagatgccactgaagctgtatcgcaactcacgcagtcacgggaaaacatgaagttgaagtcaattacctaatatggacgtacatagtcagattcgttcgaggtaaaaagaagagaaaatgttttttaccttgcaatcgggtccctggccaatccacagcggcagccatttgtttactagtagccattgcaaactggacttggagatacgattcaaagtcccattgccattggtatctccagatgagctcgagcgtgctgctgctgtagaagttttcttcgccaaggttacgctctttcccgatccagtggatgtagttttatccaaaattggcgatgcggccgtggaggatcctcccgactccttagcgggtttgttagctgttttcactttcggaatggctcctgttgtccgattggcattaatgttggatgagcttggaatactatctgccgcagaatgctcttcaacagctgctgctgctgatccagctgcccccgcggacgccgatcgggatgctcgctccatggacacatttggcgtcaatggggaattatgggcagccatggcagctgccgttccagacgttttgtaaatattggtcatactctgcgagttctcaccgtgcaggcagctgaagaaactggaggcactgtttttcacaggaaccttaacatttgcatactccaccggaactgtggatccagctgctgtcatataaccttgacaatttggaacattgcaagtgccggtcccagctacgccaggagctgctactcccgatccattggcgttcaatcgaatgtgtcccacggttccgaagtgcgagtgtcccaataccgcgtaatgtccgcccaagttatagtgatcgatgttgccgcatgacgagctaaggtgcctttcaattcttccgattccatgacccaaaacatcgagacgtgtatagagcggaactcgattcgcagcggatgtgcggtaaagtggctcatctcgaatctgctcatagatgttctcgtatcgcattgttcccgctccggcgtaaggcaaattgtagccgtccgtggactcagtgtcgtcaaaactgcgctggcgttgacaattggatcgactgttcgtataaagtggagtacaacgaagaccgcttccacatcgatttcctagagtggaaaatatagcgattaatgaaaattcatttgttatacgaaaagttagaaactatgcgtttaaatgctgatttaaatgtgggccgttaagaactaataattgatttgaacttcgtgtttgttttgaagtttaaatggtttttgcttcctacctcacaacatttaaaaaggctgtttgcttaaaatattcacgaaaatgaaggcaaaccgatacgtacaaagttatatagcacaagcaaccgttcaaaaagaggttaattgaaagacaacttttgagcacttcatacttaaaagtacgaatcaagctagtgtaactgtcttctgcttaatattattcttaatctcaccattctgcatatcaatcctaaagttgcgtctgtaaccaaggccagatctcacggctctcggaacatcataggcggagcagactccgccggcggcagatcgatcatacaaatcattcctatagttattcatgggcagtatgcgttgaggttgttgtggctgtgcttgctgttgttgttgttgttgtgatggtgctggagctgctgctgttggcggttgcggattattgttggcattaggttcagtgggagctggttgttgttgttgctgaatttcctcggcatttgcaggggcattggcattggcgatggctgcagcttggttgctgttgctgccgctgttattgttgttgttgctgggctgtccaattggcgcgtagatgttctcgtagtgcggatgatttggctggggagcttgagccggcgcagctggagctgcagccgctgcagccccaccagccggcgccagattaccgtagatggcaccaccaatggcgccctccatcgtgccctccgcctggctattctcatcatccagcagtgcgatggccaacgaagcagcttggctgaaaagaaacaagagagattattataatttgttttggtaacaatgcttccattgacttaccgggccaatgcaccctgctcttccattcacatgggcttgtcgatcatacacacgcccgcatagctgcgtccgatggtcatcaaagcaggcagtattctccaactgtccgagtccgggcagtagacctccacagaagctagatttgaggtgccatcatcgccaccgaccacatacagcaggccatcatgagccaccactcccgcatttcgccggcaatatgacatgtctgccactgaacgccaggagttcgtttcacaatcgtaggcttcaacagatcttctgaccatgggaccatcgtgaccgccaacggcataaaggatattgttcagcactcccactccggcgccactcctccgcgaactcatttccgccacattaacccatgtgtccgtgtccggattatagcgctccactgaagataagcactgacgagtgaagccatcgtaaccgcccacggcataaagaagtccgtggacgacgcctacgcccacagaactgcgacgcgtggacatggaggcgataaaccgccagatgtcagtcttgggatcatacatctcggcactcgacagacccgtagtgccatcgaatccacccacggcgtatatgcaaccattgaggacagctactcccagggtagatcgtctggcctccatgttgctgcagtttgcccactgatccgtggcaggatcgtagacatctacggtgcgcacacgcagtgatccattgaaacctccgacagcatagactttgtcacccaggacacttaagccggagcggcatctgcggttgggcatttcggcggcctggtaccacttttcctctcgcagatcataccactccaccgatcgtatagccttgggtgcttgtcctccaataacgagcagtatcttgggcatgcccaccggcttcctgggcaccgttctagcggactttgtctcagtgggcagtagatgataggtcaatgcctcaatgatgagattcttgcacacgatattgccctcgaggaggatctccttgtccacacgttgtgtgatgtactccttggacaggaacggcagacgcacatgctccatgagcaacgaggtgaactgttcccgcataggaacatcgtagcgcagccaggcgatgacgcactcgtatacgcgctcctcatttggaaccgaaatccggtcgttgccaatcaggctgatgacctgctcgtgcgagaggttcagaaactcatcgaactggatcacctcgctgcaaataaaccaaacacaagcagttagtaatggggcgcaaggaatgagaggagtgggctaagtaaatttaattaatcgcaaccggttcaatggtttatattgcacatttgctttcggttttgcgtctgtttactgttatataaacttaataattaactaattttgtttctgcctgatgaaatcaatgagaacttatataattctgatactttggttattactaattcagtagttgaattcgaaaatataattaatataagattaaattcgtgatcttatggaaacccaaaattagcgacttcaaacagatgctggaagacaccaatgcgtgactgttaaactatttaaattttgatacattccaaacacacctaggaatttaatcgtttttataatataattaaaaatcctttttgttgagtctaaggaactttaacttgacacatgttattaaatgttactataattattaaaatatctgatcccattaatcgattcaattgatattgttgtacggcagctttctatcctcaataaataataaataaatagtcacttcactggaatttaaatacgaattactatccgtagatatagaacaaactaaagtgagtcttcccaatatacatgctctaaaagtgaacactgaacagatacagtaatggattcctatctgtaaacaggcaaatcaaaacaattttatatttgtctgcccatactgcgtcatcacaatctagccacttacttgaaatgctgctcgatgtaggtctctgcgtaattgagaagttccacgcaggcatgaatatcggcaaactcccggatgccgaggcaattactggcatccaactgagtttgcaggaagtcgcagcaggcatctcgcacatccgtgagctggagcaggttggcggcggtcaagaggacttgcacgttatcctcgtttacctccaccgtggcagtgtatacgtagtcgatgagcagctccaaggcccgagcatcgacactctggagggtgatcctcgcctgccgcgactcctcgaaactggtgaacatcgcatagaagtacggactgcaggaggccagcaccatgcggtgagcgtggatctccacatcgtcggccaccaatatcacatcacagagctgtttttgtctgttataggtaaaaatatatatatatcagatttgatacatttttttgtacgcagtaaattggttagtaaccgtcatgtatcgacaatattgagactttgaaatccactagcaatagatcgttttgattgccaaataaacagtttaaaagcgtgctaaatatcttcaaggctggtatgtatgtttgtaaacaaaagtgcttgaattttttcaagaggaaaatattttgttttgtaaaaagagacggggatgctattaactgtgcaaattatggcgccattaaatgatgatgactactcgaaaagactaagatcttttgtcttcaaaatcgtaaggtgttataattataacccaataaaaaaaatctcatagaatatacacctcacgaaatatttgtgtgattcaattcccaatcaaaaagcaatccacattacaacgctcggcttactttttgggttataccacattcactttcgcgccgaatacgatatgattggtccgaaaaaaaaaactcgttttatgtaagctaccaataaattttccatacgcccagtagttttccaaaaagtaagcaaaggcggagacgcggaagcggaatcgaaatgcgattcgaaaacgaatatcatttttggccgcaaccaagttcaaggtcgtggcccaatgcgaaacccgaaggcgtaagcaactcatcataataaaaactagacaataattaatgcgaatggccccacgacaaaagcggcggcaaatattcgtttatacatatgtagtgtgcaaacacaaatattagcaacggccagataaacaaagcgaactgcgcaaatatgcgagagacgatcatctgacattttcagagattttattttcgcatcttggcccaaatctcaaagctcgagagccagtcggtccacctgttcccgtcgaacacgcagggattgaatcatgcgcctttgtccgggaacagaggagatgagtttataatagagtgtagttagcacagttctatttatattaagttgaggtaggtcgtcatatttaacaactgaaagttttagtggtagaaactcagatcagcttgttttgtcaaggaaatagtaactgggaaatagctgacacctttttagaacctgaacgaacgttcagctggtttgctgttgagcaaacaaatgacatttgaaacatttttcgaaccgttgtaggtgtgcttatttacataatcaggctataaaatcacatagatctaattctgcatatcattaaaagtcctatgtgggtgctgtgtgttctattctccagggcaggtacaaaataaccaatgttctacctaaggtttttaaaacctctcacaggtaggaattaggatataatactatttgtggatctaaatatactgccttaaggtctttagaaaccctggctacttctttatgatgcttaaggacttaaccaaattttatagtcgtacgaactgatccttcgacaggatctcgtgccatccttactttctcatctcgttcatggcgtcgaaggagcgcgccgtatgctgttcattgctgtactgccccacagtgccgcgctccttgccatttggccgctggacgtgcttctgggagctctcgtccagggagttctggctggcgtagcgcagaaggcagctgccccgctccaggccacttccctcggcggcgggattctgatggtggtggtgctgctgctgttgctgctgcagcaggcggttgcgctgctgcatggctgccacgcccactgcggcacctagtccgggcggtggcgccacgaactccgctcccgctccgccttcattctgtgctggttgttgtgggttctgaccctgttgttgttgctgctgctgctggttgttgttgttgctgttgccattgcttaggttgctcataataccgatcgtatatttggttagcagcgcactcagagctatcatccgaaacggatcggaaacggaagtcgcagcgaatcgaaggtgcctcgcctggtccgaaaaaacaaaccgaggtggtgaaaaattgtacactttttggacgcgaccagagcagtgtgaccagcctcgggttggtcgcaagttaccactagcgatgaatactcatcgatagtccgataggcattttcaaccagttctcactgagctggctttgtttccaactataaaattaatgataaagtcatttaatttttgaatttttgtaattcacttgaattacatcttaaatatgacctctcccctttaatttttatttatacgtacgtttcaaaaagtgtgatttttaaattgatatacaaactaatattccacatttacctaaacttaaaaaaagcatacctaattcatcttataaaaatatataaataaaattgcaaaaagattacaaatatgcgacacagaattcattaagattgcatattcgaattccataaaagaaagtaaaaaaggtttagttcagcataatcttgatagaatatctatagatattttatagatataaaataaaataaatagaaatctatagattttagttgattactctcattttataaagaattcacgactttataatgaaaataacgaatgagttaaacattcatttgttaaagatattaaaatacatcaatcatttgggttgattatgattccacacttctgattcaaaacacactttgagattttttctaatatcttgatcaactttatttgtttgactcttttttcgattttgtttttgaatattgatacgcatgctcatcaacatgtgagatatgtaaaatacattaaataggtattggaaacaactgcttattgaatgtttacgaataacagcaaccacctaggtaggaatacatgatttataattcattatattaatatagctacagcttaatgcgaaaatcggtagtatttacaaatgctctacacgtgtacaactgacgggttttttctttttaaacaaagcactcgcttgcgaacgaaatcacttcgaataaataaataaagtatattcataaataggcgaaaattacatttggaaatttggctaatgagagagttttacactaactaagctgcattcgtatctcgtatttacacgtaacagtaacacatcatttagattccatacttcaaataaatacaatgaaatattacaagaataccagcgattacgaaaagctcgattggcccttctttttgcaatacttatgtgtgtagg

SEQ ID NO: 16049 - DNA, 5603 bp, DROSOPHILA
atgtaattcaagtgaattacaaaaattcaaaaattaaatgactttatcattaattttatagttggaaacaaagccagctcagtgagaactggttgaaaatgcctatcggactatcgatgagtattcatcgctagtggtaacttgcgaccaacccgaggctggtcacactgctctggtcgcgtccaaaaagtgtacaatttttcaccacctcggtttgttttttcggaccaggcgaggcaccttcgattcgctgcgacttccgtttccgatccgtttcggatgatagctctgagtgcgctgctaaccaaatatacgatcggtattatgagcaacctaagcaatggcaacagcaacaacaacaaccagcagcagcagcaacaacaacagggtcagaacccacaacaaccagcacagaatgaaggcggagcgggagcggagttcgtggcgccaccgcccggactaggtgccgcagtgggcgtggcagccatgcagcagcgcaaccgcctgctgcagcagcaacagcagcagcaccaccaccatcagaatcccgccgccgagggaagtggcctggagcggggcagctgccttctgcgctacgccagccagaactccctggacgagagctcccagaagcacgtccagcggccaaatggcaaggagcgcggcactgtggggcagtacagcaatgaacagcatacggcgcgctccttcgacgccatgaacgagatgagaaaacaaaaacagctctgtgatgtgatattggtggccgacgatgtggagatccacgctcaccgcatggtgctggcctcctgcagtccgtacttctatgcgatgttcaccagtttcgaggagtcgcggcaggcgaggatcaccctccagagtgtcgatgctcgggccttggagctgctcatcgactacgtatacactgccacggtggaggtaaacgaggataacgtgcaagtcctcttgaccgccgccaacctgctccagctcacggatgtgcgagatgcctgctgcgacttcctgcaaactcagttggatgccagtaattgcctcggcatccgggagtttgccgatattcatgcctgcgtggaacttctcaattacgcagagacctacatcgagcagcatttcaacgaggtgatccagttcgatgagtttctgaacctctcgcacgagcaggtcatcagcctgattggcaacgaccggatttcggttccaaatgaggagcgcgtatacgagtgcgtcatcgcctggctgcgctacgatgttcctatgcgggaacagttcacctcgttgctcatggagcatgtgcgtctgccgttcctgtccaaggagtacatcacacaacgtgtggacaaggagatcctcctcgagggcaatatcgtgtgcaagaatctcatcattgaggcattgacctatcatctactgcccactgagacaaagtccgctagaacggtgcccaggaagccggtgggcatgcccaagatactgctcgttattggaggacaagcacccaaggctatacgatcggtggagtggtatgatctgcgagaggaaaagtggtaccaggccgccgaaatgcccaaccgcagatgccgctccggcttaagtgtcctgggtgacaaagtctatgctgtcggaggtttcaatggatcactgcgtgtgcgcaccgtagatgtctacgatcctgccacggatcagtgggcaaactgcagcaacatggaggccagacgatctaccctgggagtagctgtcctcaatggttgcatatacgccgtgggtggattcgatggcactacgggtctgtcgagtgccgagatgtatgatcccaagactgacatctggcggtttatcgcctccatgtccacgcgtcgcagttctgtgggcgtaggcgtcgtccacggacttctttatgccgtgggcggttacgatggcttcactcgtcagtgcttatcttcagtggagcgctataatccggacacggacacatgggttaatgtggcggaaatgagttcgcggaggagtggcgccggagtgggagtgctgaacaatatcctttatgccgttggcggtcacgatggtcccatggtcagaagatctgttgaagcctacgattgtgaaacgaactcctggcgttcagtggcagacatgtcatattgccggcgaaatgcgggagtggtggctcatgatggcctgctgtatgtggtcggtggcgatgatggcacctcaaatctagcttctgtggaggtctactgcccggactcggacagttggagaatactgcctgctttgatgaccatcggacgcagctatgcgggcgtgtgtatgatcgacaagcccatgtgaatggaagagcagggtgcattggcccgccaagctgcttcgttggccatcgcactgctggatgatgagaatagccaggcggagggcacgatggagggcgccattggtggtgccatctacggtaatctggcgccggctggtggggctgcagcggctgcagctccagctgcgccggctcaagctccccagccaaatcatccgcactacgagaacatctacgcgccaattggacagcccagcaacaacaacaataacagcggcagcaacagcaaccaagctgcagccatcgccaatgccaatgcccctgcaaatgccgaggaaattcagcaacaacaacaaccagctcccactgaacctaatgccaacaataatccgcaaccgccaacagcagcagctccagcaccatcacaacaacaacaacaacagcaagcacagccacaacaacctcaacgcatactgcccatgaataactataggaatgatttgtatgatcgatctgccgccggcggagtctgctccgcctatgatgttccgagagccgtgagatctggccttggttacagacgcaactttaggattgatatgcagaatggaaatcgatgtggaagcggtcttcgttgtactccactttatacgaacagtcgatccaattgtcaacgccagcgcagttttgacgacactgagtccacggacggctacaatttgccttacgccggagcgggaacaatgcgatacgagaacatctatgagcagattcgagatgagccactttaccgcacatccgctgcgaatcgagttccgctctatacacgtctcgatgttttgggtcatggaatcggaagaattgaaaggcaccttagctcgtcatgcggcaacatcgatcactataacttgggcggacattacgcggtattgggacactcgcacttcggaaccgtgggacacattcgattgaacgccaatggatcgggagtagcagctcctggcgtagctgggaccggcacttgcaatgttccaaattgtcaaggttatatgacagcagctggatccacagttccggtggagtatgcaaatgttaaggttcctgtgaaaaacagtgcctccagtttcttcagctgcctgcacggtgagaactcgcagagtatgaccaatatttacaaaacgtctggaacggcagctgccatggctgcccataattccccattgacgccaaatgtgtccatggagcgagcatcccgatcggcgtccgcgggggcagctggatcagcagcagcagctgttgaagagcattctgcggcagatagtattccaagctcatccaacattaatgccaatcggacaacaggagccattccgaaagtgaaaacagctaacaaacccgctaaggagtcgggaggatcctccacggccgcatcgccaattttggataaaactacatccactggatcgggaaagagcgtaaccttggcgaagaaaacttctacagcagcagcacgctcgagctcatctggagataccaatggcaatgggactttgaatcgtatctccaagtccagtttgcaatggctactagtaaacaaatggctgccgctgtggattggccagggacccgattgcaaggtaattgacttcaacttcatgttttcccgtgactgcgtgagttgcgatacagcttcagtggcatctcagatgtcaaatccgtatggcacaccccgtttgagtggtcttccccaggatatggtacgcttccagagttcctgcgctggagcttgtgcggcagccggagcagcttctacaatacgaagagacgcaaatgcatcagctcgcccactgcacagcactttgagtcgcctgaggaacggtgaaaagagaaaccccaatagggtggctggtaactatcagtacgaggatccttcctacgaaaatgtgcacgttcagtggcagaatggttttgaattcggaagatcccgcgactacgatcccaattccacctatcatcagcagcgccctctgctgcaacgggctagatcggagagtcccaccttcagcaatcagcagaggcgacttcagcggcaaggagctcaagctcaacagcaatcgcagcagcctaagcctcctgggtcgccagatccctacaagaactacaaacttaatgctgataacaacaccttcaagcctaagcctatcgctgccgatgaactcgagggagctgttggtggagctgtagctgaaatagcgcttcctgaagtggatatcgaagttgtagatcctgtcagcttaagtgataacgagactgagacaaccagcagtcaaaacaaccttccaagcactaccaacagcaataatctgaacgagcacaatgattaaatgtggataaaataagttgcttctggtagatcagcgttgtagttaaaatatttaagtatggagttaaacttctctcaaactcataaattttgtacggcttttacgattttatattaaaagtaagctgggttttatatttatattcaaaagtgataccagtttatagtagaaagaccagtttttacttcagttttcaattcgctatgtgcaaggaatttttgtaagattttatgtctccagggacagagaacttttactgtgcggaatttctaattacaacgctgctctacaaaattggatctcaaaacaatacaagcataacgaatcgaccaaatgaacttcgagcaaaattataaattcattttaaaaatcaaaaagatatacacttaaacattgtagaatttgatattactctagaatcgggcgactttgtgtgaccagccaacgctcaagatcgtatattattatgttgcatactgtagttgtagttgaaacaagaatttttgtgtgtcatgtcgagttataggtaacctaagagccacatcatatcactctccgtaaccactttaagcaatatgcatttgatatgatagttccattatttttccactgcctactcaaatttccattaccccatggcatttggcacatggaccgcttcgtttcagtatgttaagttatggctttaaaccggaacaataatatttagccaactattgtacaagctctccactagaatcctattgtttaagtcaattagagttacaggtattatttacatgcatatacatatatacaagcgcatatacaatactccagatcggtacataaatataatcatacttacaaatgtattgagtttaactaattcataataaaatagttcaacg

SEQ ID NO: 16050 - protein, 689 aa, DROSOPHILA
MIALSALLTKYTIGIMSNLSNGNSNNNNQQQQQQQQGQNPQQPAQNEGGAGAEFVAPPPGLGAAVGVAAMQQRNRLLQQQQQQHHHHQNPAAEGSGLERGSCLLRYASQNSLDESSQKHVQRPNGKERGTVGQYSNEQHTARSFDAMNEMRKQKQLCDVILVADDVEIHAHRMVLASCSPYFYAMFTSFEESRQARITLQSVDARALELLIDYVYTATVEVNEDNVQVLLTAANLLQLTDVRDACCDFLQTQLDASNCLGIREFADIHACVELLNYAETYIEQHFNEVIQFDEFLNLSHEQVISLIGNDRISVPNEERVYECVIAWLRYDVPMREQFTSLLMEHVRLPFLSKEYITQRVDKEILLEGNIVCKNLIIEALTYHLLPTETKSARTVPRKPVGMPKILLVIGGQAPKAIRSVEWYDLREEKWYQAAEMPNRRCRSGLSVLGDKVYAVGGFNGSLRVRTVDVYDPATDQWANCSNMEARRSTLGVAVLNGCIYAVGGFDGTTGLSSAEMYDPKTDIWRFIASMSTRRSSVGVGVVHGLLYAVGGYDGFTRQCLSSVERYNPDTDTWVNVAEMSSRRSGAGVGVLNNILYAVGGHDGPMVRRSVEAYDCETNSWRSVADMSYCRRNAGVVAHDGLLYVVGGDDGTSNLASVEVYCPDSDSWRILPALMTIGRSYAGVCMIDKPM

SEQ ID NO: 16051 - DNA, 9320 bp, DROSOPHILA
tttccgacctggtacccgactatgtacaagcccaggaggtgggcgagggaaagcaagcaccaggagaatgttttccctacttcaaggactgtccgaagagtatatttaaggccttgtccagcaagtatagcaaaccagctcctgcgagcaagacgaaaaagacaaaacccacagacagaccggtgggcgaatatcatgaggagcaggtcattcaactgcccaccactcgggatcaggacaacaatgtgtatatgtagaacaatgaccaactcccatgcgaacccctattgttgacctcgtctagatgttaggattacgattgagttgagcgcgtcctcaaagtcacttgcttgtaattaacgtgtactaattaatttataattatttattttatttacgcattgtatttattgttagtcgtaggcgttgttaattgcttagatttgtatccatgtttgtctagtggtctgtaaataattgaaattgtggcataattccttcctttcaacaaatgaaaacgtgtcgaatgaatagaaaataaatttcccttgaaaggtgctttataattgttttcattcaaataacaacttacggcaataatggccaagatatgtacaacattgcgtttttagatttaaactggcgccaaaaacgacaactgcctgcattgcacagcactatcagcagttacaaatcaaagtttgaaaccaaattaaagtggttacactggcagctagatttgggtactctccatgtttttgtgaaagtaatatatgaagcaaaataatacttaacggtacttagtgctcggtttgtagttatgtaattacttaactaattgctcattttaaagggaagatttaaattcaaattttgtgtatttataagaagaagaaaaaggcacttctgacaactatcgagagtaagacatcgatagcgtaacgacttatcgaaggaaccgtcggtcgtcagaccatctctaggtcagctttgttttggttttgcagcgaaaaaaacatcagcgtcgtgagttctcttcgcttatttaccaagcctcccacaaacaagccagagcattacgtgttgcacagatgtttgcggatcgtcgaggaaatcaataaacgaaaggtgagtgctcctgggtgggggccagctggcgcttcagaaccgcgaaaaggcggtgctgtgagtcaggcgatgcgatcgctgattgaattggattatcacgataggagctcccatcaaattgccagccggcattgtagttgtttacattgcgcggacgtggcgcaatatatttttaatcttctgcggcaacctgctgattaagatacccccgaaccgtttcattgtatagataacttggcagttgaactccggagctggaagaggatggacacgaacgctggggagtcgctgggagcatcgccgccctcgagcaatgaggcagcggcgggatcacagtcccagagcgatgcctccgaggaggaggagtatctggacaacagtatcgaactgaggggctatctcagcaagtggacgaactacatctatggatggcagccacgctacatagtcctgaaggatggtacactctcctactataaatccgaatcggagtcggatttcgggtgccgcggagccatcagcctgaccaaggccaccattaaggtaggacggccgaaaagagagagggtggagctccttccccaagtgctttcaattggactaataaaaaagtaatgggcgtgagtgtgtgcgcatgtgtttgcgacacattaaccaacgatgaccgcgacctgaggtctccgtttccattcccaagccaatacacccattcccaatccaattccgagcgacgcaatcaatgcagcgcaatcaattaacgttgggcgaccaaaatagaccaaaattgaagtcatcaatgtaagtggggtacccctcagacctaggcgctgctagaaggccttctgttgacaggagggcgtgttgttctaggagggtgtttcgccatgagtgtgtacttatctatttatactgtaggagctgccaaaagcatatacacaatgctgactcactagaagcggcccttccattcattcgccttgactttgcgaacactgatcttattcaaagatattgaagcctcatttagttcaaagaatttttcccaacaatccaaataataattatcaccgatttaatcgatcatgattggattacttggattactttacagtgaaaccagctcacttgtagtttaagttactaataattggatttatttgcaagtgattcatttaaaattttaattaattttcacaaatttctcttagtgttttgactcattcaggttccactgtaatttccatttgccaacaataatcttgtattcgggtgttttccttgttgatttcatgtttaccactgatttgcgttccgctataatcaaccattcaaagttaattaggtttttttttcgtcgaatttattgtatttcgttttaataactggcttattactggcatgaaattttcatttaaaatataagtaagataaaccgtttatttgtacctattttgtgccttttactaagttcaagtttatttttcttttgtaggcccatgagtccgacgagctccgattcgatgttgtggtgaacaacttaaataactggtgcctgcgggcagagaccagcgaggaccgcatgcactgggtggatgtgctgcagctgtacaaggcggactccggcagcacggacaccacttccttgcgccgccatggcagtaccatgagcctgcaatcgaacactatctcgctgaccagcggaggaagcctaaagaagacgcagcgcaacctgcgcgaaaaagtcggcgagctggagacctttaaggatatactatttggacagatcgagactctgcagcgatactttgatgcctgctcggaggtgaacaaaaacaatgcgcaaccactggacctgggcgacggtctgaagtccatcgatttcaaggtaaagtagtgcacttatcgggccattggtatatgtacagtgtactaagcaaaacactcgattttctcagggcgaatccatcacgtttcgggccacaacgtccggcgtgctaaccaccctgcagcattgcctagaaatcatcgccgagagcgatgagtcatggaaacggaaactggagcgtgaaatagataagcgtcgacgttctgaggaccaaagcaagtaggttgacctagtcggaatagattcctacaagaagaagcaatttcaattaccttttttgtatttgcttgaaaaccatacgtttctttaaaaattatcatgctatttcatggtttaatttatttaaaaaaggattaataatgtatttaaatttaatgtgtacattcatttctgaagtttattcatttaaacgatattaaaactatggtaaaattctatgtttcttctttgcagaaagctcaaggatgaagttgagaaaatgaagcgtctatcgtatcctggcccagatttcgaggtgagttcaagtttacagctctcgtaaaagcaaaagcgtaatcgcattcacggtcattgctgctcaaatcggggccaaacacgttcccactgaaaatgcaaacaatcgccgaatgagtggcgcgaaattcgtataaacgatttgcgtgcgatttgtcggcgtcttaaaataaactgcctgattcgacgttgtgtcagagatttcatcatatgcaaggaaagtagaacacgctggactattattcaagcgttttcaattcgattatggaatgccagtatttggttccgaattttggctgacacgaagttcccgtgttcgtgttaatctggaattggtcatgcaatatcgtttttccgcttacatttgtttgcccaatcaattccattttaatggcatatgtccacaatagcattagaaaaatgatgctctcctacgaattgtaagtgctcaacttggttgttattcttggctcggttacttggcgactactcaggctgaaagactgggcgtctagacggtttcattaggcctgtttgacagttgggcgtagcttaagatctacttcgagccaatattgcagatattgacgttgaataacgatccaaccgttggctagaatgcactttgtgcaacgggtatattaactattacgtcttcagtgatcttcatatgaaaattttgttagaaaatcccgatttaagtgaacaatatatagtaaacatgtacgtgatctttcactatacgttcaagcttagagcattcaatatgcggctcactttttgagctgtggcttttagcctggcttacagctgtcaggtttatggcttatgagctaggctggtcagtcggcggttagcgatcgagtggccaacacgtagcaattataaacaaatttgctaggcaaacaattcaaaacgagactgtttctttttcatattggtcgtggcatttaattgagtgtgcagattgtgaaatttcttgcgttgcattgaaagagctataataaataaacaagtgtacacaattgtagcaatcgctagttcatgttgcaaatataaaagcgccgcacgcatcactgtacaaatatacaaatttataaaattataaacaacgtcaacgctatgccctcggcgcgatttctgtggcgctccggcggatttcagaagggcagcgttaaaaaaataaaggtacactgaattaaaatcataaataatttacataaaggagtggtggaatatatttttataatatgtgtttcgtatggaaatatttcaaggcgtattatcacttttataaacaataaacgtttcaatatatctccaaataaaatttgataacacttttagtaattttgaattttttttctatgtgcatatatagctgataaaaaatattaacaaacatcgttgtgtttttgaaaaatttctaatcagctatgaatgtggaatgtcaaatatttttttattatgataaaagtattagttcggaagcattgctttgataaaataatggtatttttccttagtgtatgaaatgttgcctaaaataagtttcataaaatgttgatgttggttttttctaaccaaattggcctcattagtgggccaccccactcgcttttgaatgttgaatgtttgaagtgcggtggccaaagaaccccaagaattgatttattatttaaatgcaagaaatcctatccattggagctttttgctctgtgcgcttttcgctttttactctcagtcgcccgctttctcctgctctctttttttggccttctctctgctccgctcatcctggccaagttggccagtgcgtttgggccaccagcaacagtttgttttgtgtccttgtgctcgacggaaggattcgccaggacacaagtgcgctcacttttcctgctttcgcctgccacgcaaccctttctctctctctctttggctctcttgcggtgcgattcctgattttttcctgctgagaaggagcctaatttttgccgcccaaaaacctcttcgcttttgttgggttcaactgcaacaattggtggaggagcctggtaagaggagacatagcgacgccacaggaataagtacgcatatagcccatgtcttcattgttggttagctgcgagtgccgcttggtcaagatgattatgcactcgaattcacgccgcagggtgtatttatttcaccgcctttggctgcgcacatctctgctttaattaataaatatcaattcaattccgcacaaattccattcgaggcatttattttgcgccggttgccgttctggggatacacgcgccagtcgcagacgtcagaatgtgtacagtgaacactggctagcacagaatggagcggatgtatacctctaaagggccgaacttcaagggacacttttcctatatatcaatcctaatttcagcataatattctaaatactctcaaaatattatgattttgtttgtatattacagtagcaatttggtaaactctgttgcgaaattcgaaacacattgttaggaggaaaagaattttataaatggcaaatttatcaacttaattaaatttcggcagtattattgtgtagcttattggtggtttttccccacgagatgccactgctttaatgggattcagtaccaagtaccaagccccgtctggcggtcttctgctttcgtattcatggcacaatgatgcgcctttgtgtccattatgctcgcccaattacgcatgccagccgactacgagaatctccgcctggcgactggtcagggtatggaatgggcgaaaaaacaacagcataaatttgattttcttgggccatttggccgcacaagtgtcggcgattaatttatacaaagcacgttccatttctttccaattggattgaatgcggtttcgtcattaaaattaattaggccgaaccttcaaagatgcttttgggctaaacttgacttagtttgctcgatgctaatggagatatatgtataatatgacatttccctttcaatttcgcaggagggtccacattccacattgcccgaggatgagttcttcgatgcggtcgaaacgggcctggacaaaatcgaggaggacatgcagctgcgcttcaagcttaagctgcagtcccagatctcccagacactggtcaacgttccacacgaggcggtggccgagggcgaggaggcgcgcgaggagttcggcacgggtgcggaggccaccagccatgccctgtggccggaggtaagaccggaaattgccaatctggccccctaacgaccagccaataattggatttatcccgcagatcgatcgcgtgtgcaaggagcaactgcattacgcacgcgagggcgttggccaagacggcaacggctggcaaatctttgccgacgagggggagatcaaaatgtacaaacgcgaggaggaggtcaacgggctggtcatggatcccttgaaggcctatcatacggtgcagggcgtgacggcgagggaaatgtgccattacttcttcatgcccgagttccgaaatgactgggagagtaagtaattgcaataaactgggttttccctcaatttcttttggtttaaagcacgctcaaaagaaacagtggcgtgcgcatagataattcataattttctacaaacaactcacatgttgcagctatacaacttgttgcttaaactttttattctatagccactttggaggactgcaccatcctggaaaaaatctcggcggacaccctgcttttcctgcaaacccataagcggatatggccggcgagccagcgtgatgcgcaattttggtcgcacatgcgcaagatcacagacaatctggagccgggcgcccgggacatgtgggtggtgtgcaacaactcgacggagtacgccaagcaggagtcaaagaatggaaaatgcgtacggatcttcctgaccgtcatcctggcctgccaaactcatttgcccgagggttatgtgaagggacagcccctaaatcgcaacgatctaacctgcaaaataacctactgctctgttggtgagtacctttgtcctcgaattatattaatccatttaatttgtgtggttttccatattcagttaatcctggaggctgggcgccagcgagtgctctgagagccgtctacaagcgcgagtatcccaagtttctgaagcgctttacgggatacgtaatagatcagtgcaaggacaagccgatcatgttctgatatttgccataagcaagaaagcaatcaaaaccaatcaaagctgaatcgtctcacgtatttagctcaaactttatccttaataagcctccagtttgtggcctcaactatattttggaatctgttttgctactccttactacaattttataaccatttcgttgagtttcacgactttggttcttctgtacaagagtgttttccaagcgaaatgttagaatccccttttgtatttgcgctaaggcaaccaagatatagtgtaaccaatttagccgtaagttatgtgtaagtgaaacacaatcattgtatagatcttagttccaaaactttctatctgtagtgtatatctttatggaaatgctttaaatgcaacaattgcaagaatgatgtgagggatgcatagctacatatacgaaagcttttcttttggtgtgaatctatattgtatatccgcatacgtatgagacgagtatatatatatattcccatattcccgcccagaaacatcggttttactcaaaactgtcaagtgtaaataaatgcgacttactgttatctctgaataaaagatcgaactttacttggtttttatcatatgtcatgtcatgtatttgaagttttccatagattccgcgaactattttcaatgtacataaattgtgctgttttagaagaaatttcgtgtgtaattttacaacttgcttgttttctttttcttaatcgcaatgtgccaaaacaccttttttcaaatttacaaccgagtactgcagttgaagtgtattaaatgcttacaattttttttttttttgtttttcttgtgcagtctgaaaagttgccaaatgtgttctcgattctaattaattcgttcaacttcaactttataagtttatcatccacgactggaattacgtttacaatctttggtttttcgcgttaatgcttttcatatgtgtgtacttgttgtgtcatattgtcatgtaattggttgcttggttgttgtttgtcgttatagtagctattggaaaatagagttgatatatatgtatgtatatgtatatcgcgtgtctatatggtacaggagcagtgtctgtgtatcggatgtgtatgctatttggcaaatattcggctatatctgtgggtattgttggtattgggtctagttttgagcggtcgcttagtttcggcttgtggaaatgcatgctggtttggctttcggtaatatcatcctctaacatttaatacgttcatatgctcggttttgttgtataatacgatttttagaagtaattgtatgacgcttagctatgtacaacagtttcataaactatccgaatgcattcgtgttattgtatccccgtaaattaatttattttcatttttatttatttaaataactagctaacagttgtgaagtattctggtcgcaaacacttacaaactgatgcaaaacttgaaaactggaaacaaacaatgcagttcaacgaaatgtccataattcactacaaatgctaagattttcggcattctcttcaataatcgcctggcacgaaggcccttcgtttatagta

SEQ ID NO: 16052 - DNA, 2534 bp, DROSOPHILA
tttgcagcgaaaaaaacatcagcgtcgtgagttctcttcgcttatttaccaagcctcccacaaacaagccagagcattacgtgttgcacagatgtttgcggatcgtcgaggaaatcaataaacgaaagataacttggcagttgaactccggagctggaagaggatggacacgaacgctggggagtcgctgggagcatcgccgccctcgagcaatgaggcagcggcgggatcacagtcccagagcgatgcctccgaggaggaggagtatctggacaacagtatcgaactgaggggctatctcagcaagtggacgaactacatctatggatggcagccacgctacatagtcctgaaggatggtacactctcctactataaatccgaatcggagtcggatttcgggtgccgcggagccatcagcctgaccaaggccaccattaaggcccatgagtccgacgagctccgattcgatgttgtggtgaacaacttaaataactggtgcctgcgggcagagaccagcgaggaccgcatgcactgggtggatgtgctgcagctgtacaaggcggactccggcagcacggacaccacttccttgcgccgccatggcagtaccatgagcctgcaatcgaacactatctcgctgaccagcggaggaagcctaaagaagacgcagcgcaacctgcgcgaaaaagtcggcgagctggagacctttaaggatatactatttggacagatcgagactctgcagcgatactttgatgcctgctcggaggtgaacaaaaacaatgcgcaaccactggacctgggcgacggtctgaagtccatcgatttcaagggcgaatccatcacgtttcgggccacaacgtccggcgtgctaaccaccctgcagcattgcctagaaatcatcgccgagagcgatgagtcatggaaacggaaactggagcgtgaaatagataagcgtcgacgttctgaggaccaaagcaaaaagctcaaggatgaagttgagaaaatgaagcgtctatcgtatcctggcccagatttcgaggagggtccacattccacattgcccgaggatgagttcttcgatgcggtcgaaacgggcctggacaaaatcgaggaggacatgcagctgcgcttcaagcttaagctgcagtcccagatctcccagacactggtcaacgttccacacgaggcggtggccgagggcgaggaggcgcgcgaggagttcggcacgggtgcggaggccaccagccatgccctgtggccggagatcgatcgcgtgtgcaaggagcaactgcattacgcacgcgagggcgttggccaagacggcaacggctggcaaatctttgccgacgagggggagatcaaaatgtacaaacgcgaggaggaggtcaacgggctggtcatggatcccttgaaggcctatcatacggtgcagggcgtgacggcgagggaaatgtgccattacttcttcatgcccgagttccgaaatgactgggagaccactttggaggactgcaccatcctggaaaaaatctcggcggacaccctgcttttcctgcaaacccataagcggatatggccggcgagccagcgtgatgcgcaattttggtcgcacatgcgcaagatcacagacaatctggagccgggcgcccgggacatgtgggtggtgtgcaacaactcgacggagtacgccaagcaggagtcaaagaatggaaaatgcgtacggatcttcctgaccgtcatcctggcctgccaaactcatttgcccgagggttatgtgaagggacagcccctaaatcgcaacgatctaacctgcaaaataacctactgctctgttgttaatcctggaggctgggcgccagcgagtgctctgagagccgtctacaagcgcgagtatcccaagtttctgaagcgctttacgggatacgtaatagatcagtgcaaggacaagccgatcatgttctgatatttgccataagcaagaaagcaatcaaaaccaatcaaagctgaatcgtctcacgtatttagctcaaactttatccttaataagcctccagtttgtggcctcaactatattttggaatctgttttgctactccttactacaattttataaccatttcgttgagtttcacgactttggttcttctgtacaagagtgttttccaagcgaaatgttagaatccccttttgtatttgcgctaaggcaaccaagatatagtgtaaccaatttagccgtaagttatgtgtaagtgaaacacaatcattgtatagatcttagttccaaaactttctatctgtagtgtatatctttatggaaatgctttaaatgcaacaattgcaagaatgatgtgagggatgcatagctacatatacgaaagcttttcttttggtgtgaatctatattgtatatccgcatacgtatgagacgagtatatatatatattcccatattcccgcccagaaacatcggttttactcaaaactgtcaagtgtaaataaatgcgacttactgttatctctgaataaaa

SEQ ID NO: 16053 - protein, 601 aa, DROSOPHILA
MDTNAGESLGASPPSSNEAAAGSQSQSDASEEEEYLDNSIELRGYLSKWTNYIYGWQPRYIVLKDGTLSYYKSESESDFGCRGAISLTKATIKAHESDELRFDVVVNNLNNWCLRAETSEDRMHWVDVLQLYKADSGSTDTTSLRRHGSTMSLQSNTISLTSGGSLKKTQRNLREKVGELETFKDILFGQIETLQRYFDACSEVNKNNAQPLDLGDGLKSIDFKGESITFRATTSGVLTTLQHCLEIIAESDESWKRKLEREIDKRRRSEDQSKKLKDEVEKMKRLSYPGPDFEEGPHSTLPEDEFFDAVETGLDKIEEDMQLRFKLKLQSQISQTLVNVPHEAVAEGEEAREEFGTGAEATSHALWPEIDRVCKEQLHYAREGVGQDGNGWQIFADEGEIKMYKREEEVNGLVMDPLKAYHTVQGVTAREMCHYFFMPEFRNDWETTLEDCTILEKISADTLLFLQTHKRIWPASQRDAQFWSHMRKITDNLEPGARDMWVVCNNSTEYAKQESKNGKCVRIFLTVILACQTHLPEGYVKGQPLNRNDLTCKITYCSVVNPGGWAPASALRAVYKREYPKFLKRFTGYVIDQCKDKPIMF

SEQ ID NO: 16054 - DNA, 2424 bp, DROSOPHILA
tggcaaacaataaaaaatgcaaaaaaagccaaacgaattggtggactacatttccatgtttggggcatttggcttaaacccccggcgaatttcaagtctcaacttgaaatcgtcatggacatgcagatcaaaaagctggccacgttttttttttttccaaagacttgggtcagagtgtcaaactggccaaatgtgagactgaaaccacttagacgacagctgcagcgaaaaatatatgcgatcgatccattaatcacacccaatatgattatgcatagggcccgcaacgggtcttgggtggaatgtcatactcgtctaactggcgcaattagatcagctatgcgaataaaaaaacaagagcaattttcatttgaagaacgggcccttcacctcgactccattagagcttcattagcaaagcggctggcctaaaacatgcattatggccaaccaattccattgaactgatgacgaaagacccagcgttttattgcacattttgagattttcatttcgatgaccggcaaacacaatgctggccaatttttttagggcgtgctccgtctttctattctactttttagccattgtttcgctttggcaagtgggcggggcgctctagtaataaccatcttgtcggtttggtaatgatcggtcagtttatcgcccgcaaatcgaataattggcgcaggttgttttcaaccacgccgcaattatgcaaattttccaaacacatttaccaggcactgcatctgaatacaaaatgaaccagctcttaaaaaaaaaataaaataaaattgtatcaaattttgtgaattttttggcaaggacataaatcgtgcagtgtgtggtagccttttaacatgtctaaaatctaatagctaggaaccctttgctgaaaagtcaaatcatttttgacagcactccgtttaataactttgtacgagaacgtaaaattgtcgaatttttagaaacttgcatttcttgttttatttttctaccaacaaaatgagtcaattgattgccaaggcaaagaccctagtaaacagtaagatgcgcacttctagtctggccaaaatgtaattttatggtattacgcagaaatgattgtggcagcacgtccgcagctcgatgaattctggaagtatgccaaggtggagctatcaccgccgctgcccgctgatttccaaaagctgaagcagaccgctgagtccgccaagttggcctccaaaaaggatatgaaggggcagctaaagaagtccggactttcccaagtgacagtcgctgaggcctggctaaatgttctggtcaccgtggaggtgattacctggttctacatgggcgaggttatcggtcgtcgtcacctggtcggctacaaggtttagacatagcagatttaatattctccttatgtttttgtgttgtatgcaaatggcccagtgcatttaagccctttttctgtggccaggtgcactgaataaaggtgcattatcaagcattacaatcatgggcgtagctgtttatattgttttttccctagaaattcgctttatgttctcgtccgtcgtaaacgtcatatatagctcaatttatattctgtatgatattcattttagaaagtttaatggtctaagtggtaagatatcgaatatttcataacttttgcatttggcaagtaaagttgtttagtgcttcctaatatatttgcatacataaattcccagtgaccaggtgcgcaacatgtgaactcccactccgtcatttaacagtgccccgcctcaaattccggatacccaatggcccggcatgagcaacgtgctcatggcagatctgagtctcgctaagctggcattgatcttggacatggagttctcatattccgctgcgaggcgagtgcgcaggcgtccgagcggcaaagcgttgggttcctaaggcggcacgacagcggacacgggcggcagtccggtcaagtggcataaatcagattgacgccgtggcagttgcacaagccaaacaatggcaaccaacgtgtgccccaagttgaatgtatgtaactgtattacaaataactttaaataatacaatagtatgaacaaaagacaaccttccaaaagtactttaatacttataaattaccatttttggaagatcagtatatctagtttgaattcctctaaatctaagcattataattataactacactatgtatttgtctgactgtatttcaaatttaagcgcttgtcccaattttaatggcattttaataacaaaacatgcctgctggcaccgagcaccaggctttgttgcaatatcaccgaacgattgcatcatgctaaggctatatgctgggtccttatcacaactccccaaacgactacgcccacttttggtcagatggatacgaatttcgtattaaaatcgc

SEQ ID NO: 16055 - DNA, 371 bp, DROSOPHILA
ccaacaaaatgagtcaattgattgccaaggcaaagaccctagtaaacaaaatgattgtggcagcacgtccgcagctcgatgaattctggaagtatgccaaggtggagctatcaccgccgctgcccgctgatttccaaaagctgaagcagaccgctgagtccgccaagttggcctccaaaaaggatatgaaggggcagctaaagaagtccggactttcccaagtgacagtcgctgaggcctggctaaatgttctggtcaccgtggaggtgattacctggttctacatgggcgaggttatcggtcgtcgtcacctggtcggctacaaggtttagacatagcagatttaatattctccttatgtttttgtgttg

SEQ ID NO: 16056 - protein, 93 aa, DROSOPHILA
MIVAARPQLDEFWKYAKVELSPPLPADFQKLKQTAESAKLASKKDMKGQLKKSGLSQVTVAEAWLNVLVTVEVITWFYMGEVIGRRHLVGYKV

SEQ ID NO: 16057 - DNA, 4072 bp, DROSOPHILA
gcaatcagcaatcgaaagttgatctatgccgaggcacagtattaatgaccattccaatgacaaaaggacaatgtcggtcgtcggcacgccaaagtcaaaagcaccgcattcccacaggacattcattcattcagttgggtaaacattcaaacgaacccgatggccaacacttcagctctgagtgacggaatgacaggctgatggacagacacagaccccgggcgcattaatagagtcaatagagagacaatagttgaaaattaacaaatgaattgaaattacttaaacaaactcattagacgcgggccgtgtcagaccggagcacccatctccggggacttcctgcgaacagtattaatattctggcacaaatgtgtcgccatcgcatgtaattaaattttccaaccttaatgtgctaagcattgtaattttctccccctcccccgacagccagtcacgagtttaaattgtcagaaactgtgacagcccgacaccttttcgcccaggtgcagaggaaaccggcgaggcgacaagccgcatatctataattttcattaattttaattggctttcggcgggggcgcaacgtcgctcaattacaatgttttcaaatttttattgaattttaaacttgtacaggactttctgctcgccaaagggttcaacgaagtatttcaggcaattaaatgagcatatttaaattcatgattgaatggtgaataataagaaaggttttatacatcgactttagaaggatagacagtaaatatttttagaaaaaggatgaattcctgttgccatttaaaaacaaattaggtttctaacaaagtaggcttgagctgactgccttaacagaatgacacaaaccttttaaaaccttctgtttgcataccttttgaatatttttcgaaaatttgggaagcgttgggaaaacggcgcgacccctcaaaattcgaaatttttgttgtgttgctgcctttaattaaaggtccgattaactatgtccaagttgggtgccatcctggcgcaaagtgctgttcatctcagcgagcatcggcagcttttgagccaggccttcttatcatctatcacctatcaacggagccgggtcaaggttcgcggaaaccactgttgcgcaatgaaggtggtaccatctcgcgcggagcacgtaaatgcactgaaggccgaggagttcgacgttctgatcatcggaggaggagccgtgggttgtggttgtgctgtagacgcagcgtgtcgtggtcttaaaaccgccttaattgaggcagaggattttgcaagcggctctagttcgcgaaccagtaagctgatcgatggcagtggttcatatctgggcactgccctccgggagaaggatgtcgaacagctgtacattatgctgcaaatgatgagtgaacgggtgaccatgctgaagaacgctccgcatctgaaccgcatccagcccatgatcatacccatctacagttttttgcagatgccctgcacctggctgggattgaaggtaggttgacgagctaagactggttgccacaagtatgaaatatatattccaaggtttacgactggatatcagcagcatccaatatccgcggatcgcacatcatctccagggaggccaccatgtatgagtttccgctgctaaaaaccgatggccttcgcggtggcgtcgtctactatgatggtcaggtggatgatgcccggatgtgcgtcgcattggtgatgaccgcggtggccctgggcgccaatgtgggcaaccacatggaggtggtggagattatgccacaggagggatgctgccgagttgttagcgttaaggacaagatctcctgcgagcagttctacattcagtccaaggccgtgatcaatgccacaggctccagcacagatgccatccggcagatggacaaggagggaaccgcacccattctattgcccactctggaaacccaagtatccctgccccgctactttggttccggacattacggtttgttgagtccggctctgaaaaatgatgatctcactgtatatatggtgccgtttgagaaccacatggttctaggcagtcgcgaagtggacctcgatgaagtgtctagccgtggaagtcccactcccgatccagatgacgtggattgtctgctagaagcagccaagaaaaggatggatccctgcgtggagctggggcgctgtcacgtccttagtgcctggacggcgatcaaggccagtgtgagctgtccaaccgacaaggaaaatgatgatgacaagcgtggaacaccgatcaacagctatatgatcgaggttagtcccgacggtcttatcacgctggccggcggacggtggagcagttaccgcgtgatggcagccgatgccgtggatttggccattaaatcttgtggactatgcgacgatcatgtgacctccagttggacacaggacttgaagttagacggagccgaatcatggtgttgcatgctgccgctagaattcgtgcaggactacggtgtgcccatggacgtggcgcatcatatctccgattcctatgggtacaatggacatgcactgttctctcaggctcctgatctgaagaagcgcctccatccgagcttcccctatatagaggcagagattcagtatgccatgcgaaatgagtacgcctgcacccttgtggacatcatcgcacgacggttgcgcatagccttcgtggatgcggccgccacgctgcacatgctgcctagaattctcaagatcatggccggcgagaatggttgggatgaggaagagcaaaaggagcagatggtggcggcccaggagtttctggtgcgccaaatgggtctgggatcaatagtccaacccaggagcaccagcaagagcaagccgaaaaagaagggctcctcggagggatgttgctgccgggcggcagttcgcaggggggccaggagctactcgatggaaatatcaaagaagatttgcgttcaacccttggtccaacatagatccatgtctagcatgttcttgccccttatgacgagcttaagttatggactcggacgctaatcggttgacatcggacagaaagcgttaactagcacttggcgcaacaaattcatatggtgaaatttttaaatagccaacgtttcgttgcgtgtgggtctttctataccattaaataaagttgggaacaaaaaaagcaaaaagcaatttattactacaagaaaccttgatcaccatatccacccaggtgtttttcatttcaatttcttattgttggatgtcctgaactcctcggatctttagcacttcatagttcatcgtctcttaaattcttaattcccagagaaaataggatcttttattatattggtagttcctgattatcaagtatcatgcggaagatcctgatttacccgcactgaatgtttcccgagatcttgttatgcgtaattcctagcgatattatataaaaaaataaatgaaatactcagcagctctataagtggtattaaaattaacaaatttgggcaattttcctttctggattcattgagcaaattaaacaatgatgcatcgatttttcatttgggcacttccataaatttattttaatcttcgtttgtcatttgttattataaattagggtttttttttgtcattttgggggcgataattttgaattattgttattggagcccaaaaaccatttcttcttgtttgcgattcttcgaatacgcttatcgttcatatattgctttttatttattggctgattggggctggaaaatgtgaatacgcattgtgggtggcattttgtaagtagctcatttttcctgccacagctcgttagccatgtaaatggggtttttatggtcgcatttttaaagagcatcaacgtaattatgaaattaaatgaaaatgtaccatttttaaatagcagcattatgcagtagtaaaaaaaattgtttaatttcatgctttttttaattttcaagttgctcgactggctgcacatcaaatactctacttgttgcagacatatggttcacacatcatttatgca

SEQ ID NO: 16058 - DNA, 2019 bp, DROSOPHILA
atgtccaagttgggtgccatcctggcgcaaagtgctgttcatctcagcgagcatcggcagcttttgagccaggccttcttatcatctatcacctatcaacggagccgggtcaaggttcgcggaaaccactgttgcgcaatgaaggtggtaccatctcgcgcggagcacgtaaatgcactgaaggccgaggagttcgacgttctgatcatcggaggaggagccgtgggttgtggttgtgctgtagacgcagcgtgtcgtggtcttaaaaccgccttaattgaggcagaggattttgcaagcggctctagttcgcgaaccagtaagctgatcgatggcagtggttcatatctgggcactgccctccgggagaaggatgtcgaacagctgtacattatgctgcaaatgatgagtgaacgggtgaccatgctgaagaacgctccgcatctgaaccgcatccagcccatgatcatacccatctacagttttttgcagatgccctgcacctggctgggattgaaggtttacgactggatatcagcagcatccaatatccgcggatcgcacatcatctccagggaggccaccatgtatgagtttccgctgctaaaaaccgatggccttcgcggtggcgtcgtctactatgatggtcaggtggatgatgcccggatgtgcgtcgcattggtgatgaccgcggtggccctgggcgccaatgtgggcaaccacatggaggtggtggagattatgccacaggagggatgctgccgagttgttagcgttaaggacaagatctcctgcgagcagttctacattcagtccaaggccgtgatcaatgccacaggctccagcacagatgccatccggcagatggacaaggagggaaccgcacccattctattgcccactctggaaacccaagtatccctgccccgctactttggttccggacattacggtttgttgagtccggctctgaaaaatgatgatctcactgtatatatggtgccgtttgagaaccacatggttctaggcagtcgcgaagtggacctcgatgaagtgtctagccgtggaagtcccactcccgatccagatgacgtggattgtctgctagaagcagccaagaaaaggatggatccctgcgtggagctggggcgctgtcacgtccttagtgcctggacggcgatcaaggccagtgtgagctgtccaaccgacaaggaaaatgatgatgacaagcgtggaacaccgatcaacagctatatgatcgaggttagtcccgacggtcttatcacgctggccggcggacggtggagcagttaccgcgtgatggcagccgatgccgtggatttggccattaaatcttgtggactatgcgacgatcatgtgacctccagttggacacaggacttgaagttagacggagccgaatcatggtgttgcatgctgccgctagaattcgtgcaggactacggtgtgcccatggacgtggcgcatcatatctccgattcctatgggtacaatggacatgcactgttctctcaggctcctgatctgaagaagcgcctccatccgagcttcccctatatagaggcagagattcagtatgccatgcgaaatgagtacgcctgcacccttgtggacatcatcgcacgacggttgcgcatagccttcgtggatgcggccgccacgctgcacatgctgcctagaattctcaagatcatggccggcgagaatggttgggatgaggaagagcaaaaggagcagatggtggcggcccaggagtttctggtgcgccaaatgggtctgggatcaatagtccaacccaggagcaccagcaagagcaagccgaaaaagaagggctcctcggagggatgttgctgccgggcggcagttcgcaggggggccaggagctactcgatggaaatatcaaagaagatttgcgttcaacccttggtccaacatagatccatgtctagcatgttcttgccccttatgacgagcttaagttatggactcggacgctaa

SEQ ID NO: 16059 - protein, 672 aa, DROSOPHILA
MSKLGAILAQSAVHLSEHRQLLSQAFLSSITYQRSRVKVRGNHCCAMKVVPSRAEHVNALKAEEFDVLIIGGGAVGCGCAVDAACRGLKTALIEAEDFASGSSSRTSKLIDGSGSYLGTALREKDVEQLYIMLQMMSERVTMLKNAPHLNRIQPMIIPIYSFLQMPCTWLGLKVYDWISAASNIRGSHIISREATMYEFPLLKTDGLRGGVVYYDGQVDDARMCVALVMTAVALGANVGNHMEVVEIMPQEGCCRVVSVKDKISCEQFYIQSKAVINATGSSTDAIRQMDKEGTAPILLPTLETQVSLPRYFGSGHYGLLSPALKNDDLTVYMVPFENHMVLGSREVDLDEVSSRGSPTPDPDDVDCLLEAAKKRMDPCVELGRCHVLSAWTAIKASVSCPTDKENDDDKRGTPINSYMIEVSPDGLITLAGGRWSSYRVMAADAVDLAIKSCGLCDDHVTSSWTQDLKLDGAESWCCMLPLEFVQDYGVPMDVAHHISDSYGYNGHALFSQAPDLKKRLHPSFPYIEAEIQYAMRNEYACTLVDIIARRLRIAFVDAAATLHMLPRILKIMAGENGWDEEEQKEQMVAAQEFLVRQMGLGSIVQPRSTSKSKPKKKGSSEGCCCRAAVRRGARSYSMEISKKICVQPLVQHRSMSSMFLPLMTSLSYGLGR

SEQ ID NO: 16060 - DNA, 3490 bp, DROSOPHILA
cacacgcggttcatttgcagcttcagatatcgctcaacggtgtgaatgaccaactgcactcgcttggcgatctcggcgcgcagaacaacccgcttgacagacgtatgtatgacctgcgcttcctcgggaatggcggtcagcacctccagcatgatccacaattgcacatcggcgctgacatttggcatccgttgattctgaaacgtgttgatcacctcctcgatggcgccgggccattcgcccagcatgtgaacgatgtaagcgcccagcgagatgcacaaccgattgaggacgatcttcggtccgccagcgaagcgaacgatggattcgagtatcttttgctttaactcctcgcgattctctggcggcacttcgtgccagtgcttcataagcttggagtgcagcgtgatggcgccgaagaactgcacctcctgactctgtgtgggcggtggggtgattgggtgggcggtaggtgcatgagtatacatatccgggtaattgatgcattgatgcgcaggtcctgcgtggtactcaccttgccgagctgcattagctgccaggaaaactgccaggcctgtggactggcctccgcatcggtaagccattcatgggtgatcgcctggttctgcgagttcgagcggtagaacgacacgaccgcctcctccagacgcgcaatgtcaatgggctccatgtggaatggctgctgctgctgctaatgctgctgctgccgagaggcagtctcctgtccgctaatcctcgggtggtggttttctttgcttctgcctgtgggcactggattcgcgagtgtgaccaacgcgcgaagtcaccaattcgcggacgggccgagtgtgcggtcactccattttcgactttgccgcgctttttttcctcctgtattttttataaaaagtgttgaaatgtacgtatttaataataaataaatatgtaatatagtataaattgcttgtggcctatatgctcgatatatgcaggaaaaattcaatttataacaacatttattcattcgtacacttcataaaattttactatttctatttagtaaatactctctgcaattgaggagtatcttaacaagttaacagtgaatttggaaagcccaaaaagtcctatataaaatcgaatttaagttgccagaaacagtatcgcaatttggaacaccggtcggcgatgaaatccctgctatcctcatcgatatacacctcaataaggacgttgtcgcagaattgagcgacctgcctctccacgtcttggcagtccaaagtggagcgattaacgacggcccatctgtcggtattcaagcccgggttctgtgactccagtaatgcgaagatcacacagagcgacttattcggactgaccaagggcaggacaaaggtcgtcctcactagatcgaagaacttaatgaagggctggcaggagtggggcggctccacaccttcgactgcttcgatgacccattgggccgtttcgttatcctcgcagaccaccagcatgttgcagtcgaatgtctgcgttgaggcacactcactaaaattgagatcgctgacgctcgatccactgtcctcgaatattgaatgaaagtgctccattagggcgatagtgtccacaccatccgagcacgaactctggttagttatcaccaaggcgtaacgtcggttctcgggcattgtgttcgcatacggcggccgagtatccctcttgcgacaattctttggcgtgcagcagtccttcttcctctccttgcactcctcggcctgctccactgagcagcttgtgcggctggtctccgtcttgcagcagttcatcaggtggatcttcgaaccaaatatggaagccatgctgccggctcgtttgtccgcgagcagattctgctgcggaaccaccttgaccacgctgttctcttggttgcttcgtattctgtgaatgaatcagttgggtatccctatcatttacatatatagttattacacacaacacacaccttttggcagccgattcctcatcggaggcgcacactctcgtctttcgcgctacggagctggcgctcgtgcttgcggattcgaagctggcgttcgtctggttcgacgcactggatgcggaggaatcttgcgagttcgaagcctcgcaaaactgcggaagcctgtccactggcagaagcatagagctcttcggcatgttaaggaaatccagttggctcttgccctctggaattgtatagaattggagaaatcctacaaaggaattttcgtggtacagcgaaaaggctgtaccattaagcgttgtcgacggataagtataatcgcttttatccggaattctgagcaaatttgtaataaactcatcgttttccagagacttgtgaaaactctgtacgtttaggcgagccaagggaagacctacttttacctccagtttttgcttcaattcaccaatggtcgcattattgtggagctcgaacatttccggcatctgtatgggattgagaaatgaaaatatgtatttattaaatttaagcttcaattattatagctccatttataagccacaattgtaaaatatgtgcgggcttaagataactgcataccacacttgtgtttccctcggcatctaatttcactttgacgaacattttatgtaagagaagatattaaaacttgaattaacaattggtaatatacaaaataagtgtgtctctcaaaatagaatattcaagatgttgatgcgcttttttattggagaatctttagaaccgttatgccaaagctttcgttttacagtatgcttggcactttacgacactgaatgctttgaacgatgaaccagtaataaataagataattatgtaaggtagtagttacctttccatcctccttgaggtactttgattcaatgtaagctagtacaaacaccattttttttaaagtttaaaatcaaaattattaatttaacgaaaagagttaaaaacacttttggagatcttgtataaaatttaatattgtaaaatatctcactcgaattttgacttgacactgggaaaatggcactctgcaacactggttttgcggcattactgtttacgaattgggtggaaagcgaaactgagtttttttgttgactgaaaagcaatgaaataaccaattgtaatggcgggtaaacgtgttttggtcatcgataatggatcctacgaatgccgcgtgggctggagcgactccaaggagccggacttgcggttccgcaatgtgctgaccaagccgcgcaaggatcgcaaaaaggaagcagctgcttcggagggatccgcatcgcagacaacagtggagcaatctgccgagatccaggtgggcaatgacatcaccaacatcgaggcggtgcgtgcgcatctgaagagtccattcgagcggaatgtgataaccaactggaatcaccaggagcagatcttcgactacatattcaccaagatgggattcgatgg

SEQ ID NO: 16061 - DNA, 1360 bp, DROSOPHILA
atgccggaaatgttcgagctccacaataatgcgaccattggtgaattgaagcaaaaactggaggtaaaagtaggtcttcccttggctcgcctaaacgtacagagttttcacaagtctctggaaaacgatgagtttattacaaatttgctcagaattccggataaaagcgattatacttatccgtcgacaacgcttaatgagggcaagagccaactggatttccttaacatgccgaagagctctatgcttctgccagtggacaggcttccgcagttttgcgaggcttcgaactcgcaagattcctccgcatccagtgcgtcgaaccagacgaacgccagcttcgaatccgcaagcacgagcgccagctccgtagcgcgaaagacgagagtgtgcgcctccgatgaggaatcggctgccaaaagaatacgaagcaaccaagagaacagcgtggtcaaggtggttccgcagcagaatctgctcgcggacaaacgagccggcagcatggcttccatatttggttcgaagatccacctgatgaactgctgcaagacggagaccagccgcacaagctgctcagtggagcaggccgaggagtgcaaggagaggaagaaggactgctgcacgccaaagaattgtcgcaagagggatactcggccgccgtatgcgaacacaatgcccgagaaccgacgttacgccttggtgataactaaccagagttcgtgctcggatggtgtggacactatcgccctaatggagcactttcattcaatattcgaggacagtggatcgagcgtcagcgatctcaattttagtgagtgtgcctcaacgcagacattcgactgcaacatgctggtggtctgcgaggataacgaaacggcccaatgggtcatcgaagcagtcgaaggtgtggagccgccccactcctgccagcccttcattaagttcttcgatctagtgaggacgacctttgtcctgcccttggtcagtccgaataagtcgctctgtgtgatcttcgcattactggagtcacagaacccgggcttgaataccgacagatgggccgtcgttaatcgctccactttggactgccaagacgtggagaggcaggtcgctcaattctgcgacaacgtccttattgaggtgtatatcgatgaggatagcagggatttcatcgccgaccggtgttccaaattgcgatactgtttctggcaacttaaattcgattttatataggactttttgggctttccaaattcactgttaacttgttaagatactcctcaattgcagagagtatttactaaatagaaatagtaaaattttatgaagtgtacgaatgaataaatgttgttataaattg

SEQ ID NO: 16062 - protein, 410 aa, DROSOPHILA
MPEMFELHNNATIGELKQKLEVKVGLPLARLNVQSFHKSLENDEFITNLLRIPDKSDYTYPSTTLNEGKSQLDFLNMPKSSMLLPVDRLPQFCEASNSQDSSASSASNQTNASFESASTSASSVARKTRVCASDEESAAKRIRSNQENSVVKVVPQQNLLADKRAGSMASIFGSKIHLMNCCKTETSRTSCSVEQAEECKERKKDCCTPKNCRKRDTRPPYANTMPENRRYALVITNQSSCSDGVDTIALMEHFHSIFEDSGSSVSDLNFSECASTQTFDCNMLVVCEDNETAQWVIEAVEGVEPPHSCQPFIKFFDLVRTTFVLPLVSPNKSLCVIFALLESQNPGLNTDRWAVVNRSTLDCQDVERQVAQFCDNVLIEVYIDEDSRDFIADRCSKLRYCFWQLKFDFI

SEQ ID NO: 16063 - DNA, 5741 bp, DROSOPHILA
atgcatacatagatagctatatgacatccagacattcatgccacatgccactattatacacacatactatataaaacatgtttactactccacgactcaaatttgcaaatattgtacgctatttagcctagcagttagagcagcatacccataatatatttatatgaaacaaatcgcccagcaggacacataaattgtggtatgtatgtgcgtgagtgtatttttgtatgtactacctattaaatatagaaatatatatatatatatatgtgcggagaaccgtgttcctgaacaccgatcaaaaggaattaggcatttttgtttgtcctggactggccgtggatgatcctgcggaccgccaaggaatagagatgtgccaatttctggtccaccaagcacagttgataacctataagcatccttacaacgtcaccacaacagactgggacaaattgctggtcgtagcgtctacttctatacgttaatctatatctatatgttaaactgtaattttggatccgtgtcaaccagtcgtttagttccatagtcaagtcattaccgggtccgttagacaaggatttatgcagatactctcaactaatctagaatctagacaaaggcgacgaagcagatcaaaagagttttgctaccactaccaagtgctgtacacgccaaaaacgaaaggcttcagtttagctatagacacaaatatatatatatatatatatattatataaagagatgtatttacatatttttggcattatagatacatacacaatgtggaaaattgcaaaacaataatatgggtggagaggtaaagggaaagtaattcttagaaaggcagattttttcatacaggaaacggtgaaaatcaaacttttcaacataagaattaaacatatatatatatatgggaaaaccaaaacctataaaacatttactaaaagtgaaaccaataaatgaaaaatgagttatacacccttaaaacaatatatatgtgcaaattgtaaatggagcatgtaattttgtaaaaattataaataaaagtttatcaagtcgagaacttttgaacttaagttaaaattggagacaatttacagagctgacggcctatttaaatacaaactaaatacaattatagaaactagatcaaaatccggatggataaagatgtcatttggccacttattgcatacactcatttcactggaacttttctgtaagtcctcgggtcttcattgccatttccgacaaatgttgttgcaataacctcttgttgaccttttccctgtgaaaaaatttataaaattaatacaatctttaaggatctatatataagtaacgcctctcacttgattattagagcagtgtagcgcgttttatccgcgtcggttatgagctgtgtggggaaattgggagtggacattagggacttcatccagacggccatctcggcggcatattttctgttcatggcaagaaggatgtctgcaaacttatccacctgcgaccgcggcgttaggtagcccacgcacatcatcgccgtgtacagcgtctgctcgccggtggccaggacaacttctgtgacatgagcatggttacgcgactgcatcacaaagtgggtaagaaactgtatgctatttcggatggcaccactctccggcaaagtcattccacgctgggcgtaaaagaccagacgatcgtaggccagtgtcttgtcctccaaaacttgagggattttcttaatgatctgcgtcagacagccgaagaaggtttccatggtgtccgaaatgttggagaagttctgctcgggagtgctctcaaatagcttaaagctgtgttggatgaactccctcagaagttgctgcatcagcggcttgcagccttcgtccttaaagaacataacaatggcctgaaacaaaggattctattagatcactcagtcatttgcaatatattggtaaggctcaccgttttggatatttctagagtaggagcgcagcatcgggtctgaaagctggcaacaatgaagagacaaagatcctgcagcattggctggaagctgctccttaaattcgttatcgcatgcttcatcgcactgcaagcggcctatatgaatacgataacattttattaaaaatatgcaaaattttgtgtttattgccttacctctaggacatcgatctcctccacccacatctcggcgattctcttgaagatgggcatcgtgcgctgcatgacgagcagaactggctgcacaatcggttggtccgtcgcctgctcgtccacatccgtgtttagcgaggagaagagagtggagatcatattgagccggaagattgtgcgaattcgagcagcgggagttttctagtgcaacaaaagaaatggttagcaactgatctctttatatattttatatttatatttactcaccgaatctgcctggcaaatggcctgtagctcctcgaagcagggactgacgataatatccaagtatttgggtatttcctctggccgcagcaggctcattagcttaccgatgctgaacataagcctcaccgaatcggagttcttcatgcggcccgtgtttagggaagcgtggcatgcgtttaggagcggatccgcatacggcttcagctgcagctgacaatcgcgacacagctccttcaggccgagcgtcgcctgtgctgacattgaggagttgaggccgcgcaccagtaggttaatggctggcggaatgtacgccggattctccatcagccaattgcaataggagcccattgtctctagcgcagtgcccagtagcttgacattgagcttctcgtagggaatctcggccagcacgcgcatcagccgtggtatttgccgcttctcctcgccaccaaagtgctcggccaccgactgaaaggaatagatgcacgcctccagctttgtccagtgtgtgggatgtctttgcagatcggcaatggcctcgtccaacatggcagccagaatctccaagatatagtcattcaacacatcatagcaatacatctaaaataaataaaataaatgctatattatgcctgtttgttaatagttgaaaacggtagccaatcctttcgatttggagacactccaactgttgcaaccactcacaaaggtatcggatatatcctgtctgtagcacctaaagcattccaaatcatcggagctccacttggcgagcgacttttcgtctggctgctctgactttcttactaaaatcctggttagatgggcgtacaatggtttgatgtactcccagcacttgtgtttctgctcatcgttagacatggcgaacacttcgtcttgcagcatataccaaaacgccaaggccattgtgctgcaggactcctccaccgggtaaatgcccggcttgtccgtgcagtggagaatctcctgcacgatgcgatgcactaggatagacaattccggatccgcggacgtgatgccgctgagcaacagcgtcgaatgtcgctccaccgaagagacgaacagcatgtagatatgtacgataatgtcctcgttgtcgttctccctcttccattccgtctttgtgatttcggatagcgagtccaggaacatttttataagcacaaatgccgtctttggatagttgtggcagtctggctggatgataatgttcaccatggtcttcagacaggactcggccagttcgttctcatcggcggtcatgcagccgtcgccggcgtgtatgcagggccaatagcacttgtgcaccacttccaggagcacggcggtgatggtgacgcagccctcaatggtgtagccgatgtttctgtccaagttggaaactcacttagaacgtgtaaagaataattttgtaaattgaatactcacttgatccaggtgccgacgcacttaacggccctgttcatgttactgtacgcctcggcatcccacacgcggttcatttgcagcttcagatatcgctcaacggtgtgaatgaccaactgcactcgcttggcgatctcggcgcgcagaacaacccgcttgacagacgtatgtatgacctgcgcttcctcgggaatggcggtcagcacctccagcatgatccacaattgcacatcggcgctgacatttggcatccgttgattctgaaacgtgttgatcacctcctcgatggcgccgggccattcgcccagcatgtgaacgatgtaagcgcccagcgagatgcacaaccgattgaggacgatcttcggtccgccagcgaagcgaacgatggattcgagtatcttttgctttaactcctcgcgattctctggcggcacttcgtgccagtgcttcataagcttggagtgcagcgtgatggcgccgaagaactgcacctcctgactctgtgtgggcggtggggtgattgggtgggcggtaggtgcatgagtatacatatccgggtaattgatgcattgatgcgcaggtcctgcgtggtactcaccttgccgagctgcattagctgccaggaaaactgccaggcctgtggactggcctccgcatcggtaagccattcatgggtgatcgcctggttctgcgagttcgagcggtagaacgacacgaccgcctcctccagacgcgcaatgtcaatgggctccatgtggaatggctgctgctgctgctaatgctgctgctgccgagaggcagtctcctgtccgctaatcctcgggtggtggttttctttgcttctgcctgtgggcactggattcgcgagtgtgaccaacgcgcgaagtcaccaattcgcggacgggccgagtgtgcggtcactccattttcgactttgccgcgctttttttcctcctgtattttttataaaaagtgttgaaatgtacgtatttaataataaataaatatgtaatatagtataaattgcttgtggcctatatgctcgatatatgcaggaaaaattcaatttataacaacatttattcattcgtacacttcataaaattttactatttctatttagtaaatactctctgcaattgaggagtatcttaacaagttaacagtgaatttggaaagcccaaaaagtcctatataaaatcgaatttaagttgccagaaacagtatcgcaatttggaacaccggtcggcgatgaaatccctgctatcctcatcgatatacacctcaataaggacgttgtcgcagaattgagcgacctgcctctccacgtcttggcagtccaaagtggagcgattaacgacggcccatctgtcggtattcaagcccgggttctgtgactccagtaatgcgaagatcacacagagcgacttattcggactgaccaagggcaggacaaaggtcgtcctcactagatcgaagaacttaatgaagggctggcaggagtggggcggctccacaccttcgactgcttcgatgacccattgggccgtttcgttatcctcgcagaccaccagcatgttgcagtcgaatgtctgcgttgaggcacactcactaaaattgagatcgctgacgctcgatccactgtcctcgaatattgaatgaaagtgctccattagggcgatagtgtccacaccatccgagcacgaactctggttagttatcaccaaggcgtaacgtcggttctcgggcattgtgttcgcatacggcggccgagtatccctcttgcgacaattctttggcgtgcagcagtccttcttcctctccttgcactcctcggcctgctccactgagcagcttgt

SEQ ID NO: 16064 - DNA, 3227 bp, DROSOPHILA
ccagtgcccacaggcagaagcaaagaaaaccaccacccgaggattagcggacaggagactgcctctcggcagcagcagcattagcagcagcagcagccattccacatggagcccattgacattgcgcgtctggaggaggcggtcgtgtcgttctaccgctcgaactcgcagaaccaggcgatcacccatgaatggcttaccgatgcggaggccagtccacaggcctggcagttttcctggcagctaatgcagctcggcaagagtcaggaggtgcagttcttcggcgccatcacgctgcactccaagcttatgaagcactggcacgaagtgccgccagagaatcgcgaggagttaaagcaaaagatactcgaatccatcgttcgcttcgctggcggaccgaagatcgtcctcaatcggttgtgcatctcgctgggcgcttacatcgttcacatgctgggcgaatggcccggcgccatcgaggaggtgatcaacacgtttcagaatcaacggatgccaaatgtcagcgccgatgtgcaattgtggatcatgctggaggtgctgaccgccattcccgaggaagcgcaggtcatacatacgtctgtcaagcgggttgttctgcgcgccgagatcgccaagcgagtgcagttggtcattcacaccgttgagcgatatctgaagctgcaaatgaaccgcgtgtgggatgccgaggcgtacagtaacatgaacagggccgttaagtgcgtcggcacctggatcaaaaacatcggctacaccattgagggctgcgtcaccatcaccgccgtgctcctggaagtggtgcacaagtgctattggccctgcatacacgccggcgacggctgcatgaccgccgatgagaacgaactggccgagtcctgtctgaagaccatggtgaacattatcatccagccagactgccacaactatccaaagacggcatttgtgcttataaaaatgttcctggactcgctatccgaaatcacaaagacggaatggaagagggagaacgacaacgaggacattatcgtacatatctacatgctgttcgtctcttcggtggagcgacattcgacgctgttgctcagcggcatcacgtccgcggatccggaattgtctatcctagtgcatcgcatcgtgcaggagattctccactgcacggacaagccgggcatttacccggtggaggagtcctgcagcacaatggccttggcgttttggtatatgctgcaagacgaagtgttcgccatgtctaacgatgagcagaaacacaagtgctgggagtacatcaaaccattgtacgcccatctaaccaggattttagtaagaaagtcagagcagccagacgaaaagtcgctcgccaagtggagctccgatgatttggaatgctttaggtgctacagacaggatatatccgatacctttatgtattgctatgatgtgttgaatgactatatcttggagattctggctgccatgttggacgaggccattgccgatctgcaaagacatcccacacactggacaaagctggaggcgtgcatctattcctttcagtcggtggccgagcactttggtggcgaggagaagcggcaaataccacggctgatgcgcgtgctggccgagattccctacgagaagctcaatgtcaagctactgggcactgcgctagagacaatgggctcctattgcaattggctgatggagaatccggcgtacattccgccagccattaacctactggtgcgcggcctcaactcctcaatgtcagcacaggcgacgctcggcctgaaggagctgtgtcgcgattgtcagctgcagctgaagccgtatgcggatccgctcctaaacgcatgccacgcttccctaaacacgggccgcatgaagaactccgattcggtgaggcttatgttcagcatcggtaagctaatgagcctgctgcggccagaggaaatacccaaatacttggatattatcgtcagtccctgcttcgaggagctacaggccatttgccaggcagattcgaaaactcccgctgctcgaattcgcacaatcttccggctcaatatgatctccactctcttctcctcgctaaacacggatgtggacgagcaggcgacggaccaaccgattgtgcagccagttctgctcgtcatgcagcgcacgatgcccatcttcaagagaatcgccgagatgtgggtggaggagatcgatgtcctagaggccgcttgcagtgcgatgaagcatgcgataacgaatttaaggagcagcttccagccaatgctgcaggatctttgtctcttcattgttgccagctttcagacccgatgctgcgctcctactctagaaatatccaaaacggccattgttatgttctttaaggacgaaggctgcaagccgctgatgcagcaacttctgagggagttcatccaacacagctttaagctatttgagagcactcccgagcagaacttctccaacatttcggacaccatggaaaccttcttcggctgtctgacgcagatcattaagaaaatccctcaagttttggaggacaagacactggcctacgatcgtctggtcttttacgcccagcgtggaatgactttgccggagagtggtgccatccgaaatagcatacagtttcttacccactttgtgatgcagtcgcgtaaccatgctcatgtcacagaagttgtcctggccaccggcgagcagacgctgtacacggcgatgatgtgcgtgggctacctaacgccgcggtcgcaggtggataagtttgcagacatccttcttgccatgaacagaaaatatgccgccgagatggccgtctggatgaagtccctaatgtccactcccaatttccccacacagctcataaccgacgcggataaaacgcgctacactgctctaataatcaaggaaaaggtcaacaagaggttattgcaacaacatttgtcggaaatggcaatgaagacccgaggacttacagaaaagttccagtgaaatgagtgtatgcaataagtggccaaatgacatctttatccatccggattttgatctagtttctataattgtatttagtttgtatttaaataggccgtcagctctgtaaattgtctccaattttaacttaagttcaaaagttctcgacttgataaacttttatttataatttttacaaaattacatgctccatttacaatttgcac

SEQ ID NO: 16065 - protein, 971 aa, DROSOPHILA
MEPIDIARLEEAVVSFYRSNSQNQAITHEWLTDAEASPQAWQFSWQLMQLGKSQEVQFFGAITLHSKLMKHWHEVPPENREELKQKILESIVRFAGGPKIVLNRLCISLGAYIVHMLGEWPGAIEEVINTFQNQRMPNVSADVQLWIMLEVLTAIPEEAQVIHTSVKRVVLRAEIAKRVQLVIHTVERYLKLQMNRVWDAEAYSNMNRAVKCVGTWIKNIGYTIEGCVTITAVLLEVVHKCYWPCIHAGDGCMTADENELAESCLKTMVNIIIQPDCHNYPKTAFVLIKMFLDSLSEITKTEWKRENDNEDIIVHIYMLFVSSVERHSTLLLSGITSADPELSILVHRIVQEILHCTDKPGIYPVEESCSTMALAFWYMLQDEVFAMSNDEQKHKCWEYIKPLYAHLTRILVRKSEQPDEKSLAKWSSDDLECFRCYRQDISDTFMYCYDVLNDYILEILAAMLDEAIADLQRHPTHWTKLEACIYSFQSVAEHFGGEEKRQIPRLMRVLAEIPYEKLNVKLLGTALETMGSYCNWLMENPAYIPPAINLLVRGLNSSMSAQATLGLKELCRDCQLQLKPYADPLLNACHASLNTGRMKNSDSVRLMFSIGKLMSLLRPEEIPKYLDIIVSPCFEELQAICQADSKTPAARIRTIFRLNMISTLFSSLNTDVDEQATDQPIVQPVLLVMQRTMPIFKRIAEMWVEEIDVLEAACSAMKHAITNLRSSFQPMLQDLCLFIVASFQTRCCAPTLEISKTAIVMFFKDEGCKPLMQQLLREFIQHSFKLFESTPEQNFSNISDTMETFFGCLTQIIKKIPQVLEDKTLAYDRLVFYAQRGMTLPESGAIRNSIQFLTHFVMQSRNHAHVTEVVLATGEQTLYTAMMCVGYLTPRSQVDKFADILLAMNRKYAAEMAVWMKSLMSTPNFPTQLITDADKTRYTALIIKEKVNKRLLQQHLSEMAMKTRGLTEKFQ

SEQ ID NO: 16066 - DNA, 3345 bp, DROSOPHILA
ttgtatatgtatatggggggcatgtacgagtatatgtggcacgcacgtttgccgcttctcttgttgctgttgcaatgcaaattgcgagttgcgaactgcgagttgcacttgcgacactgacaactgacgacaacacaactgcgacggcgcgctcttcggtagagtttccttctactttctttttttttttttgtttttttttcgttttaattttctctgataacagcaggaattatggtgtctccctcgcacagtgctccatctcgcttgctccagcacttactcgatttgccagaagccgaaaggagcagacaacaaccgcacgcgagcaacgtcgaacagcaactgagtcctgattgcgctgtcccgcaggatttttgtgcagatgcaggttgccatagcggccacatcgccatgtgcaccaccagctacattccacccaacacccactagccacccctcccacctggctgtggatgctgtgcgcaagtgcgcagaatccgcatccgaagcggcatcaacaggagcgtagtaaacgcgtagtaaattggatcgcattcggctttcattcacagagattctctcgtcaatgttctgatcaccgagataattattgtttaagttttatgaattatttttaaggattgaaaattcttaatggcaaatagtctaagtaaaatgctattttaaaaactgatattattataagctaaatattaagatgaccagagttacttggagcaattccatcaagttgaaataatattaataataatatttaaattaattcgttttttacgagtatcgattacaaacactaaaatatattcaggactatcgaaaaccagagtttccaactcatctaagtccttctagttgacgtgtcagaaattagagttacggaaaaagcaaatttattactcagcattaatttgttggaagaatatttactacttatttttaaagtacaagcactagacgaagtgaatcatctttagacatggaggagtgcaactttatggaactcatggaggagatggccgtgcagtttacgatgaacaaggaagaacatcagctcttcgttcacgactcacgcatgatatccctgaccattcagcagcaattgatcatggatggtgcggtgttcaaggaccatctgggacagctccacagaacaggtgagtaaagtgatcgtggtccaatctcttctagcatagtactcacatgcgccgaacgatcagcctcctttgtcaacaaaatgtacttggacatgccgctgaactttgagatctttctgcccatccgcctgccggaggcagtggttcccacctacgatgagaataaacgcagtgtggaattaaccagagccaactgccagcacccattcttctttgggaatgcggtaaatgtcaaatgtttgaacctgctgctgcaaagcgaactgcagcgagccatttcaaaagtgaagacggcatcatccgtatgctcgggtcggacgtacgacattaagtactcggtgctgaccttcaacgacgtgcccttcgttcaccaagtggttgctctagaacgcaacagcaaccggcagcgtttcattcgcttcgacttcattctggccgtggagttcgatggcgcagaaatgatactgccacattactatcatgcgccgctaattaaccgttggattgcctacggcaggatgaccgttgacgaggatcccaatccggcggagtgggctgtgctggtgcccaagtggcaggactccacgcccggtgccgccctcatttccctcaactgcatggtcatgctgtaccgcctgatgagagcccagcagtgctactgcttcgccctgcccggctccatcaagttggcctttgtcatggccaccgaggagcgcggcctggacttccaacagattagcatcgcagatttgaccattacagtgagtattttatagataatagctaaattggttatatttatatttaaactttggcttgtgtatatatgagctttcgattcatttttagatattcctaacttctaccttcccccccacttagaccatgttccaccaggtgtttggcaacctgtacaaggcggtggccaggaacaccatcggcgaagagaccaccaagagcagacgcttgatggccatacggaaacagttgctgcgcgcccgcggcatatacgctatgctggcggatgcggtgctgcgaaattcgatctcgaggaattttgtgaacgcctacttcagctacatggacatctcaccgccgccggaatgcttctatcagtccctagtcgaagtgcagaacaacgacaacaaattgaagaggaagaggtaaagttcttaagcctgcaaagttaaattgaccagaacgatgggtggttttagcgcatatagtactttcaaatgggtgggggataacaacaccgtggagtggcttcccttgttgattttttgaaatttgagcactactgtaaattggtcgagcagtttgtgggaatccacccaatcctccgtatccgaatcccccagagcaccgccatcgtcttagtgtcaaatctcggtaattgtacaactttaatgccacaaaaaataagtggaaatgccagagcagtgctcacacagacacgacacacacacacacacgcacacaaagaactgtgaggagacggtcgagttcccgcgtatttcgcacgtctttttgctgcgctgcgcgaatttcgtcatatacgagtccggtcagccgtaaactgcaacataaacctgcaaatccactctggggtttgcgccgcgtttctgagcgtcacggtgtcgttccggaattcacgagtgatccagtaaactggtaataaatcagatcagctgcatcagacaatacagctgatagcattgccaacctttcgcagtcgacgagctggttagactggcgttgccagatcagcggtgcgatcgtcattcggccgcgcgctcgttgggcgcgaaattcgaattcaaattcaaatttgaactaattaagttgaacaaaaatttgaaatataacctaagaactgaagctagttctatttcccacggagcgctggggaccaacaagccaaagtcccccttttatatctgatggacagaacaggggggggcagtgcccccgaccccaacgacccgtttaggaggagtggtaggctatcgagatcccctataagaggagtcggaacccaaatccagggagggggaggtgagcaagcaggccccccgccgccgaaagctagcgactgcagtgcagctgtggaggtggagactctggccactacagcctccacgacagccacaagcctgaagacaat

SEQ ID NO: 16067 - DNA, 1161 bp, DROSOPHILA
atggaggagtgcaactttatggaactcatggaggagatggccgtgcagtttacgatgaacaaggaagaacatcagctcttcgttcacgactcacgcatgatatccctgaccattcagcagcaattgatcatggatggtgcggtgttcaaggaccatctgggacagctccacagaacagcctcctttgtcaacaaaatgtacttggacatgccgctgaactttgagatctttctgcccatccgcctgccggaggcagtggttcccacctacgatgagaataaacgcagtgtggaattaaccagagccaactgccagcacccattcttctttgggaatgcggtaaatgtcaaatgtttgaacctgctgctgcaaagcgaactgcagcgagccatttcaaaagtgaagacggcatcatccgtatgctcgggtcggacgtacgacattaagtactcggtgctgaccttcaacgacgtgcccttcgttcaccaagtggttgctctagaacgcaacagcaaccggcagcgtttcattcgcttcgacttcattctggccgtggagttcgatggcgcagaaatgatactgccacattactatcatgcgccgctaattaaccgttggattgcctacggcaggatgaccgttgacgaggatcccaatccggcggagtgggctgtgctggtgcccaagtggcaggactccacgcccggtgccgccctcatttccctcaactgcatggtcatgctgtaccgcctgatgagagcccagcagtgctactgcttcgccctgcccggctccatcaagttggcctttgtcatggccaccgaggagcgcggcctggacttccaacagattagcatcgcagatttgaccattacaaccatgttccaccaggtgtttggcaacctgtacaaggcggtggccaggaacaccatcggcgaagagaccaccaagagcagacgcttgatggccatacggaaacagttgctgcgcgcccgcggcatatacgctatgctggcggatgcggtgctgcgaaattcgatctcgaggaattttgtgaacgcctacttcagctacatggacatctcaccgccgccggaatgcttctatcagtccctagtcgaagtgcagaacaacgacaacaaattgaagaggaagaggtaa

SEQ ID NO: 16068 - protein, 386 aa, DROSOPHILA
MEECNFMELMEEMAVQFTMNKEEHQLFVHDSRMISLTIQQQLIMDGAVFKDHLGQLHRTASFVNKMYLDMPLNFEIFLPIRLPEAVVPTYDENKRSVELTRANCQHPFFFGNAVNVKCLNLLLQSELQRAISKVKTASSVCSGRTYDIKYSVLTFNDVPFVHQVVALERNSNRQRFIRFDFILAVEFDGAEMILPHYYHAPLINRWIAYGRMTVDEDPNPAEWAVLVPKWQDSTPGAALISLNCMVMLYRLMRAQQCYCFALPGSIKLAFVMATEERGLDFQQISIADLTITTMFHQVFGNLYKAVARNTIGEETTKSRRLMAIRKQLLRARGIYAMLADAVLRNSISRNFVNAYFSYMDISPPPECFYQSLVEVQNNDNKLKRKR

SEQ ID NO: 16069 - DNA, 3134 bp, DROSOPHILA
tgtctgaaatgggtctggagcgtgggttactgcagcccggaacagcccacataaatatatcgcaaacccattaggtgccgcaattaagtcagactttagtgcaaattgaacccagcaaagacaattcaattatgcccaaaaaaaactgcatgaggggaaaaacttgtttcgatgctaatgtgggtgagatcgattgtcgagtcttggcaaaatctctgagacaccaaaaacaccaaaaaagttcaagttgaattctttcggtgcgatgataatctgtaattagcgactactataatttactccatgtgccaattattttcctataccagaagcccaggtgctgactaaaattgaaacttggtctttgtgcgatttgtaattagcgctaagcgtttgcataattaagcatacgccctgtggcccaatacgtgcatatgatctggctttgtaccaattaactcgatctaatgaccattggcccccagcttgactaccgttcagctgtggccgatagtactgccaagcaaattaggattgtcactataataatagacacttaaagacaaagacacatttgatctagacattcttggcagatatgaaatcaatagaacaatttgtcggcttttcaaggtcgagcaggtgcaaactaaagacccaaggttataattaactaatatgcagtttatgatctagatgtatttaatgagagctaaacaatcattccaatatgggattgtttgaggttgtccaagtaaaagattaaaacattaaacatcttggcatatcgtacaaaagtattaagctatctagcaatcatagcttaattatatattgaattgtatttaaaaacaagtccaaacctcagatgatgcctcagatgaaattaaacctaaaatatacattaacaggtacttttatcttttgttaaagaagaatctccttagttggatagtagtaactttttttttaaccccatttttgcaaaaacacaatatttatgtcgtataaaaaacgctgattgcttttatttataacgttttcgtcaatctttacattgttgcagattactagattacaatgggatatttacaggttgacagggcatatctagggcgatatgccagatagtgatagatataagaagtatatagtgatagatgtaaagaagaggaagacaggatagcagatgggaagtattgaaagagttctcaaaaaagaaaattaacatgctgtcgtttgttggtttgttgtagttgttgtaattgctgttggacttatatattgctgagtgcgttggaaaatgtccagaggatatggacatggacccaagatcaggatcgtgttcgtatcgagggggttgggactaagagcggtgtgcttaacaataagtgtacagagagagatgggtattcatccggttggagtagtcgtgggaagtcgctgaagcaggtggagatcagtgatactgccatccatccgctccgtttggcatcggtttgggtatggtttatccgtcactcccgacttacagagttccgggggcaggggccacgttcacggaggtggcagagttgatgtgtccggcgaggggagcggtgtggatggcaccacgggtcttggccacatagacgccctcatggccatggccggcggcgagaccgggtccctgggccaggttgattccgggaacagcagcgccgtgccatccggcaccggtcagaccccagggagcagcgctggcatggacggcaacggcggcaggggcaccccagggagcaccgttccaggcgccgttccaggcaccgttccaggcaccattccaggctccgttccacagaccggctccatgggccacggggctcacataggacacaccgggagcgatctgggcccacgaggcatgagctccagccagggcgcacacgaacatgactacggcaacggcgaactggaaaacggattaattaccgaaattagttagatcaccaggataatttcgtagaaactcttgaaaattttcaaaaagtttttgaaaatcttagaacactcctgccaatgtcctcaccttcatgttgtttgtttggggtgggtgttgaagttgggttgttgaaggagaagtgcttgttgaatactcagcgaacgagttgattctgatttcgactaccaaattgtggcaacttatatacgaaaaacgcggcgcggactttgcttcgcttttccaaatccaaaaccgaaacctgccccccaagtcaagaaaatatatatcaaaatgcgccagagaggcgaatggcgcgagagactctgctctagagacgtcgacgcccaagcccaagtctcgggcagaattggagtacccatacccactgtggtagatccgctccgggttttggcctttcactgcccagctgctcgaagatctctgccttgggtgctgcttcccgttccccctttcccgccaaccattaagctgaccaccaccccctaagccacacccctctcaccaaggaaaagggggcggcgggcgtcaatgattgcgcaaattaccacagtctagcttctacaattggaaaacacaacataagtcataaatagtatgtccttaacgaaagatctacatttaaaagttcagccttagaaattaccaattaacttatttacatttcaaatgttaatcccatttgctaaatatttttcgagcttaagccaaatgcatttaaagaagcttgactgtattaacaagaatttacagccgagggtgcaacacaaacacacataaacataagcgtagatattgagccgacacaatcggctggctccatcggcggcttgaaaattgccacaaaacaccaaattatattgataaagcacaaacacatttaaaaagtcataagcatgtggcccaaagcattcaatttgcaatggcacagaccaaagtttctgctgcattagctttcagaattctttgttgcaattatataaatcgctggtattggtgtgtgtgtgtgtgtgtgtttggcttgcagcatggggcacggaatttgtgtacagtaaactaaagtaaaataaagtcgcgtgcctacactgcaataacaattactttgccccaaggcggactcagaagttagcccctg

SEQ ID NO: 16070 - DNA, 1017 bp, DROSOPHILA
tattcaacaagcacttctccttcaacaacccaacttcaacacccaccccaaacaaacaacatgaagttcgccgttgccgtagtcatgttcgtgtgcgccctggctggagctcatgcctcgtgggcccagatcgctcccggtgtgtcctatgtgagccccgtggcccatggagccggtctgtggaacggagcctggaatggtgcctggaacggtgcctggaacggcgcctggaacggtgctccctggggtgcccctgccgccgttgccgtccatgccagcgctgctccctggggtctgaccggtgccggatggcacggcgctgctgttcccggaatcaacctggcccagggacccggtctcgccgccggccatggccatgagggcgtctatgtggccaagacccgtggtgccatccacaccgctcccctcgccggacacatcaactctgccacctccgtgaacgtggcccctgcccccggaactctgtaagtcgggagtgacggataaaccatacccaaaccgatgccaaacggagcggatggatggcagtatcactgatctccacctgcttcagcgacttcccacgactactccaaccggatgaatacccatctctctctgtacacttattgttaagcacaccgctcttagtcccaaccccctcgatacgaacacgatcctgatcttgggtccatgtccatatcctctggacattttccaacgcactcagcaatatataagtccaacagcaattacaacaactacaacaaaccaacaaacgacagcatgttaattttcttttttgagaactctttcaatacttcccatctgctatcctgtcttcctcttctttacatctatcactatatacttcttatatctatcactatctggcatatcgccctagatatgccctgtcaacctgtaaatatcccattgtaatctagtaatctgcaacaatgtaaagattgacgaaaacgttataaataaaagcaatcagcgttttttatacgacat

SEQ ID NO: 16071 - protein, 142 aa, DROSOPHILA
MKFAVAVVMFVCALAGAHASWAQIAPGVSYVSPVAHGAGLWNGAWNGAWNGAWNGAWNGAPWGAPAAVAVHASAAPWGLTGAGWHGAAVPGINLAQGPGLAAGHGHEGVYVAKTRGAIHTAPLAGHINSATSVNVAPAPGTL

SEQ ID NO: 16072 - DNA, 2957 bp, DROSOPHILA
ttgcagtcagttcaatacagcagatttaatcgctagacattgcagagaaaaaaaacgtttaatcattttaggaaaatattacaaataaaatattttaccgaaattacagaactttagaggtagagcataaaagtttgatctacatatacacttatataatatttaataataataataaattttttatcaattttattcacagttcttttcagtgtatttaaaaggaggtgtggtgagaaaaagttgaaggaagttcggggactgttattgatacactgacgcatttcattcaacggccaaatgcggcaacaaaagcgaaactagaaacatgaaaaacaagcgcgagactttgtaaaccgctgttggaactcaaagtgggaaaaataaaaaaaaggggctggctaagtgggaggggaaaatcacgcaacagttggactctgctatagcaaatcgaaagatatagggggtaaggaagtgcggggttgattccatttgatttgtggctggatttcgcattgaacgcagttggggactttgcgcatgcgcatgaacttgacatttcagcattcgatccgatggctttgctctaatcacactttattatggaggaaggggttgcatgcaaacagcgtagtgtcaatttgaggcaatgagtcaattaattgtattcggaggcgtaaatatgcgatgataatatattgagagcgaacgggctttgtatactaatagattgagcctgtgggaatttgtcaggcaacatctatttattttaattttggcttgaccaaaacaaactttgtatacttacattatcattaaataaagctttatcaaacgaagaatatatattatgtaatgttctgtaaagcggaaaaattataatgaggaaccatcaaagatttgttagcaataatgttaatttgtcgcaattttatttatatgtgggtatttaatattcccaacttcgcaatattatttacacatttcccaaaataaaacgtttatactttagttacattttctttattggcattatgtagatgtacaagcatttccttccagaatgcacttggcattccgttcgaagaaaacttgtgatggttttttcacaggatgcttggaaaatgtatgctaaataaataggtaagcgagagaaataggcaaccacaaacgtggccgggtgcttaggtcggaagagaattttgatgactcctttttttcgggacaggtatgaaaggatcctgttcaggtgctaggtgcgagtaccctgtctatatatggctatatatacaatgtatttacataacgtgttgaggggtctaaagttcgacttccccatcaatggcagtatccgtggcagaggcaatggtccgatcgacaaagggattgaaggcggtatactccttacaaggttccgggtgcgggagcggcattgatggaggccaccgactggatgtgtccggccagaggagcggtgtgaatggcaccacgggtctgggcagtgtagacgccactgtgagccactggggccacgacgactgagggagcatgagcagcaaccacagcgggagcaggggcagcaagcacggcaggagcggcggcgtggatcgctgccggaggccacgaagccacgttcacggcagcaggccagtgggcggcgggaacggcccagggagaggccaccacagcgggtccggaaacggcggtgtaggacagtccatgtccagccacctgggacagcagggggatcacagacgactgcacgcccatggcgagggccaaggtgaagataacggcgacggcgaactgtataatgcaaaatatattgtttagtcttatgagtaaaacttccttgttgaattactaatattaatccaagctatgttgttgttaattatcaggataaatccgtttgataactcactttcatggtgctgtttgtgggttttgggttgcgctctggttgaactcttgttctgaactgatctgtcaacggagctgccggccagttttatacccaactgctgaccacatcagcaatagaaaaccgccaagtcggagggttcatgaaagtgagagttcacacaccatgacatggtggacacggctgacactgctccgcatgcatatgatcagctgtaatgacatgcctcggatctgaacggatcgtatcgtatcgaatcggatcaaacggctaggttgaacgccttcaaagcggttgaattcaagaactagttctacatctacaatactttgttattagcttattgtactaatcgaaatacgtacatttattttctaaagaataaaaaaataaatgaagaagagaggattgtgacaagaagttaggttacctaatttgtatctttaaggtggggtttttaacaataaccctctcaaaaatgaactaactcggtagtgaacctctatttccgcaccactcaaacatgcaccaccacagaaaatgcattctcagtgagtgtgtttccatctccgtggccatgtgggtccaactgtctaagtgaatggcccaacccacttttcagctgcagttccggtaagttgattttcactccatcacaccgccactttaattacttaattgttgtttgtgcgcgattagcatttcagtatgatttataacacgattccaattatggagcgatccgtatcctgtataaggccggctaatatctgatttatgtgtcttaagggttaatgatatgcgaggaacagcccactttatcgatcgatattgaaatataattatgggaaaattaagagctgaaatatattattccatttgaacagaactgatctataaatctgtttctaatattttaaagagttaatattaaaattttaagccgaataacaaaaagtagattataatcaattggactagtgtaactatttagaattcgaatccaagagacaaaagtttgcaattcgtttca

SEQ ID NO: 16073 - DNA, 839 bp, DROSOPHILA
cgcaacccaaaacccacaaacagcaccatgaaattcgccgtcgccgttatcttcaccttggccctcgccatgggcgtgcagtcgtctgtgatccccctgctgtcccaggtggctggacatggactgtcctacaccgccgtttccggacccgctgtggtggcctctccctgggccgttcccgccgcccactggcctgctgccgtgaacgtggcttcgtggcctccggcagcgatccacgccgccgctcctgccgtgcttgctgcccctgctcccgctgtggttgctgctcatgctccctcagtcgtcgtggccccagtggctcacagtggcgtctacactgcccagacccgtggtgccattcacaccgctcctctggccggacacatccagtcggtggcctccatcaatgccgctcccgcacccggaaccttgtaaggagtataccgccttcaatccctttgtcgatcggaccattgcctctgccacggatactgccattgatggggaagtcgaactttagacccctcaacacgttatgtaaatacattgtatatatagccatatatagacagggtactcgcacctagcacctgaacaggatcctttcatacctgtcccgaaaaaaaggagtcatcaaaattctcttccgacctaagcacccggccacgtttgtggttgcctatttctctcgcttacctatttatttagcatacattttccaagcatcctgtgaaaaaaccatcacaagttttcttcgaacggaatgccaagtgcattctggaaggaaatgcttgtacatctacataatgccaataaagaaaatgtaactaaagtataaa

SEQ ID NO: 16074 - protein, 135 aa, DROSOPHILA
MKFAVAVIFTLALAMGVQSSVIPLLSQVAGHGLSYTAVSGPAVVASPWAVPAAHWPAAVNVASWPPAAIHAAAPAVLAAPAPAVVAAHAPSVVVAPVAHSGVYTAQTRGAIHTAPLAGHIQSVASINAAPAPGTL

SEQ ID NO: 16075 - DNA, 2452 bp, DROSOPHILA
tgaaaccgccggcgggatcagctaggaggcgcaccttgcccgcggctccgtgctccttgccccaggcggacatcacaaagggatcgttgaccgaaacgcagacaatctcgtccacgccctgcttggacttcagctcatcggcggagctcacatagccgggcaagtgggtctgtgggtgtggggaaatgcattattcagttggaatacataagctgcataaattacactatactgctggaagtttctacaatattcggaaactcaaagcagatgactttgcaactatgctacctacgcacctttgagcagcctggagtgaaggcgccgggaacgccgaagatgatcaccttcttgccattgacgagatcgccggtgttgattttgttggctggcgagtcctcgaacagatccaccgatggcagggagtctcctacctggaaataaagtgggaggcagacaggcgtacttagagaaaagaggcagcaagatggaggcgataaccttgaaacgctgtaatttctgggtgccgccgcaatcaatatttatgcagctcggcaccggcttatgtaatggaatccggactgccgcacagccggaaatccgcgtttgccggtcaacctgcacttactttcaccatagctgcactggttttggacagggatcgcagtgaaatgatttgttggggcagcgcggagttaacaactcggccaagaaatttgcacgacagcacacgcatttctcctctctttcttcttctcacacacacaggcacgcacgcacacagccaaagactgcaactggccggtggagcgttgccagaccgtcgcaaaaaagaatatgggccgtgtgttttcagtcaagtcttaatttttactacctcatattttttagttagtttgtttttttaaaggggggaaataaaaatattatgctgtaaggatagacttccatcatatttttggagggggtggtggtggttggtattgggtcttcaatggcgctatgtggccgctctgttgactatgctgtccgccagtctctccaggtcgtccaggctctgctcgttgattttccgctcgaagtcggccataaactcattggtcatacgctcagctaggggctccgaatagtgcttgcggaatccccgcaggatgctgtcccttaaacagggctttatcaccaccagattgagtttggtgccctccttgatgttgggatatgacgcaattgtctgttcattgttaagcggtcgccccaacagcagtagcttttgatttgtagccgatatctgcagttccgcctcgatctggtgtttcacctccagaatcgtcgatgtcggcgccacctgtgtgaaatattaccatattagcgacctcacttgattttggcaaggttcattcttacctcgatggtgcagtccttgcccttcagcaccttgattgttatctgcatagcaattgccgtaaaatttattaaaaaattaaaagtcaaactcgagaagtcgagcgatataaacaatctgtctttggcgttgccacctgtattgccaccaagtgtcattaggccaagcggccctggtttgtaaaacaagtgccgcaatatttgctaatatataatttacaaaaatatttccttatattaatatatagtacatatatatgattcttgtaaattgccaaatgttatttaaaattattaatattttaatgcagctagcacaaattatgtacaagctatcgaaaaccactcgaagttattattttacaaaattaaagaataatgtgagatcaacaattaaataacagtttgtaaacattcggtttattataattaataatgatctttaagtctttcgcatttggcaataagacagtagaggagagtaaggtataaagatagtaaatataaataagtaaatagcataagcaaaagctcgttttagcttttaaacggagtcggtaaaatcttcctaaaagtaactatcgagggtcggctgggtcaggcaacgccgccgcacgcctgcagccctggtaactctattttctattgagcaccgacaacgttgcgtgtataagacagtttacataaattattatttacaattgcacagagcgttgatgttgtgcgttctaagcgaaaaggtgaacttgaccccggtgccgatagaccgccgagctattgggtgtgaaattcgcgagcgagccttgtggaattcgcacgcgaaaatcgaagcgaatcgcagcgatcgaagaaattgcagcgcaaataattcgtgtagcctcgacgactgaattttaacgcgagagcggggtgtgcgtgtgtgtgtgtgcgctgtgctgtgattctgtgtgcgtgtgcaagcgtttttgttagaattcgcattttacgcaaagaactagcttttatcagcagtgaacttgatgttggcgaacctatatcgcagcagggccaa

SEQ ID NO: 16076 - DNA, 393 bp, DROSOPHILA
atgcagataacaatcaaggtgctgaagggcaaggactgcaccatcgaggtggcgccgacatcgacgattctggaggtgaaacaccagatcgaggcggaactgcagatatcggctacaaatcaaaagctactgctgttggggcgaccgcttaacaatgaacagacaattgcgtcatatcccaacatcaaggagggcaccaaactcaatctggtggtgataaagccctgtttaagggacagcatcctgcggggattccgcaagcactattcggagcccctagctgagcgtatgaccaatgagtttatggccgacttcgagcggaaaatcaacgagcagagcctggacgacctggagagactggcggacagcatagtcaacagagcggccacatag

SEQ ID NO: 16077 - protein, 130 aa, DROSOPHILA
MQITIKVLKGKDCTIEVAPTSTILEVKHQIEAELQISATNQKLLLLGRPLNNEQTIASYPNIKEGTKLNLVVIKPCLRDSILRGFRKHYSEPLAERMTNEFMADFERKINEQSLDDLERLADSIVNRAAT

SEQ ID NO: 16078 - DNA, 3058 bp, DROSOPHILA
gaactatcgcctaaagtaacagcttagtttatattatattaacatggttaatatttgcaatgatttttattctaagcttaaagaataagttcccgttagggccatgagagaaattgatatataagtatacaacgaattttaaaataatatatttttgctacccagtaaactttttatgcactagctcaccgattcatatttcaaagtgctatcgaagtatcagtcaatagagtgccgtcactaaataaaagcagagaaaatatttcaatagtttgtagctgaaaaatatgttcgcatctgtggaattaagctcatatcgcgatcagcacttcaaggtgagtacatccgaaggcgccacagcagatctccgactcaataaaccaattgcagggctcgcgctccgagcaagagcgatcgctccgcgactcgtgtacactttacgtgggaaacttgagcttctacaccaccgaggagcagatccacgagctcttctcccgctgcggcgatgttcgtgtgattgtgatgggcctggacaagtataagaagacgccctgcggcttctgcttcgtggagtactatgtccgatcggaggcggaggcggccatgaggtgagccatatccatctctccacgctagaaaaagccgccttttttccggcatttgtagaagtaatcagatggggtatcattatctcttaactaacttcaacactcttttcttctcccacaaaagatttgtgaatggcactcgcttggacgaccgtctgattcgtgtggactgggacgccggcttcgtggagggcaggcagtatggacgcggcaaaaccggcggacaggtgcgagatgaataccgcacggattacgatgccggccgcgggggttatggcaaactgttgtcacagaagattgcacccaacacggacaatcgctagttattagataaaatgactgtaaagactataagccccccaattagatattaaagcataccccttagacataacatctctaatcgcatatatattgtacgttttacatagttcttttgaagacgtaattgatatcattgcggcctagcattagcatgtatgagtttctagtgttttcgggctgactggattccatttacttcttgccaatgttgttggccagcgagcagctgagtccggtgccatcgggctcgacattcagctcggtcaccttgccgttctccaccaccagcgagtagcgctttgagcgcacgccgccaagtggtggcagatcgatggtcacatccagggccttggtgaaaccgccggcgggatcagctaggaggcgcaccttgcccgcggctccgtgctccttgccccaggcggacatcacaaagggatcgttgaccgaaacgcagacaatctcgtccacgccctgcttggacttcagctcatcggcggagctcacatagccgggcaagtgggtctgtgggtgtggggaaatgcattattcagttggaatacataagctgcataaattacactatactgctggaagtttctacaatattcggaaactcaaagcagatgactttgcaactatgctacctacgcacctttgagcagcctggagtgaaggcgccgggaacgccgaagatgatcaccttcttgccattgacgagatcgccggtgttgattttgttggctggcgagtcctcgaacagatccaccgatggcagggagtctcctacctggaaataaagtgggaggcagacaggcgtacttagagaaaagaggcagcaagatggaggcgataaccttgaaacgctgtaatttctgggtgccgccgcaatcaatatttatgcagctcggcaccggcttatgtaatggaatccggactgccgcacagccggaaatccgcgtttgccggtcaacctgcacttactttcaccatagctgcactggttttggacagggatcgcagtgaaatgatttgttggggcagcgcggagttaacaactcggccaagaaatttgcacgacagcacacgcatttctcctctctttcttcttctcacacacacaggcacgcacgcacacagccaaagactgcaactggccggtggagcgttgccagaccgtcgcaaaaaagaatatgggccgtgtgttttcagtcaagtcttaatttttactacctcatattttttagttagtttgtttttttaaaggggggaaataaaaatattatgctgtaaggatagacttccatcatatttttggagggggtggtggtggttggtattgggtcttcaatggcgctatgtggccgctctgttgactatgctgtccgccagtctctccaggtcgtccaggctctgctcgttgattttccgctcgaagtcggccataaactcattggtcatacgctcagctaggggctccgaatagtgcttgcggaatccccgcaggatgctgtcccttaaacagggctttatcaccaccagattgagtttggtgccctccttgatgttgggatatgacgcaattgtctgttcattgttaagcggtcgccccaacagcagtagcttttgatttgtagccgatatctgcagttccgcctcgatctggtgtttcacctccagaatcgtcgatgtcggcgccacctgtgtgaaatattaccatattagcgacctcacttgattttggcaaggttcattcttacctcgatggtgcagtccttgcccttcagcaccttgattgttatctgcatagcaattgccgtaaaatttattaaaaaattaaaagtcaaactcgagaagtcgagcgatataaacaatctgtctttggcgttgccacctgtattgccaccaagtgtcattaggccaagcggccctggtttgtaaaacaagtgccgcaatatttgctaatatataatttacaaaaatatttccttatattaatatatagtacatatatatgattcttgtaaattgccaaatgttatttaaaattattaatattttaatgcagctagcacaaattatgtacaagctatcgaaaaccactcgaagttattattttacaaaattaa

SEQ ID NO: 16079 - DNA, 734 bp, DROSOPHILA
cgtgcctgtgtgtgtgagaagaagaaagagaggagaaatgcgtgtgctgtcgtgcaaatttcttggccgagttgttaactccgcgctgccccaacaaatcatttcactgcgatccctgtccaaaaccagtgcagctatggtgaaagtaggagactccctgccatcggtggatctgttcgaggactcgccagccaacaaaatcaacaccggcgatctcgtcaatggcaagaaggtgatcatcttcggcgttcccggcgccttcactccaggctgctcaaagacccacttgcccggctatgtgagctccgccgatgagctgaagtccaagcagggcgtggacgagattgtctgcgtttcggtcaacgatccctttgtgatgtccgcctggggcaaggagcacggagccgcgggcaaggtgcgcctcctagctgatcccgccggcggtttcaccaaggccctggatgtgaccatcgatctgccaccacttggcggcgtgcgctcaaagcgctactcgctggtggtggagaacggcaaggtgaccgagctgaatgtcgagcccgatggcaccggactcagctgctcgctggccaacaacattggcaagaagtaaatggaatccagtcagcccgaaaacactagaaactcatacatgctaatgctaggccgcaatgatatcaattacgtcttcaaaagaactatgtaaaacgtacaatatatatgcgattagagatgtt

SEQ ID NO: 16080 - protein, 157 aa, DROSOPHILA
MVKVGDSLPSVDLFEDSPANKINTGDLVNGKKVIIFGVPGAFTPGCSKTHLPGYVSSADELKSKQGVDEIVCVSVNDPFVMSAWGKEHGAAGKVRLLADPAGGFTKALDVTIDLPPLGGVRSKRYSLVVENGKVTELNVEPDGTGLSCSLANNIGKK

SEQ ID NO: 16081 - DNA, 3743 bp, DROSOPHILA
gtctggcctacttcagcgctgattttttcgcgtttggcggcccatttgggtccatcatactatatactatactatagtacactatggttgcggaacttatttaatgggtccacttaaattggcctcgctaagtggttgtcgatctgtcgcttcatttagaaccagttctctgtaaaccagtgtccgacttatataatcgatcatcttctagggccctgcttgattgcttttaatcatgagcagacgctcgtcttcatttcagtttaaaagccgaagatttcattgtgccatcaattgaaatgtatgccccattgacgtatgcaaccgtcttgaacacttgtgttccttttgttcgagtatgtgcagtgagcaaaatgagttcgcaatttactgggaaaatgcttctttatgaacttcagtaagtgctgtttaccagttgaacttccgtaatattaaaattgttgattatatataaatatatttttggtacctcaatgcgtagagcttttcccacactgtattaacatatacgtaggatgtgcttatcgccacttccgtcgctgtaatctaatcgtgtgcttatcaggtaatggctgcgtgccagggcagtggtccgataagcgtttctgccaatacctttggtggagcgaggggctgtgagagccaccatttcgtgatccggggacacaatcgcgacttaagtttaggaccaaaccagctggacgggcaacttgttcaggttaacgaactagtttgggccgtttctcgctgcacttgcgaattctcatttttgatagtgcacaaccaacgtagatatgtatacacagatcgggtgagagcggggggtggtgcgattggagaggtgccgaaagcggcgacgacttctactacttgtgcccgacagtacgtacacagagacacgtcgctacatcgggcttcgtcactcgactcgccctgcagtctctcccacaattttctgggcgctttcctgcagtcgtcccacgaacgttgccgcaattggtctacacgaatcggttcgctaataaaatgactgccatgccccacgcccactctcgcctcctaggaaaaacgctggcatattgaactgtgcgactaactaacttaaatacttaaaagcaagcccagcaagccgagagcaatctgcctaaaagtgacaagttataggtgacacaacaaaagctaaaatttgtgagaaactgtgtgaaaactagaactacaaaatgatgaagctgtttaaaaaacccaaagacaaaatacccaaatcggagattttaaccgagcccaaggagcccaaaacaccgccggtctccaagtgcggaaaacctttgcagttggacaactcgcgatgggaggcaagtatattcgagatattaaacctgaactttggccagatatcgcgttcgaacaactggtcgttaatatacatatagtgttccattgcatcatgagtatgtagtattttgagtttcaagaaatctgcgtgaatcttctgttgattctcttcaaggctgtaccaagatttgtttttattattcttggcattgccaaatccaaaccttatcgatcaaacccatttatccgcagctcatttgtgggggcagcggtgcgatacttgtttatggtacagaaaacgggcctgcaagtgccaatcactcgataagaagggggatccgaaagacggaaaaacaatcgtcggttctataaatttcagtgacatttgtttttatcttatcgagcatttcgtttatttatacgcgcgtaggcatatagcgtatattggcgtttgtaagccaaaggagaaatggcgcaccgataaggcgagcggaaaaaataagtcttgagaactcttaagtagaatgtcccagctgtaggtgtgtttcgcgataagatatacggcgaactgtccgagtcattaactaatataagtcttaaattttattttctgccccacagcgccgcctacacaaagagctgatgtccctgatcaaggagccgccaccaggcgtaaccatcgacaccgagagcgtacaacaaaatttatccgagtaagtatggacttcgaggcggagtaggccaagttcagcgacaactgaaactggtttaaatcaattcgcaattcagcaattcgcactgaaaacaaagcccgcagttgttggaagctgacactaatatcgctgttttgtttacagatggaaaataaacattaaaggtttcgagggcacactttacgagggcgaggacttccagctacttttcaaattcaacaataaatatccgttcgattcgccagaggtaataattcagttgaacaaagcgaagctgtatggaatcttaaccatgttctcttaatttccaggtgaccttcatcggcaccaatataccggtgcatccgcatgtctacagcaacggacacatctgcctatccattctgaccgaggactggtccccggcgctgtccgtgcagtccgtgtgccttagcatagcctccatgttgagtagttgtcgcgaaaagaagcgtccgccggacaacacgatatacgtaaaaacctgtaataagaatcctaaaaagactaaatggtggtaccacggtacgtatgcgtgattttccaactaaagcccactgactctaaacttgactaattgtttatttcagatgattctgtttagttaaaattgccatttactaatactgcctgctattgtttgctttgcgcatccaaccaaaaaaaaaaaaaaaaaaaaaaacaccattagcaatacagaagtagaacacggcgagatgcccccagaaatccaagaaatgtgggacggcggtcaagcactgctcgtgagtggagcatactaaaacccaagtgcactcggatgcgaacgtaatgtgcaacaaagtaaatgaagttagcgagaaacttatgggtagtgtttggcaaacaatcgtggcgcatgcaaacaattctaattgtagctatgtgtaatcaacaaaaggcgtgtgcgaaaaactattattaaatgttaacattttaattagattgttaagaccaaatttatgtctaaattaaatgttatcctaccatttaaccactaagcgtatgcaaaccacttgaacgtttgatagttctggcacctcgcgccagttgctgcttccacattccacatgcatcgttcgcggcattttctgcccgagtagcgtgacccagcacacacacacatcgcctccatcccagcttatattaattttgtgtattttatcatcatagatgagaagcaaaactcatgcgatcatagttaagattatgacattttaaatgtattagcagccatatccccgatcgctctcattgtcaccagtcctgcactctgtaatctacccacattgcccatgcataggtcgttaagttaaccagttcatgtacttggctaggatagtccatctgtggccaaaaatctcgcaagtggcccgatcgcagaacacatttacctctaactgtgcaagtagatcttaggatgtgacgagctactcgtccgactatcacacgatttaactataatccgtataatgtataaagagcaagttaaatccaatgtatgtttatccagcatatgtctataaatgcctataaatatttactgttaaaagtatttaaaataaaaagaagtctgtagtcgaacgaaccaactgtttttctgtttggctcattttgatctcttgtatttgtatttagaat

SEQ ID NO: 16082 - DNA, 869 bp, DROSOPHILA
cacgaacgttgccgcaattggtctacacgaatcggttcgctaataaaatgactgccatgccccacgcccactctcgcctcctaggaaaaacgctggcatattgaactgtgcgactaactaacttaaatacttaaaagcaagcccagcaagccgagagcaatctgcctaaaagtgacaagttataggtgacacaacaaaagctaaaatttgtgagaaactgtgtgaaaactagaactacaaaatgatgaagctgtttaaaaaacccaaagacaaaatacccaaatcggagattttaaccgagcccaaggagcccaaaacaccgccggtctccaagtgcggaaaacctttgcagttggacaactcgcgatgggagcgccgcctacacaaagagctgatgtccctgatcaaggagccgccaccaggcgtaaccatcgacaccgagagcgtacaacaaaatttatccgaatggaaaataaacattaaaggtttcgagggcacactttacgagggcgaggacttccagctacttttcaaattcaacaataaatatccgttcgattcgccagaggtgaccttcatcggcaccaatataccggtgcatccgcatgtctacagcaacggacacatctgcctatccattctgaccgaggactggtccccggcgctgtccgtgcagtccgtgtgccttagcatagcctccatgttgagtagttgtcgcgaaaagaagcgtccgccggacaacacgatatacgtaaaaacctgtaataagaatcctaaaaagactaaatggtggtaccacgatgattctgtttagttaaaattgccatttactaatactgcctgctattgtttgctttgcgcatccaacc

SEQ ID NO: 16083 - protein, 190 aa, DROSOPHILA
MMKLFKKPKDKIPKSEILTEPKEPKTPPVSKCGKPLQLDNSRWERRLHKELMSLIKEPPPGVTIDTESVQQNLSEWKINIKGFEGTLYEGEDFQLLFKFNNKYPFDSPEVTFIGTNIPVHPHVYSNGHICLSILTEDWSPALSVQSVCLSIASMLSSCREKKRPPDNTIYVKTCNKNPKKTKWWYHDDSV

SEQ ID NO: 16084 - DNA, 4605 bp, DROSOPHILA
ttgttgatttttctacgcgtgcaaacacaaacaaagtgggaaaccatttcattcatgaatccaactcagggggaggattgtggggatgctccaaacttctgatcccaaagatttttgggtggagctcgtccagaaaacaatttcgcgctaagctgaaagcaattttcgcccctaggaatttgtggtaaacttagtttagcttggctttcattcagctgggagtcaaatcttgctaacttgaaaatgttaaaggttattggttaaatgatgcgtatttgtaaaataaatgaaattgttgtgtacgtcacatagattttatgttttaaattccgttcagttagattcgatttttgccaagttgaaaagtatttattacacaatctgatggtaacgtgtcgtatgagtaatatttttacataacatcgccaagtttttgtcctttgcctgtatttaagccacctgtatccacaatttacaagatttcccagcagtctgaccacgaaaagtcctcctggttacatggtcatccgtggacatatcattgacataccaaagttgaatccattaaaaaatataagttatttgtcataaataaataatcgaaactgtttaatattgtatttcttatagaatgttatgtacaatagcaaagttaactttctactattattccatagtgaactaaataagtttataaaatggatcaccccacctagtggtaacaaatagtttggacaaaagctattgagtgtttttattttgcaagggctcggaaacagccaaaatgtgacatcgcaataaacgaatttataaagttcatagaaataccatggtaccacacaccatcttaaggatattgaggcacagttcgatattccagggcgaacataattttggctacgatctaaagtacatttttcaaatccagttctccacttatacttatacgaaaaagagcaactaagcgccgcctaaaagatcaaacaatgcaactacgtataggataaaatcaaatataataataaattagcatcgatttatggctacagctgtgtcgtttggttgcctcccgcaataccagcagctccgcccttctccaccatgctgggcatgcccggctccgattcggaacgcttgtgcgttcgcttgggcaatcgctgggtggccttcttagccttggcacttgtcactccgtcgccggaattgttgagcagcatcaaatccggttggctgcgcaccaggtcctgctcctggtaaacctcctggacggctgaactggtattggtgttggtcacctgctcgttgaggcaaacatcgtccaaatccacatcgctgttggagaagagagctgtggcgcccagttccagggagttggtcacgtccagctcctgctcactgaccgccttctttggcgtggatgtggatgcgattgaggtgcgcgagaaattcttactcacatcgagatggccagcactgggcggggtcaacagtgtggtcacttgggctggcttcgagccaatgctaatgctgttgttattgttgttattattattattgtgattctgtccgcccgtcgcagccgctgagacaggagcagctgcgcctatgaccggcacattggtcatgctactcggtgtagaactgttgcgctcggtctgatgttccttcattagcttgcaggccttgcccagcgcacagatggtcaggcaaatgcgcaagcccatggcaaacaagtaggccagcaggaagagcagccaggcggctagattctcgaaagagaccgctgtatagatggcctttatcaggaccacagccagcggaaatggaatgaagcccatgcgtctggccaccaaatccgaatgatctgagaatgcgtgcttttgccgcgtctgggtcatatcgtaggccaagctggtcgtgtactccctgtagatgctctccggcagctcattgaatcgcgtgataaacgcatgcttcacccaatcgatcagaatttccgtgaacagcacggcaaagcagtcgggcagcattacacagaactgggtgatgctccagtcaaactccttcatggtctggatgaccacaatgaacagaagcacagacagatggaatcgctctcgtacatcgctgcaggtcaattggaacaggttgtttttgtcgaacttcttgaacacggatcccttgagctccacgaaattattcgatatcatgatggtcagcaggcccttgttgttggagttcaccgccacattcaaacaggtggcctgaaggaatagtttagaaaccaaaccaatataatcacagagaaaatgtggtttataaagctaccattactcacctgaaacatgatcagtccgctgtgcaagaagacatagattagcgtgaagagaacgtgcgtaagcactccaaagtgctctcgcttggaattctttggttctgtcgccgtccagaagagagcatcgatcgtgtcctgaccaaaagcggacaacagccggtcgcccacctccagcatgttgtagaatatgtacagcttgatgatcgactgtgacttgatgatgtggtacacccgattcgtgtccaccaggagcattatcagcgtcaccgtcatccagatgacgcccttcagcagatcacagatctccgccggcgatagcagcctttgtccgctgctgcgtagtcgaaagattcttgccaccgtcctggaaactagggcccaaacggccatcacaaatcggacgggcagaaaagtgtgaatgtagagaaatgagtcggcgcactgcatgatcccgtacaccatgaatcgctccagatcccgcggtatgcgcatgaagctgtagatcttctgcctacgcgccgaatagcgctcctcgtcgtgctccagcatatagccgcgtgtcatctccactttgaagaagtcgtagaatgtgtttgtgcaggtttcggcggttcctgcaaaaacaaaagaaaaatgaatgataagtatgaatcaaatataaagtatatgcatagattctaatgatttaagtaaaatagataacgattgattacaaatcattgattatacatccttatccttagttaaaacaacttcaaaaattgcaaattatgatatattaggtttttaagagctttatctggaatttaagttaattaaaaatctctctagaactttaaatatagcatcaaatctaaggcaaatgtgtatgttatgatcaaaagtaaagttgctatgaaatagcgcgaaacccaattaaaattagttaacgtaaatgtcatcctaagaactaaataataataattcaaaagaatgtttttccaatcagtaaatccgtgtttaccgctctgcagtcgctgctgcgctgagcccgctgccggcgtcgcagtcggcgtcgctgcaacgtcatcctgggcgagcggcgccttttgcttctgctcctcctgctgctgatgatgcagttcctccactcggctgccggtgacgtcgccgcgaaagcgcagctgacgcttgccgcccgcggaattgagtgtggcgttcattaagtacggtgtgcggagtccataaaattaacaataacaacgagctacaaaatttcggggtgaaacagcagttatatgaaaatgtactaacgcgtgccgaaaatacccaaacgtaaacagtgtgtgtatcgaatgtacagaactatcgcctaaagtaacagcttagtttatattatattaacatggttaatatttgcaatgatttttattctaagcttaaagaataagttcccgttagggccatgagagaaattgatatataagtatacaacgaattttaaaataatatatttttgctacccagtaaactttttatgcactagctcaccgattcatatttcaaagtgctatcgaagtatcagtcaatagagtgccgtcactaaataaaagcagagaaaatatttcaatagtttgtagctgaaaaatatgttcgcatctgtggaattaagctcatatcgcgatcagcacttcaaggtgagtacatccgaaggcgccacagcagatctccgactcaataaaccaattgcagggctcgcgctccgagcaagagcgatcgctccgcgactcgtgtacactttacgtgggaaacttgagcttctacaccaccgaggagcagatccacgagctcttctcccgctgcggcgatgttcgtgtgattgtgatgggcctggacaagtataagaagacgccctgcggcttctgcttcgtggagtactatgtccgatcggaggcggaggcggccatgaggtgagccatatccatctctccacgctagaaaaagccgccttttttccggcatttgtagaagtaatcagatggggtatcattatctcttaactaacttcaacactcttttcttctcccacaaaagatttgtgaatggcactcgcttggacgaccgtctgattcgtgtggactgggacgccggcttcgtggagggcaggcagtatggacgcggcaaaaccggcggacaggtgcgagatgaataccgcacggattacgatgccggccgcgggggttatggcaaactgttgtcacagaagattgcacccaacacggacaatcgct

SEQ ID NO: 16085 - DNA, 2142 bp, DROSOPHILA
ctgtttcaccccgaaattttgtagctcgttgttattgttaattttatggactccgcacaccgtacttaatgaacgccacactcaattccgcgggcggcaagcgtcagctgcgctttcgcggcgacgtcaccggcagccgagtggaggaactgcatcatcagcagcaggaggagcagaagcaaaaggcgccgctcgcccaggatgacgttgcagcgacgccgactgcgacgccggcagcgggctcagcgcagcagcgactgcagagcggaaccgccgaaacctgcacaaacacattctacgacttcttcaaagtggagatgacacgcggctatatgctggagcacgacgaggagcgctattcggcgcgtaggcagaagatctacagcttcatgcgcataccgcgggatctggagcgattcatggtgtacgggatcatgcagtgcgccgactcatttctctacattcacacttttctgcccgtccgatttgtgatggccgtttgggccctagtttccaggacggtggcaagaatctttcgactacgcagcagcggacaaaggctgctatcgccggcggagatctgtgatctgctgaagggcgtcatctggatgacggtgacgctgataatgctcctggtggacacgaatcgggtgtaccacatcatcaagtcacagtcgatcatcaagctgtacatattctacaacatgctggaggtgggcgaccggctgttgtccgcttttggtcaggacacgatcgatgctctcttctggacggcgacagaaccaaagaattccaagcgagagcactttggagtgcttacgcacgttctcttcacgctaatctatgtcttcttgcacagcggactgatcatgtttcaggccacctgtttgaatgtggcggtgaactccaacaacaagggcctgctgaccatcatgatatcgaataatttcgtggagctcaagggatccgtgttcaagaagttcgacaaaaacaacctgttccaattgacctgcagcgatgtacgagagcgattccatctgtctgtgcttctgttcattgtggtcatccagaccatgaaggagtttgactggagcatcacccagttctgtgtaatgctgcccgactgctttgccgtgctgttcacggaaattctgatcgattgggtgaagcatgcgtttatcacgcgattcaatgagctgccggagagcatctacagggagtacacgaccagcttggcctacgatatgacccagacgcggcaaaagcacgcattctcagatcattcggatttggtggccagacgcatgggcttcattccatttccgctggctgtggtcctgataaaggccatctatacagcggtctctttcgagaatctagccgcctggctgctcttcctgctggcctacttgtttgccatgggcttgcgcatttgcctgaccatctgtgcgctgggcaaggcctgcaagctaatgaaggaacatcagaccgagcgcaacagttctacaccgagtagcatgaccaatgtgccggtcataggcgcagctgctcctgtctcagcggctgcgacgggcggacagaatcacaataataataataacaacaataacaacagcattagcattggctcgaagccagcccaagtgaccacactgttgaccccgcccagtgctggccatctcgatgtgagtaagaatttctcgcgcacctcaatcgcatccacatccacgccaaagaaggcggtcagtgagcaggagctggacgtgaccaactccctggaactgggcgccacagctctcttctccaacagcgatgtggatttggacgatgtttgcctcaacgagcaggtgaccaacaccaataccagttcagccgtccaggaggtttaccaggagcaggacctggtgcgcagccaaccggatttgatgctgctcaacaattccggcgacggagtgacaagtgccaaggctaagaaggccacccagcgattgcccaagcgaacgcacaagcgttccgaatcggagccgggcatgcccagcatggtggagaagggcggagctgctggtattgcgggaggcaaccaaacgacacagctgtagccataaatcgatgctaatttattattatatttgattttatcct

SEQ ID NO: 16086 - protein, 676 aa, DROSOPHILA
MNATLNSAGGKRQLRFRGDVTGSRVEELHHQQQEEQKQKAPLAQDDVAATPTATPAAGSAQQRLQSGTAETCTNTFYDFFKVEMTRGYMLEHDEERYSARRQKIYSFMRIPRDLERFMVYGIMQCADSFLYIHTFLPVRFVMAVWALVSRTVARIFRLRSSGQRLLSPAEICDLLKGVIWMTVTLIMLLVDTNRVYHIIKSQSIIKLYIFYNMLEVGDRLLSAFGQDTIDALFWTATEPKNSKREHFGVLTHVLFTLIYVFLHSGLIMFQATCLNVAVNSNNKGLLTIMISNNFVELKGSVFKKFDKNNLFQLTCSDVRERFHLSVLLFIVVIQTMKEFDWSITQFCVMLPDCFAVLFTEILIDWVKHAFITRFNELPESIYREYTTSLAYDMTQTRQKHAFSDHSDLVARRMGFIPFPLAVVLIKAIYTAVSFENLAAWLLFLLAYLFAMGLRICLTICALGKACKLMKEHQTERNSSTPSSMTNVPVIGAAAPVSAAATGGQNHNNNNNNNNNSISIGSKPAQVTTLLTPPSAGHLDVSKNFSRTSIASTSTPKKAVSEQELDVTNSLELGATALFSNSDVDLDDVCLNEQVTNTNTSSAVQEVYQEQDLVRSQPDLMLLNNSGDGVTSAKAKKATQRLPKRTHKRSESEPGMPSMVEKGGAAGIAGGNQTTQL

SEQ ID NO: 16087 - DNA, 3287 bp, DROSOPHILA
cttgtgaacggccttggcaaccagaatgaccctgcgttgaatcgcatatccggcacttcggtgaaaccttccaaccttccggctgcctactccaacggctatgtggatctggccacctctgatcggattgcgaacagtgtgctgaactttgccaacattctgggccagcatttggccaacggtaaaacccagatatactctcccctgagcattgtacactcgctggctctgctgctcctgggcgccaagggtcgcagttacgaggagttgtccacggtcttcgatattccggacacgtccaggctgcacgaacagttcggcctgatgctgcaggatctgcaacagcccaccagggaggcgatctccgcaggacgaccgctgaccgattggcgggcgagcagcgcgatgagatccaatcgacgggcccagcgacccggtgctcatgaggtgcacctggccaatggactgttcacacagaccggctacacactcaatcccgactacaggtgagccgagcagcggataattatccggctgcaaactggaactatagcgatatctggttgggaatgggtgctgggaaatgccaaacgattagcgatcgccttgaggttttacaccgtgaaaaactgaaggccatgcgggctaaagtgatctccttttctgaatgccaagtgagggaaacaggttcattgtaccagcaaaatgatctcacccattatcatcaagcgtttagtgtctcttgatggtggtgctccaaaaggaagtatttattttatattcgaagataatatacaacgagaaaatattagaatatatttttctgtgtagaaatgagcgtgtaattccacttatatttatgaatctttaaagcccaagctttcattgagaaatatatatgtacgtacgtacgtataaagtttagaatataaatgggaaccattgacaaacaaatttagtaagaacttttagtgcgattgtttttatgtagagaacttgaataaaattaaatcggaattggaattggaattatcagttaatcaaatatttaattagaaaccttaggtcaaatagtaggtacaatgaattgccaaaaatttggcaaataaaaagcactgataagaatggattaacttaaaaacataactaagacatttaattatttatttattcttcaattatagctgatcaaacattgcaaaaaaagcggaaaaaaactactttcccaagttattatttagctcaccagatattgcaattccaacccatccccagttccccaatactatcgctccactttgcacaacgttgttggcatactaatagctgcgccttgttgatttattactcatgagctccacttttgtgcaattccagacgggtgatcgtcgaggtctacgcctcggatctgcagattcaggatttcgagggcagtccggcgacagcacgatacaatatcaatgcttatgtggcgcagcacacaaagaatcacatcgagaacatcatcgccagcgatattccgcagaccaccaggatgattctggccaacgcattgtactttaaggcattctgggaaacggactttatagagtcagccacacgtccggataacttctatccgaatggcgagggaacggagccggtgatgagggtgcagatgatggccaccggtggtgcatatccgtatcacgaggatcacgagctgggctgcaagatcattggactgccgtacaggggaaatctgagcaccatgtacatcatccagccgtttaagtcgtcggtgagggagctaatggcactgcagaaacgtctgacggcggataagatcgagagcatgatcagccgaatgtacagacgggccgctctggtggcattcccaaagatgcatcttacggagtcggtgaacttgaagacagtcatgcagcgaatggggctgggcggcatctttagcgcggtgcagaatgatctctcgctcatcgccaccaacgaggccacgaggacgaatgcgctgggcggcaacagcctgcagaatctggaggcacagcgcagagccggaacgggtggagcacgttccgatctggtggtggatgacattgttcacaaagtggacttcaccgtcaacgagcagggcacggaggcggcggcgtcttcggtcacatacctcaagaaatccggtcccgatgtcctcttccgcggagacactccattcatggtccttgtgcgccacgatcccacgaaactggtgctcttctacggactcataaatgagcccccggcggccgcttagtttctaggatcataagttattaagctttagcacctaagttcgttgactttatagttaggaaactaataaatcattcacaatgatgaaaaataaattaaaacgtaaattatgaaaatttgtattggtttttgttgctgttgaatcttttcacattatcctatgtaccgtacagcaggcagattaaacaatgcccacaaatgttcaaggcgctaagtttctacaaatcatttaaatttaaaaaacaaccgccaatcaaccggttgcggttaaaagctctgttaaacggagatgctgattattagcgggtaacatgtttcgtttaacggaacagctgttcatttagtcggcagttatcgcttaagccgcatgttatcgatatcttcaattattttgtattctttttcgcaataaaaagtgtatactttagaaataaagctttaaataagtttaaattgattcgaaatgatagccctacccgacacagatagcgaggatgagctgccacccggctgggaggaacgtgccaccgatgacggcaccgtttgctatgtgaagtaagtcaaaagtccagtggagtcgtaaacattgtctgatattttttaattgcaccatttagccagcagggaaaaacatcacagtggacacatccacgtacgggtcgctccaaacggatcacgggcgaattacccttgggctgggagaagtactacgatgagcagggaaagcgtttcatgttcctcaacaaggagacgcagcaacgaacgaatgtggatcctcgtttggcattcgccgtggaggagcccacacagaatgtggcccaggtgcgccagcgatttgactcctgttcgacggcactgcaggtgctgcacggcaaggatttgcatggacgcaccgcgctgataacgggcgcaaattgtggcattggctacgagacggctcgttcgctcgcccatcacggctgtgagatcatcttcgcctgccggaacagatcctccgcaga

SEQ ID NO: 16088 - DNA, 1260 bp, DROSOPHILA
atgtggatctggccacctctgatcggattgcgaacaatatactctcccctgagcattgtacactcgctggctctgctgctcctgggcgccaagggtcgcagttacgaggagttgtccacggtcttcgatattccggacacgtccaggctgcacgaacagttcggcctgatgctgcaggatctgcaacagcccaccagggaggcgatctccgcaggacgaccgctgaccgattggcgggcgagcagcgcgatgagatccaatcgacgggcccagcgacccggtgctcatgaggtgcacctggccaatggactgttcacacagaccggctacacactcaatcccgactacagacgggtgatcgtcgaggtctacgcctcggatctgcagattcaggatttcgagggcagtccggcgacagcacgatacaatatcaatgcttatgtggcgcagcacacaaagaatcacatcgagaacatcatcgccagcgatattccgcagaccaccaggatgattctggccaacgcattgtactttaaggcattctgggaaacggactttatagagtcagccacacgtccggataacttctatccgaatggcgagggaacggagccggtgatgagggtgcagatgatggccaccggtggtgcatatccgtatcacgaggatcacgagctgggctgcaagatcattggactgccgtacaggggaaatctgagcaccatgtacatcatccagccgtttaagtcgtcggtgagggagctaatggcactgcagaaacgtctgacggcggataagatcgagagcatgatcagccgaatgtacagacgggccgctctggtggcattcccaaagatgcatcttacggagtcggtgaacttgaagacagtcatgcagcgaatggggctgggcggcatctttagcgcggtgcagaatgatctctcgctcatcgccaccaacgaggccacgaggacgaatgcgctgggcggcaacagcctgcagaatctggaggcacagcgcagagccggaacgggtggagcacgttccgatctggtggtggatgacattgttcacaaagtggacttcaccgtcaacgagcagggcacggaggcggcggcgtcttcggtcacatacctcaagaaatccggtcccgatgtcctcttccgcggagacactccattcatggtccttgtgcgccacgatcccacgaaactggtgctcttctacggactcataaatgagcccccggcggccgcttag

SEQ ID NO: 16089 - protein, 419 aa, DROSOPHILA
MWIWPPLIGLRTIYSPLSIVHSLALLLLGAKGRSYEELSTVFDIPDTSRLHEQFGLMLQDLQQPTREAISAGRPLTDWRASSAMRSNRRAQRPGAHEVHLANGLFTQTGYTLNPDYRRVIVEVYASDLQIQDFEGSPATARYNINAYVAQHTKNHIENIIASDIPQTTRMILANALYFKAFWETDFIESATRPDNFYPNGEGTEPVMRVQMMATGGAYPYHEDHELGCKIIGLPYRGNLSTMYIIQPFKSSVRELMALQKRLTADKIESMISRMYRRAALVAFPKMHLTESVNLKTVMQRMGLGGIFSAVQNDLSLIATNEATRTNALGGNSLQNLEAQRRAGTGGARSDLVVDDIVHKVDFTVNEQGTEAAASSVTYLKKSGPDVLFRGDTPFMVLVRHDPTKLVLFYGLINEPPAAA

SEQ ID NO: 16090 - DNA, 6558 bp, DROSOPHILA
atcattggactgccgtacaggggaaatctgagcaccatgtacatcatccagccgtttaagtcgtcggtgagggagctaatggcactgcagaaacgtctgacggcggataagatcgagagcatgatcagccgaatgtacagacgggccgctctggtggcattcccaaagatgcatcttacggagtcggtgaacttgaagacagtcatgcagcgaatggggctgggcggcatctttagcgcggtgcagaatgatctctcgctcatcgccaccaacgaggccacgaggacgaatgcgctgggcggcaacagcctgcagaatctggaggcacagcgcagagccggaacgggtggagcacgttccgatctggtggtggatgacattgttcacaaagtggacttcaccgtcaacgagcagggcacggaggcggcggcgtcttcggtcacatacctcaagaaatccggtcccgatgtcctcttccgcggagacactccattcatggtccttgtgcgccacgatcccacgaaactggtgctcttctacggactcataaatgagcccccggcggccgcttagtttctaggatcataagttattaagctttagcacctaagttcgttgactttatagttaggaaactaataaatcattcacaatgatgaaaaataaattaaaacgtaaattatgaaaatttgtattggtttttgttgctgttgaatcttttcacattatcctatgtaccgtacagcaggcagattaaacaatgcccacaaatgttcaaggcgctaagtttctacaaatcatttaaatttaaaaaacaaccgccaatcaaccggttgcggttaaaagctctgttaaacggagatgctgattattagcgggtaacatgtttcgtttaacggaacagctgttcatttagtcggcagttatcgcttaagccgcatgttatcgatatcttcaattattttgtattctttttcgcaataaaaagtgtatactttagaaataaagctttaaataagtttaaattgattcgaaatgatagccctacccgacacagatagcgaggatgagctgccacccggctgggaggaacgtgccaccgatgacggcaccgtttgctatgtgaagtaagtcaaaagtccagtggagtcgtaaacattgtctgatattttttaattgcaccatttagccagcagggaaaaacatcacagtggacacatccacgtacgggtcgctccaaacggatcacgggcgaattacccttgggctgggagaagtactacgatgagcagggaaagcgtttcatgttcctcaacaaggagacgcagcaacgaacgaatgtggatcctcgtttggcattcgccgtggaggagcccacacagaatgtggcccaggtgcgccagcgatttgactcctgttcgacggcactgcaggtgctgcacggcaaggatttgcatggacgcaccgcgctgataacgggcgcaaattgtggcattggctacgagacggctcgttcgctcgcccatcacggctgtgagatcatcttcgcctgccggaacagatcctccgcagaggcggccatcgaaaggattgcccaggagcgacctgcagcacgttcccgctgtcgattcgccgctctcgacttgagctctttgcgttcagttcagcgatttgtggaagaaattaagcagagtgttaggtcagtagcatagctttcaaaatctaatattatttaattgataattatatttatattgcagccacattgattatctcatccttaatgccggagtattcgcactgccctacacgaggaccgtggatggtctggagaccacattccaggtctcgcacctgtcgcatttctacctcacattgcaactggagacactgtttgactacaaaacacggatcattgtgctgtcatccgagtcgcacaggtaagtgtgaatttgagcactttagcacgtaattagggagggagggggtaatagagtataccagttacgaaataattcatatatattcttatggtgtgtataaaaggttacaaactaaccgctgaacttaagttttatatttcgtatgaaatatcaatagatcaatcttaaaaattaagtattcaaaagatatatgttaaaaaaggttacatgggaaatacaaaatcaactggttatatttcgcactatcagtaagggaattaaaaagttatttacaattcgatcgtattgtttcttgtatcaattttactatcagtcactgtctcaatagaaaatcgtctctacttaagttaaataaaatacatcgaagcttcaaaatatataaattgatgtattatatataatttcttaaacctattttcttgaatcaatttggcttatttctttcctaattaaatttctcaatgtcagcactgttaatctcgttttaataattattatttttttgtttctgtttttggccggcaaacagttgtcattattgcaacctgtttgtgtgcaaaatgattattatcaaaatcacacgggtattttaattgaagctgaatttggtgcatgtcacattctaaaaatatatatatttaatatatttttaataaggaataaaataaaattatatactttatgttttaactatcttaataactttacaatattaatttaatttatttaatgtagttataaattcaatagctatttcgtattcgacaccatcagttttaaatgtgtgtctgccatttcgagttgccttcttttatttttgcaagttgattgcacttttatgattccgcatagtggactttgcacccagcgttttcttttttttcgcactttggggccaaactattcatagaccaaaccagaaataaatgcattccgcctcagccatgccgtctagtgtaatgttttccaaaatgtttgcctatttgcctcagatttgtttgcgtaagatgttttccgtttgattcgatttcaaggcgaaacgtaattgaactcagcttggcatatatgagtatatattattcataggcttcgtttacatattgtgctgcgcactcagaggcaaacaaagaaacacataaatataaacaattacgaggccaacgcagctgggtttttgtattatcaaaaccaaaaacgtgcgtacaatagagcaatatgatcgaactcacgtgcagctgtaagcacagtggagtagagagctctgaaaatatgattgtaatctttctttaaaaaatatctatgagataaattaactaaactgaagaaagtatttttgtttttcttttaaaactaaaacacattcagattagctacgcatataaatccaagcagagtactttttttgtaagataaactttgaatgttcaaaactagcatgctttaaatagatactataaatgtaaaaagtgcccctataattttccttatcagcgctaactcgcttaattagattgattcatttgtggccgctcgaatggctcactgtgcatgctgtcaaagaccaaataaatcactgggtgagcgaatctcgtgaagaggcacaataccaattcaaactgaactggatgtacatatgtatgtacatacatactggctattggaggtggttttgtatctgctgcgttcgttgctgtgctcacgtacaacattttttggcttcgcggagcatacatgactatctgcgagtactccaatgtggcgcacgagacttttgttgcacgttcacacgggcgagaaaaagatatgaatgttggtatggaagttcgactggttatcattttcaaacattaaagattacttacaattagttattcttgcatcagctcacaaaaattgggttattcattgttgcatagataaaatatttttatttaaggtttctctttttcaaataattatatttttgcgtgggaaaagttgtccagacattaaacaattattaattcaattagagtcttaaggtaaagcaacgagttattgttctaaaattaaatgccattcagcagcaatttatctgtctgtagaacctaattaatttacatgcaaacagtcgaaaagaacgcttttttgcttacctaccacaacaagatacaaatatacatatataaaaaaagaaaaaaaatggaacgccaacgggtttcatttgtcatggatgccaatggatacccatacttataaataacactgaatttgcatacattttgcgacgttatatttacatcgcccccaagccgagcgcagatattcaataaaatgaaaacaaatccaaagtccagaaatgtgcgcgcagatatgtgtttgtgtatagaaatgttttcatgttgcggcattcgtggattcgcaggaaatgtgcgacttgcgcatgcgctactgccgaggattccagaggcttccgccgaaaactggagatacatagatacatagatagatagatagatagatagatagatacatagatagatagttcgccatagagttcactatgcatatcagagggtccttgttcgattgtggggctttgttccgccggccccacttgttgactcacgccattgttcgtggggagcctttgtgcgccctgcactgcgctaattctgcatctcattaataaagagcgcttaaagccggctatgccagccggcaatggcaatcaagactcgtttcgcgattgtcggccggcggggccaaagtccagtgagttcacttggacgagaaatgttcatgtgggtctcatgtaccgacaaagaaatgcgtcgcaaataatcttagttactaactaacatgcagatttgccaacctgcccgtggagaatctggcagtgcatcacctttcgccgccgccggagaaatactggagcatgatggcctacaacaatgccaagctatgcaatgtcttgttcgcccaggagctcgcccaggtgagtccttaaattgggtcaattgaattccacttgccaaccctttttttttgtttttttgttgcagcgttggaagcagcgaggcatttctgtttttagcctgcatccgggcaatatggtgtccagcgatttgtcacgaaactattggttctaccgcctgctctttgccattgtgcgtcccttcaccaagtcgctggtgagtttggcaatgagaagaactctctgttttcccttaactttcactaattgctttctgtgccccatatggcagcaacaagcggctgccacgagtatctactgtgcgacggccaacgagctgaccggattgtctggactgtacttcaacaattgcttcttctgcgagcccagcaagttgtccaaaagtgctgcactgcagcagcaactgtggaagctgagcgagaacctgattgccgagcttgtggagcaggagcagcattagccaagtcatttggctactgttttttaaatatatttatgcattatgctaccaccaatgattccattaggtataattttacattttaaaccagctattcattacaaagatatattttgaattctttaatagtttctgcccaataagtgcaatgcaaataaacttttgtacgttaagaatatcatgtattttctttttacactaaacaagtatacattttgatttgtttttaagtcttaatggctagcatttaaataacagtctaagtactagttaaggaactcttcatttgggcactagaaatcggagacgcgtcccttgcgctcccagtcgccgtagcgtgtgggctccggcccggctggtccgccgatctcgcccgtatacggattggtctgattgggccagggcttgagtggttccttctcctggtacggatgtcgcgagaattcatccagcttgcccagcggcgttttagcgcgcagcttcttctggaaggccattagcttctcggtgcgcgtctttggttccttgatctcgaccaccatgtcgccaccgctggcggttgcccgccaagcgccactcgtcgatagatagctcactgttaatgaaaaattgaaagaacgttagcatcgccactccagcacagtgcgcacacacacacacacacacacacacacaccttgtttgcccatttggggcaggactcgcgccgtttgtctggtcacggattgcattttgttttttgtttggatttcctttatcggttatgcaagatgatgccggcgaatcttcgtttttgttcgcttcttagtcgcagttacactttgtgtgtttactcaaaagtctcactttcggctgggagtcaatgtcacttgcttgttgcttcgcgtctgaattgcaatctgcgaggctgcgtttcgcttttatagcccgcgttgcttgtttagttgctttatttattgtgccatatgttgtggtggcactgaaaatgtactaaatatagccatacaatacgcacagcggagacgcacaccagggtgcatgactgtgctaggcattgagctgtaactctagctacatgctatctggcaacgctggcttttaaatttaaatccgttattgaaagaaagaaactgcgaaaaatattgcaactttatttattttaagtgcattcaaccatt

SEQ ID NO: 16091 - DNA, 1381 bp, DROSOPHILA
aaataaagctttaaataagtttaaattgattcgaaatgatagccctacccgacacagatagcgaggatgagctgccacccggctgggaggaacgtgccaccgatgacggcaccgtttgctatgtgaaccagcagggaaaaacatcacagtggacacatccacgtacgggtcgctccaaacggatcacgggcgaattacccttgggctgggagaagtactacgatgagcagggaaagcgtttcatgttcctcaacaaggagacgcagcaacgaacgaatgtggatcctcgtttggcattcgccgtggaggagcccacacagaatgtggcccaggtgcgccagcgatttgactcctgttcgacggcactgcaggtgctgcacggcaaggatttgcatggacgcaccgcgctgataacgggcgcaaattgtggcattggctacgagacggctcgttcgctcgcccatcacggctgtgagatcatcttcgcctgccggaacagatcctccgcagaggcggccatcgaaaggattgcccaggagcgacctgcagcacgttcccgctgtcgattcgccgctctcgacttgagctctttgcgttcagttcagcgatttgtggaagaaattaagcagagtgttagccacattgattatctcatccttaatgccggagtattcgcactgccctacacgaggaccgtggatggtctggagaccacattccaggtctcgcacctgtcgcatttctacctcacattgcaactggagacactgtttgactacaaaacacggatcattgtgctgtcatccgagtcgcacagatttgccaacctgcccgtggagaatctggcagtgcatcacctttcgccgccgccggagaaatactggagcatgatggcctacaacaatgccaagctatgcaatgtcttgttcgcccaggagctcgcccagcgttggaagcagcgaggcatttctgtttttagcctgcatccgggcaatatggtgtccagcgatttgtcacgaaactattggttctaccgcctgctctttgccattgtgcgtcccttcaccaagtcgctgcaacaagcggctgccacgagtatctactgtgcgacggccaacgagctgaccggattgtctggactgtacttcaacaattgcttcttctgcgagcccagcaagttgtccaaaagtgctgcactgcagcagcaactgtggaagctgagcgagaacctgattgccgagcttgtggagcaggagcagcattagccaagtcatttggctactgttttttaaatatatttatgcattatgctaccaccaatgattccattagtttctgcccaataagtgcaatgcaaataaacttttgtacgttaagaata

SEQ ID NO: 16092 - protein, 409 aa, DROSOPHILA
MIALPDTDSEDELPPGWEERATDDGTVCYVNQQGKTSQWTHPRTGRSKRITGELPLGWEKYYDEQGKRFMFLNKETQQRTNVDPRLAFAVEEPTQNVAQVRQRFDSCSTALQVLHGKDLHGRTALITGANCGIGYETARSLAHHGCEIIFACRNRSSAEAAIERIAQERPAARSRCRFAALDLSSLRSVQRFVEEIKQSVSHIDYLILNAGVFALPYTRTVDGLETTFQVSHLSHFYLTLQLETLFDYKTRIIVLSSESHRFANLPVENLAVHHLSPPPEKYWSMMAYNNAKLCNVLFAQELAQRWKQRGISVFSLHPGNMVSSDLSRNYWFYRLLFAIVRPFTKSLQQAAATSIYCATANELTGLSGLYFNNCFFCEPSKLSKSAALQQQLWKLSENLIAELVEQEQH

SEQ ID NO: 16093 - DNA, 3521 bp, DROSOPHILA
aggccaccacggcggcgcaggtgtgaatgaatatggaggagaacagggcccacagaaagacgtggtaccacatttcgcgaaacgtattgagacgcgcctgtgaccggagtcccatcacatcggcgatggtgtccaactcatcggtgtcgtccgagaacatggctaaaacgtagtcgatggatgttgacgtggtatccctagttactagttgctagttattgcttttccgttggtcagttgagtgtccagccgcatgtctggtggggattccctttctatagcatgtatccagccaatattcatggacctgcaaacaataactccctttagacttgaccttctggcatttaattatactcacgccaacacatgtgtgtgctaatggccacacccataccacatttgtcgtattctatagccggatttggattgcagtctttttcagttgcttgatcctatttagcatggccttaacttccggttagcactgtagtttagcaaatgtttggcttatttttaattcggtcaacaatcgattgaactttcgtcacggcactcaattagcgctcggctggcggcagtgaatgctaaatcgggcctaattaccaggctactggtgtgcggcagccctaactccacattttgagcaacaccaaacacttttagttggtttaatttaattttatattgttcttgtctgcgatttactatggcaatgggaatggaacgtttgggattgggccagttctgataagcaaacagctgtgactcagttgcgaactggttcggggcttgcagcgcagctctaaattattatactcaagatatccatatgtaaggcagatatcgtagtgaaaagtcacagggtttttaaggtatattcttttgtaagctgtgttcaaatgcactgctttcagcacaagcatgcttatcgttatcgagcagcgataatcggcgaactagttcaacataaaccttcttggcacaagtgacaactctgaaaccaatccataaacaaaaaattttgtgtaaactaaaaacaaaaagcggaagttgaaaaacaacaccttagcgtataatttggccccttatgatttgttaagtttctgttttggaaaatgggatgctgagatagccctgaacaggtgtaagtcgtcctcctacactatgacacatttcttccgagacgaacttacatacatacgcacatatgtacacatatgtatgcatgtttgtaactgcatccatatacgatatatgtatcttacgcactcgcggctatatacatatatatgcggaatatatatgtatgtaagccgtcaatatgagaatcggttgaagttaagtcttcatttaaagtggctatagtacatatgtatatacacacttttaaccagcatatgcttgtgaatcgagattaatcaaaggccctgcattgcagacttcatatacttcaagccccacaaaaccaacgacgcatttaatcaatgttctccaacggattgccgtgcaatctgtcgtttccgagctgtctcagtgtaccaaaagacgagatcggtaatgaagagctactgccatccaatatgggtactcgcgagcctgttatactcaatgtctacgatatggtaagcttacttactcctgttgcccatgcggacatcgcacaacgataaatgtaaccttgcatttgcagtactggatcaacgagtacaccacctcaatcggcctgggcgtatttcactccggcgtagaagcctttggcaccgaattcgcatacggcggacatccatttccgtttacgggggtattcgagatctcaccgagggatcacgacgagttgggcgatcagttccagttccggcagagcatccaaatcggctgcaccgactttacgtacgaggaggtgcgacgtatcgtcgaggagctgggtaatcagttccgtggcgaccgatatcatctcatgaacaacaattgcaaccacttctcgggctcattaactcaggtgagacataaatcgaggaaactttccactgggtggatccaatatcaagcaatattttgggtgtgcttatgcatgattcaccgattgtcagataccgcctgttacaatcagaagttcttattgtgaatcacctcaaaaagtaggacagattaccatcctaaacacgtccaatacaattagatgcttccaaacgattcgagtttaggagcaagaaaatgcaagcttaaaagcccaaatgaatattcatttgactatatctgcaattccaattactcgttctagatactttgcggccaagaaatacccagctgggtcaatcgtctagcgcatttcagctcctgtgtgccatttctacaaagatgtttgccaaagtaagcctttctaagtgaaacaaaagccaagttcatgattattaactactctatgttgttttttagagaatggctgacaccgaatgccttgcagcaaagcattaccacaatccaagagcgcgaagactccgacaacagtcccctttgagacgttacctgaccgaaaatatgtcacttggcgacacacaagcgatcatagttcacataaaacaacagtcctgagaccaacattgttaagttacgcagagcaaaaagccgggttactcatgtcacatcaatttccaagccaacaacgccccctaaatagaaagcaacaactattattaatagacttaaattaggcgatatacatatacatacttacatagaacaaacctacattgagacatacttatacatacatgcgaagtgactaaattattggctattgtaatttgtatttgtaatatgactattcagaattaagatattattaagtggccgataaatttaagtagcaggcgccgttcagcagcagtgtcatttatagaattttaaattaactacgaagacatcgagaaatcatcattaggcacttgctaaaattgtactaacaataccgcagacatattggtgaacgatatcaaaatgttgcccaatttacttgtttacttttgtcagcggtggggatttggtttttttgaattcccaccaaacatcggagctcgattattgagatgatttcctggttgatttcgtttacacaattatacagagttcataagccgcatgtctatcaaaacaccaaaatgatctgttatcaataaatatatgtacttgacattctgatatttacacatgcataaatactattattaaacatttttaaagaaaaatatattttgatcgaaaacattcggttgcgtttgatttacaagcgagcaggttggaacgtttttaatattttgggtatttttggggtcaaaagtggaataaccaaataattaagtacacgatattctcataaattacgcagaatatgaaaacactcagacccaaaactcctcaacaaaaaacaacaaaattattgtacatatatctttgtattatatttatatattttagaccctccagattagatgcatcagttgaaaataagttaacttttc

SEQ ID NO: 16094 - DNA, 811 bp, DROSOPHILA
aaaccaatccataaacaaaaaattttgtgtaaactaaaaacaaaaagcggaagttgaaaaacaacaccttagcgtataatttggccccttatgatttgttaagtttctgttttggaaaatgggatgctgagatagccctgaacaggtacttcatatacttcaagccccacaaaaccaacgacgcatttaatcaatgttctccaacggattgccgtgcaatctgtcgtttccgagctgtctcagtgtaccaaaagacgagatcggtaatgaagagctactgccatccaatatgggtactcgcgagcctgttatactcaatgtctacgatatgtactggatcaacgagtacaccacctcaatcggcctgggcgtatttcactccggcgtagaagcctttggcaccgaattcgcatacggcggacatccatttccgtttacgggggtattcgagatctcaccgagggatcacgacgagttgggcgatcagttccagttccggcagagcatccaaatcggctgcaccgactttacgtacgaggaggtgcgacgtatcgtcgaggagctgggtaatcagttccgtggcgaccgatatcatctcatgaacaacaattgcaaccacttctcgggctcattaactcagatactttgcggccaagaaatacccagctgggtcaatcgtctagcgcatttcagctcctgtgtgccatttctacaaagatgtttgccaaaagaatggctgacaccgaatgccttgcagcaaagcattaccacaatccaagagcgcgaagactccgacaacagtcccctttga

SEQ ID NO: 16095 - protein, 205 aa, DROSOPHILA
MFSNGLPCNLSFPSCLSVPKDEIGNEELLPSNMGTREPVILNVYDMYWINEYTTSIGLGVFHSGVEAFGTEFAYGGHPFPFTGVFEISPRDHDELGDQFQFRQSIQIGCTDFTYEEVRRIVEELGNQFRGDRYHLMNNNCNHFSGSLTQILCGQEIPSWVNRLAHFSSCVPFLQRCLPKEWLTPNALQQSITTIQEREDSDNSPL

SEQ ID NO: 16096 - DNA, 9773 bp, DROSOPHILA
gaagagcttatcaaatctccaaatgccaacagctaaactccagacaaagttataaaatatcgtattgcttggttaatactttaatgatgcttttaaattaactgacaacataaaacgtaaataacacaagtgggaataaatatataataataataaaattttaagtgcattttaaattgcaatttaactgactcgaccgaaattcctaatttaataaaaagcaagccgatgtgtgcatcacaacgggttaatcgatgtataaatatcccaggcactatcaattcagacttctgttggcttccacacccacatgaagtcgtggcaattaccgttgatctctggcttagagcgattcataatcaagacacaagttttaatttaaatatgccccaatgctcatttatctcgcaagtatctcaggcccacaatgttgcaagatcttacggatcgcatcgctgtgctgcacagcacagatctaagtgggccaacttctggccgccggcgcagcgggttgaggctcattgcgaataaatcggacactccacaaatctcccgcaattacaatactttataaacatatttttcttctccccaatgtggcgggtcttgtattatcgtctaattgcatcgtcgacgctcgtggcatttagcgcgtcaacaaacgagccgccgccgcgaccccagcccccaaaagatacaccacacccgccagccccagccgcttcttaatcctatctcacacctcaaagtagcggttcgaagctgagaaatgaaaatatactcgtataaaaggaaaaaaacaaaaaaaaaccaaaaacgaaaagcaacagagcgaaccgcaggccgttccattcatcatttttcgtttagtgacgcgcgtgcctcgtgcgcctcaaatcgagtgtgatttttttcacagattttcaaattgagacgtcatgatctgaccatcggttccgtcggatctactcgtttatgcttaggcgatgatcatttttcgttgggattcgtgtacaacatttatttgtttcataaggcactgcggcatgcaactaacgctaagatagaacatttatgtttatgggctacgagtataatttagcgagtataaaactgcgaatactacaaagatcagtacaatatgaaatacaacagcaaatacaaccgagtcttaagttcaacttagaactacgcatatactagtagatgttttatggtaatatcttaaatcaacattaaactaaaagtaaattcgagtagctgcttgtttttggttttacgcctttggtgcaattttggtaaaatgtttcaagagatttacagacttaaatgagagttatatacataaattcgagtgtagtatgatttgtaggatttttttatgcaagccttagatctttcgaagatttattaggattcaccctaaaggacacttcataatctctagttaacaatttgactttggttcaaaaaccaggcttgaattgtcctgatctcatctaaggatcctgattcgtttaataattacaccacttctgcaggttgtccgtttcatcttcctcctcgtcgctagtcgagggcggtgtatccagattggcgatatccacatcgaggtagtcctccttcgtctggagcagcttgtccatatactcaacaatttccgtaaaaggtggccgatcgtcggcgttgaaatgccaacattgtcgcatcagaatgtagatgttcatggagcatttcgctggtttctccatccgctgaccggacatgagataggtgtacagctcctcagcggacatgatagttggatatggttgctgcccataggtcatgatctcccacagcaggatgccatatgaccagacatcgctcttggaatcatagaatttctcctgcagcgactccggtgccatccatttgatgggtagcctgccatttgtgttcttccgatagtaatccgtgctttgaatgtccctcgccagtccaaaatcagcaatcttcagcacataatcatcgctgacgagcacattcctggctgccaaatctcgatggatgcatcgccgcgaggccaaatagtccattcctctggcaatttggtgggcaaatttgatcagatccttttcggttatcacatgagctggtggcgatggcggcggttgcgagctgtccctatcctgatcccttccgaagggtcgatttttatagaggaagtccttgagatttccgtgtggcgcatactcgacaatcacatagagcggaccattttgactgcagcaaccaagtaagttaataatattgatatgtcgcccaatgatcttcatcacttccatttcccgcaccaagctggcaatgtcatcatccgtgtgtccttccttcaccattttcacggcgacaatggcattattgacctccgccatgaccactcgtccgaaagcaccttctcccaaagtggcacccagtaccaaatgacttctgggcagttcccagttcgagtccagtggaaattcatattcattgaatggagccggctcgttgccattctgaagaacagtggtgcgctgtttctgtatcctaaccaccggcataatcatggtgtccatggaaccactggagtctccgccaccttcgggcttgaagatgatcactttcttggtccactggtgaacggtttcgatgcgttgtttcaacaccttttcatgtttcatctttcggatggcatagaacacaaacagggtggtcataaagatgaaaataagtccgccaaagacgaagatatacacgaagctggtcgagtgaagtgaaccactggcaactccggcttccaagacgtgaagacttcgcaccactcgcagatatgcagtgctattggattgacccaggctgttgctttcgacgcacgtgtaccagccctcctgctccatcctaacgttcacgaagtccaactgatccttatcctcggcaatgatggatcgattgttggagcagttggtcatgccatggcagggcacaaagatccacgccttcttgctggtcaagtccgatagatatttgcagtgcatgctgcctgtggaattgaccaccagtgtgagattcaatggaccggtcatcaggatcggtttgtgattaactcgatcgcttacaatcacctgggtgtcgtgacgaatgcaacccaatgaattgcacaccttgcaggtgtagttgccacaatcgcccggcaccagatcctccatcgtcagggtccatcgattccgcttcaggctcccatagccgcgcgtccagtcgacggtgccattgcgataccatgtgatattgggctcaggattgcccagggcatggcaattgagggtgagcagtgagcccgagggtcgcgtctgcagaaaactcatctttttgggattacgccagtagggtttcgaactgacattcaccggcaaatcggccttgttatcatcatcatctgcggcgccatcatccaaatccgcactggatgtgctcgattgattagcattgttcgtgatggctggtgtcttgttttgactcctggctcccaaatgatccttgatcatctcctggctattggccatttggcgtcgtccttcaacctgcacggctggctgccaaatcgaaagcaacaggaagagcactaccagcgatccgcttgtcattgtgatcgttgagtgactggctcgccaactccaggcggcagccatttttggtatatttatttttgtaactcttgccggaggcagggcagcaccctcgaatgtgcaacagcgagtgcaactggatgtgcaactgccactggatgtgcaactgcaactgcgacggcaactcccttgttggagttttgtcgcatgtgctgcttggttttttattcaccggaaatccactttagagtgctccgctctatatggaccgctctccctcttctttcgccagcgccggaagaagatcggtgatcttctagtttctaatttataatggaaaaaacaactgcaacagtggcctcttcagtgcaacatgtgtgcctttgaagtgatcctccactccacccacgattgcaatcggatgctgttgatgatgagatgaggccaagatgatcctctcgatgatcacctatctctcttctcgatgtaacggaaatactttcccccaaaaatcatctacttatgggggagggggggggggatgagatggctgctcgtgtgatatactcagtgagttgatggatctatggcagccatattgtcaccaaaggagctccactcgtgggcgtggatgacggtgagttccatagatcattcgatggcttctggagggtggattccttggatcgcttttgatgtgactgctgcaacacctgaaagaaagaatgcatgcgattagatttatgttcactttgggtgcataagtttagctacacgaaaactttcaaagatacaagaacatgtgcaaaaaatcggaaatcggaaatgtactagatacatccgctcaatttctttgactaaatgaatttcctttccattttgtttataggctcactcgcttgtatagtaagtaaactttcgattctttcgcagagattcgttttggtcttgactcgattaaaggccatttccatttggcgaacttaattaaaatgtcgcgcacatttccggtaacttgttcagcatttctcgtatacccgtttctgatttttgtccagcgcgtgccataaattaaaaatggtccagtggaatgagctcagaatgtacatataacaacaaatactgatggttttcatcttttacgcgttgcatattttatcgattttcaaaatagctttatggccacacaaaaatgtttcggctggcactctttttaataccgtcataaaataacgacctgtcttttcgtttacctttttggcgttggaaaattcttttcaacttgttgtcagtttacttaacgatgggattctatatatacacatacactgcgccctaaaatgtgattctatttttcgcacaactcactcacgtttttccgattttctagaagggattgcgcagatgtgtctgccgacttttgcgcttttcaaattcgaaattttgtgaatttttacggagccaagcgaaaaactgttccaaattggtccgcgtagtccgatgtactgaatatgcccaatgccaattccgattccaattctagtggtgatcgcgactattccgattctctacctctcttaaatctcccacactctctctctctcgctatctctctttaactccccggatccgatcgcccttctctctttcaccatctctctcccacacacaatgtcctactcaatgcgccggcgtcggaaaaggcgactcaatttagtgggccctcgagtcgcttccacttttgccgttatatttccaatgcctaataccctgtaatgtaagggtgaaatgggttatgcacgggtttgatcaaataagcaatcgaagtgatgatatgatcataagagtaaagcgttgaaagcttcgtgcatcgatattaagatcctttttaaacaaatctttttttgtgaaattattcaagtactaagtataatatatagatgatatacatttgttacctaatggcatgattggtatatattggtatatcattataaaggacattttttttttttcgagtaaagtcgagttgccaaattgccaggtatgctatagtcaataaattgacaagctcgctttttcattcacattgcggttctgttctgtttggatggtcgttgcctttagcgtcccgcatcttttcgctttcaacggcagccttaattttccacacatgccagccccgtctggctttgtatctcagtatcggcggtatctctcagtttgcactgggtattactctcatctttaattaaaacagacacagtttctctccgcgttctgggtctgatctttccagtccgcattcaacattcagcccacatctggcggacaaaaaaaaattaaagaaattaaaagcaacaaaaataacggccggcggagaagactactgtgttcagttgtctctgttctcccgcccccgtcgccacgcccacagtcagagtcagagcagagacaagggcaaatattgtttcggcttgcatttgttgctctattgttgactgcaacatgtgggcacatcatcagcatcgaacatacacgaatgtacatatacgtatgtctacctaagatcgtgccacatgtgttgcacagacattgtcgtcgattctcgaggggaagtagcgactccagcgtctaaatgatggggttatccgaaatgttgacttccaggaaggcatccgccaaatcggaaactgccaaaaattgtatatatgtttggtattctatctccaccctccgaccttcacctccatcgataatgagcgcgcaattttagtatatgtatgtatttcctgtgccgtccaaaatcgcccgatttataaacaaacacgttccggaaagtatttgcaaagtatacaaacattgcacggtatatgtacatttcccatcgaattgaaatcgccggtcacttggcgcatccatttcaatcgcacgggttgacccgcaattgacgcacttggcggttgccccgctgccgctcagtgtatccgataccaagtcgagaccggcacgagtctgttatttcgcacggttcgtcggcaggttccaccagccatcagccacccaatgccaatcccatccagccatccatccatccatccatccccacccgttcatctagtatataccattcagtacgtgacggcgagaaggttgcatcccatggggtaaacgaaaagaagcagatggagcgaaaggtcgattgtggcaagtcgactttatcaaaaacgcgaagctacgttaaattatcacaaagtatatgagtagtgaactattgattcgatttacatttcagaaatataaagcacgcagcgatttatataaagaacgttcaacagatttagttgaaataaatatgtgctattcttaaattgttgcaagctttacttatatatttgtaaatttgccatttagagctttaaaattttattagtactcacaaacatttagacaacaaaatccattataaaagtgctgtagcattgataagcttaagctataatatattataataccaaaaaataacattattactttattgttgacataaatctatttctaaatcgaaatctttatttggtaaacactgattttatgataaactctcatgaaaacatttaatattatatagcaagcatatattctcgtgacatttgtactttaacatcataaagatcaaaggatcataccgaaagtctgcgtggatcccacctgagatgatatgggaacaataccgggaactggccgcacaattagctaaacaaacctaaccttaattatcattcataaataaattgcagagaagggaggcgaaaagtaagaagcgtcttcggttgtcggccagcaaattgagtgattgccaaaggcaacaaaacagaagccgaatcacctagaagatggcatcgtaaagctaaccgaccgacaaaacagatacccgataaatatatatatatacatatatatacacacagatagctatatctttagctatatactcactcagatatagagcaagtcggacaaagagcagacaagttgaaatgtttgtttacgcggctagaaaatattgcatgttcctataccgtctacattctagaatctagactctagatgatacgatatatgctatatgctgttggttaataaacaaaatcccattctaagggagcgttggaatataacagaattatgagtttgaaatattttcccgagctctggggcatcggttggcttgtaaaagcaaataaataaatataaattagaatgggaaccctgtggaaaagtgctttcaatttgagcatgtaccatagcagaaccgaatggaataaataaaaaataaaaaaaacagatactatggggagcccacaactgtccatattcactgtattattatggggtagccagagaatagataattgaacgattgactacacacacacacagcgggataaacgacacaaattgctttggaaccgaaccactgcacattttacactttttggcctttgggttaaaaagtcaaattgctgtgcgcggtcaatcaaaaagtggatcaaacaaatgatttgcgcaactacgcaaaaaaaaccaaaaacaaaataaactaaattaaacgatgcacggtgtgtatttttaaagacttacctcacaaagtgcgttgctccacgaacaaaaaaaaaaaaatgccaaaaagcttcttgccaaatatccaccaaagtgtctctgcgttggaatttctccttgccttcgtctaaattgtaagtctttcactaaaaacacaattgggaaagttcacagaattcgagaatgtttccacttaaaattccagaaatgttttagtacgcatttatatggcacttaggcacttaaacagaaccagaaaccgttgcacacttgactctgttttgtttctttccatccacaaaatgtgtgcgttttcaccaagaggcattactaataattattagtataattatattatatggcgttattacgcgttcaatcgatcgatcgttcgctctaattttcgacgatttttcaccgattttccaacgattttccaaccgattttccaacgattttcctccgatttcgcctactgtaacggcacgcagtccgatcgcaactgagtcaaaaaaaagcaagcgaaccgaacagaaccgagccagctctgcgaaataaatctcttcaattaaatgagggaacaaatgaaacgaattcacatttcccccatcaacttcaacatgctggagaacacatctctgcaatgtatttttgcggcaggcgcgtaaacaaatacagaaaacacacaaaattgaacggaacgccagccacacattgtataatccgcagccaaagagaggaagggtcgaaaaagcgaggggttgggtatgcggtatatgtatgtatggtactatatggtataggggcccctataccctatatatgggggacccacacacacacacacacaagtgtgtagctgagtggcggccttcccttggaaagtgaaatgtaattgagtgcacagaccgcactcgttctaaaattcgttcaattgagtcgaatggaatatctcaaagatattctaacgcacaatatgttgcatagtttcgagcgcagcgaggaaattcatgaatttcattatgagggtgcaaagaagatgggtagttgtcaaaaagattccttatattcagatcaattatttatgtagttataattggtttgatggatcatgctttattaaaaagaatagctaacttatcttagtcagaatagatcagtcacttgaatttaattattattattttttaaaaagatttatggcctatgagggcctaagattctactgacaaattctttgcgcatttctttgcgcttcgtttgaggcggaaaatgcggaatgagattcattagccaacacaatagctcgctaagtaagttagcagttattaattatgagctacttatagccaatgtcaaatggccaacagacacataagaaccagtagccaagtggcgatggaagaaagcccctctaatgaatgacactcgtggtgaaaaggccatcaaagcacacacgctgtgcgccaaagacaatggcatcgtttagcgtttgtctctatggag

SEQ ID NO: 16097 - DNA, 3842 bp, DROSOPHILA
tcagttgcgatcggactgcgtgccgttacagtaggcgaaatcggaggaaaatcgttggaaaatcggttggaaaatcgttggaaaatcggtgaaaaatcgtcgaaaattagagcgaacgatcgatcgattgaacgcgtaataacgccatataatataattatactaataattattagtaatgcctcttggtgaaaacgcacacattttgtggatggaaagaaacaaaacagagtcaagtgtgcaacggtttctggttctgtttaagtgcctaagtgccatataaatgcgtactaaaacatttctggaattttaagtggaaacattctcgaattctgtgaactttcccaattgtgtttttagtgaaagacttacaatttagacgaaggcaaggagaaattccaacgcagagacactttggtggatatttggcaagaagctttttggcatttttttttttttgttcgtggagcaacgcactttgtgaggtgttgcagcagtcacatcaaaagcgatccaaggaatccaccctccagaagccatcgaatgatctatggaactcaccgtcatccacgcccacgagtggagctcctttggtgacaatatggctgccatagatccatcaactcactgagtatatcacacgagcagccatctcatccccccccccctcccccataagtagatgatttttgggggaaagtatttccgttacatcgagaagagagataggtgatcatcgagaggatcatcttggcctcatctcatcatcaacagcatccgattgcaatcgtgggtggagtggaggatcacttcaaaggcacacatgttgcactgaagaggccactgttgcagttgttttttccattataaattagaaactagaagatcaccgatcttcttccggcgctggcgaaagaagagggagagcggtccatatagagcggagcactctaaagtggatttccggtgaataaaaaaccaagcagcacatgcgacaaaactccaacaagggagttgccgtcgcagttgcagttgcacatccagtggcagttgcacatccagttgcactcgctgttgcacattcgagggtgctgccctgcctccggcaagagttacaaaaataaatataccaaaaatggctgccgcctggagttggcgagccagtcactcaacgatcacaatgacaagcggatcgctggtagtgctcttcctgttgctttcgatttggcagccagccgtgcaggttgaaggacgacgccaaatggccaatagccaggagatgatcaaggatcatttgggagccaggagtcaaaacaagacaccagccatcacgaacaatgctaatcaatcgagcacatccagtgcggatttggatgatggcgccgcagatgatgatgataacaaggccgatttgccggtgaatgtcagttcgaaaccctactggcgtaatcccaaaaagatgagttttctgcagacgcgaccctcgggctcactgctcaccctcaattgccatgccctgggcaatcctgagcccaatatcacatggtatcgcaatggcaccgtcgactggacgcgcggctatgggagcctgaagcggaatcgatggaccctgacgatggaggatctggtgccgggcgattgtggcaactacacctgcaaggtgtgcaattcattgggttgcattcgtcacgacacccaggtgattgtaagcgatcgagttaatcacaaaccgatcctgatgaccggtccattgaatctcacactggtggtcaattccacaggcagcatgcactgcaaatatctatcggacttgaccagcaagaaggcgtggatctttgtgccctgccatggcatgaccaactgctccaacaatcgatccatcattgccgaggataaggatcagttggacttcgtgaacgttaggatggagcaggagggctggtacacgtgcgtcgaaagcaacagcctgggtcaatccaatagcactgcatatctgcgagtggtgcgaagtcttcacgtcttggaagccggagttgccagtggttcacttcactcgaccagcttcgtgtatatcttcgtctttggcggacttattttcatctttatgaccaccctgtttgtgttctatgccatccgaaagatgaaacatgaaaaggtgttgaaacaacgcatcgaaaccgttcaccagtggaccaagaaagtgatcatcttcaagcccgaaggtggcggagactccagtggttccatggacaccatgattatgccggtggttaggatacagaaacagcgcaccactgttcttcagaatggcaacgagccggctccattcaatgaatatgaatttccactggactcgaactgggaactgcccagaagtcatttggtactgggtgccactttgggagaaggtgctttcggacgagtggtcatggcggaggtcaataatgccattgtcgccgtgaaaatggtgaaggaaggacacacggatgatgacattgccagcttggtgcgggaaatggaagtgatgaagatcattgggcgacatatcaatattattaacttacttggttgctgcagtcaaaatggtccgctctatgtgattgtcgagtatgcgccacacggaaatctcaaggacttcctctataaaaatcgacccttcggaagggatcaggatagggacagctcgcaaccgccgccatcgccaccagctcatgtgataaccgaaaaggatctgatcaaatttgcccaccaaattgccagaggaatggactatttggcctcgcggcgatgcatccatcgagatttggcagccaggaatgtgctcgtcagcgatgattatgtgctgaagattgctgattttggactggcgagggacattcaaagcacggattactatcggaagaacacaaatggcaggctacccatcaaatggatggcaccggagtcgctgcaggagaaattctatgattccaagagcgatgtctggtcatatggcatcctgctgtgggagatcatgacctatgggcagcaaccatatccaactatcatgtccgctgaggagctgtacacctatctcatgtccggtcagcggatggagaaaccagcgaaatgctccatgaacatctacattctgatgcgacaatgttggcatttcaacgccgacgatcggccaccttttacggaaattgttgagtatatggacaagctgctccagacgaaggaggactacctcgatgtggatatcgccaatctggatacaccgccctcgactagcgacgaggaggaagatgaaacggacaacctgcagaagtggtgtaattattaaacgaatcaggatccttagatgagatcaggacaattcaagcctggtttttgaaccaaagtcaaattgttaactagagattatgaagtgtcctttagggtgaatcctaataaatcttcgaaagatctaaggcttgcataaaaaaatcctacaaatcatactacactcgaatttatgtatataactctcatttaagtctgtaaatctcttgaaacattttaccaaaattgcaccaaaggcgtaaaaccaaaaacaagcagctactcgaatttacttttagtttaatgttgatttaagatattaccataaaacatctactagtatatgcgtagttctaagttgaacttaagactcggttgtatttgctgttgtatttcatattgtactgatctttgtagtattcgcagttttatactcgctaaattatactcgtagcccataaacataaatgttctatcttagcgttagttgcatgccgcagtgccttatgaaacaaataaatgttgtacacgaatcccaa

SEQ ID NO: 16098 - protein, 729 aa, DROSOPHILA
MAAAWSWRASHSTITMTSGSLVVLFLLLSIWQPAVQVEGRRQMANSQEMIKDHLGARSQNKTPAITNNANQSSTSSADLDDGAADDDDNKADLPVNVSSKPYWRNPKKMSFLQTRPSGSLLTLNCHALGNPEPNITWYRNGTVDWTRGYGSLKRNRWTLTMEDLVPGDCGNYTCKVCNSLGCIRHDTQVIVSDRVNHKPILMTGPLNLTLVVNSTGSMHCKYLSDLTSKKAWIFVPCHGMTNCSNNRSIIAEDKDQLDFVNVRMEQEGWYTCVESNSLGQSNSTAYLRVVRSLHVLEAGVASGSLHSTSFVYIFVFGGLIFIFMTTLFVFYAIRKMKHEKVLKQRIETVHQWTKKVIIFKPEGGGDSSGSMDTMIMPVVRIQKQRTTVLQNGNEPAPFNEYEFPLDSNWELPRSHLVLGATLGEGAFGRVVMAEVNNAIVAVKMVKEGHTDDDIASLVREMEVMKIIGRHINIINLLGCCSQNGPLYVIVEYAPHGNLKDFLYKNRPFGRDQDRDSSQPPPSPPAHVITEKDLIKFAHQIARGMDYLASRRCIHRDLAARNVLVSDDYVLKIADFGLARDIQSTDYYRKNTNGRLPIKWMAPESLQEKFYDSKSDVWSYGILLWEIMTYGQQPYPTIMSAEELYTYLMSGQRMEKPAKCSMNIYILMRQCWHFNADDRPPFTEIVEYMDKLLQTKEDYLDVDIANLDTPPSTSDEEEDETDNLQKWCNY

SEQ ID NO: 16099 - DNA, 3176 bp, DROSOPHILA
tgtaagatttgttggttcaggcaagtgcccttacttaccccggatatcgcattcgggagagcttcctgtttcggaatgcgggaggatccatgctgcattgtctgcgaaaatattcattatttatcaaatttgttaaattataatttcattcatttatcatgatgtgttgcaattataactttttaagtaacactttatcaaaaccagataaaattaaaaaaattatttatattagaactacattttgtctttaataaatgaaaaatcttacttaaagtaccgtaattaccgttagaatcgtttatatgtcgaaaatcatatgaaagatggtattctttgatataaccttgttgacgacgaaagagcttaacttgacctgggatcaaatgaatctgatcttcgatcgcacattttctagccgtgtatgcgcatgtatgtgtgcctcacgtaatggcgtaccacgtagtaattgtcattacaaatagaagtgggagttaccaaaagcgatcaaataaaggactcgtaatttgaaatacaacctttttgagggtagattaaatgtctttcattataacacattgataaaacatgtatggtttcttaaatgttcaacactattacagtaaatttctagacctgaaaaccaggtttaaagtgcgcctaggttttctcgattcccgacttacttttcactaattttaaatcccgtctttggaccgcaatttacgcattgcaattcgccactctcacgtatttacacatgtttactttcgactattgttcagtacccgactttgcagtatttggccattgatggattgatggaacgcccagagttaatttggcttcaagccaggcctaaaaagagactaaaagaaagccaatcacaggcaaaattggcaacaggtttcgagctgggttgccgtacctgcgacagctaacggtgaagccgatagtctgcattattgctccaacagaagtacggtcactctacaagtaggcaacgaattttgtttgtcatcggcatttcgcattcaacgtttccaattgttttttaaggagctttaagaatggctttagctgaaatctgcaagatatcgaatgctccgtacatgcggcccaatgcctggtcatcggcggatgtggaggaagagcaaaaagggcttatgtgcaatctggccaatccctacacactggctgctccgccattcgagaacgtatgtagttaattagctgatcttcttgggaaatttactaaaaaatttgacaatttcctcagcccctgcacaaccttaatcagatccaggccaatggcgacaagaccggcgtcaaaatcaacttcgatcacggcaccacaacgttgggcttcaagttcaagggcggcgttctcctggcagtcgattcccgtgccacgggtggatcgtacattggctcccagtcgatgaagaagatcgtggagatcaatcagttcatgctgggcaccttggccggtggcgcagccgattgcgtttactgggacagggtcctttcgaaggaatgccgccttcacgagcttcgaaacaaggaacgcatctcggtggccgccgccagcaagataatggccaacattgcccacgaatacaagggaatgggtctgagcatgggcatgatgctggccggttacgataagcgtggtccaggcctctactatgtggactccgagggatctcgcacgcctggcaatttgttctctgttggtagtggatcgctgtacgcctacggtgtcctggactctggctatcattgggacctggaggacaaggaggcccaggagctgggacgtcgcgccatctaccatgccaccttcagggatgcctactccggtggtatcattcgcgtgtatcacattaaggaggacggctgggtaaacatctccaacaccgactgcatggagctgcactacatgtaccaggagcagttgaagcagcaggccgctaagtagagttttgattaagggaatataagatattcagtttgtatacgtttgaatttcttggaataaataaacgtgctagagactatgttttgtgtataattgattgggctaatttgttttgcttttcataggtttattactataaatgtagttgtatgtatgtaatgtatttttggtaaatataacaagtacgcatatattaatagtttaggtttccttattctttttttgctgtgagatcatttgcaatgtttccttgtgtcgcacttccgctcgtttttgcttgaatgtccgctttccgcccttggtttccactcgctttcttcgcaggactccccgttccattgcgcttcgaagttcctgctcggcatccaagtacgaaggtatgtggatctgccgtatcattcgattccgcaccataaagtgatcaaaggggtgctgaccaccattgcgatcgatgaaaactgcatgggtgagctcgcaggtcatgtgtccatccgctacatcgatgattccggccacagaggtctcgttgtgcagatcgatcagtacggaatgaccctgcagcatcacgggccaacaatttaaggtgttggacaccaaatacttctcccgcgcactaaactgctgcattatatcgatatgtttaaaaataagtgtttgctcttggacacggagctgccaactcgcttcataagtaatttgacattttcattaattagttttgaactacatctaagagaagtacttacggaagttttcaagtaaaggttttttccctttttcacgtttgcgtgacggtcgtgtaaaacagttttggcaaacaaatccagctatggtgcgtatgaacgtattggccgatgccctgaagtgcataaacaacgccgagaagcgtggcaagcggcaggtgctgctgcgtccctgctccaaggtgatcatcaagttcctgaccgtgatgatgaagcatggctatatcggcgaattcgagatcgtcgaggatcaccgtgccggcaagatcgttgtcaacctgaccggtcggctaaacaagtgcggcgtcatctcgccccgcttcgatgcgcccatcaacgacatcgagaagtggaccaacaatctgttgccctcgcgtcagtttggttacgttgtgctcaccacctctggcggcatcatggaccacgaggaggctaggagaaaacatttggga

SEQ ID NO: 16100 - DNA, 1114 bp, DROSOPHILA
gcaacgaattttgtttgtcatcggcatttcgcattcaacgtttccaattgttttttaaggagctttaagaatggctttagctgaaatctgcaagatatcgaatgctccgtacatgcggcccaatgcctggtcatcggcggatgtggaggaagagcaaaaagggcttatgtgcaatctggccaatccctacacactggctgctccgccattcgagaaccccctgcacaaccttaatcagatccaggccaatggcgacaagaccggcgtcaaaatcaacttcgatcacggcaccacaacgttgggcttcaagttcaagggcggcgttctcctggcagtcgattcccgtgccacgggtggatcgtacattggctcccagtcgatgaagaagatcgtggagatcaatcagttcatgctgggcaccttggccggtggcgcagccgattgcgtttactgggacagggtcctttcgaaggaatgccgccttcacgagcttcgaaacaaggaacgcatctcggtggccgccgccagcaagataatggccaacattgcccacgaatacaagggaatgggtctgagcatgggcatgatgctggccggttacgataagcgtggtccaggcctctactatgtggactccgagggatctcgcacgcctggcaatttgttctctgttggtagtggatcgctgtacgcctacggtgtcctggactctggctatcattgggacctggaggacaaggaggcccaggagctgggacgtcgcgccatctaccatgccaccttcagggatgcctactccggtggtatcattcgcgtgtatcacattaaggaggacggctgggtaaacatctccaacaccgactgcatggagctgcactacatgtaccaggagcagttgaagcagcaggccgctaagtagagttttgattaagggaatataagatattcagtttgtatacgtttgaatttcttggaataaataaacgtgctagagactatgttttgtgtataattgattgggctaatttgttttgcttttcataggtttattactataaatgtagttgtatgtatgtaatgtatttttggtaaatataacaagtacgcatatatt

SEQ ID NO: 16101 - protein, 282 aa, DROSOPHILA
MALAEICKISNAPYMRPNAWSSADVEEEQKGLMCNLANPYTLAAPPFENPLHNLNQIQANGDKTGVKINFDHGTTTLGFKFKGGVLLAVDSRATGGSYIGSQSMKKIVEINQFMLGTLAGGAADCVYWDRVLSKECRLHELRNKERISVAAASKIMANIAHEYKGMGLSMGMMLAGYDKRGPGLYYVDSEGSRTPGNLFSVGSGSLYAYGVLDSGYHWDLEDKEAQELGRRAIYHATFRDAYSGGIIRVYHIKEDGWVNISNTDCMELHYMYQEQLKQQAAK

SEQ ID NO: 16102 - DNA, 2978 bp, DROSOPHILA
gactaatatatcaattttgtgtaattaaagaggtaaacatatttatgaaaagtatatcttaattatgtgttgaactaccatcacctagttcatagtttatattacagtcttaaattgatttttgtgtttgtcggacatgctggccaatgtgataattctgggagtttttgtggctgtcgtttttttggtttacagcgtaagattgcccgatattgtttttaataaaatgtagaaagtatatttacttctttaggattcggctatggttaaaatgacaaatgttgtttgtgaatcatatgataaatcgttgaccgtttttcattactgtcgattgaaggcctattccaggaccaagactagtttgcacataaatgcaacctttttgcatccaatcaatagcatatctgtcagatttcagatgctgaagagggccaatggttacaagccttttcttttcgatatcaccgtcgatgcctgccaatttttgcgaaaaccaaataatcccgtcattaaaatagtttataatatgataaaggatgcatccaacatcaaccattcttgcccgtatgtggtaaggtttttaatcaaaataatatacaattatatatccttttttggtcgatttgcagggtacggtggtacttaacgattttcatcgcatttcactaccccttccatttccctctggagattatttatcacgcctagactttctaattaatggtaaaacgaagttctatgtaaatgtaaatatgcatgtaccagaggacttataaattgaaggcttatttgtgtttaactgacttgttaactggcaatgaggagtggaaataaaatagtttgatttaattactacaaggcatttcaacataaaaaactgtctttatttggatgatagacttataattcgtataaattgtacattcacatgtttctgtcgagatccgacatttataaatatcataaagtattcataattttgtttaaagatctaacaagttcacagttcctccttttccggcgctgtcttggtgaccttgtgaaccctgaagacttccaggatgttcagtttcctcagcagctcctccttcttggcctcggtgaccttgccggccttgaggcgcaggagtcgcttggtctcctcctccaggaaatcgtagcccacctcgtggatcttccgcatgtagatcagataggccctggcgttctgctgctgctcgggatcggtcagctgctcctgcttggcctgcagcttttcgataagcttcagttgctctgcatcggggatattggcatagttcttgagcacttcgttgaactctttgatgcagccatcacgaccgatgtacagaggtgtgttggcactgacaaaagccttcagattgtccagcgttacgtcgacgtggctaggaagctggacgtactcatcagcgttgcccttgaacaggaagatactcgggaagttcttgtcgtcgactttgtaacggtcgcccagggcctgcaaattgggattaaaaagttgaaataataaataaatcaaatttaaagtgcttttaaataatttaaatagcacagagtctttagaagggcatccaagctttaggctgcaatccaggattccaaatgaacagagcagaaaccacattttttccaatcattaccacatatctaaatcctaggtaatccataaaataaaactcaccttgttctccagttctccatagtccttgacacccacggtggctattagcagatctttagttgccttgtgggcagatttggagaaggcggtaaaggcctcatgcttttccccatacggatatgcgatatcaaatttcactacggagtagggaaatcgttccaccgtcttctcgaaactcagctcatccagatccacgcagcccgtgcaggtgacggcccaggtggtgggtatcgagtggatagcgaccaggagcagagtcaccaaaatatgcatcatcttcgtggcaaaaaccagagacttctgaacttgaccctactcttgccgtttgtcagcgcaaactggctaaaaacgagcgcgagaagagcggtaaagttgtattcgagttcgagttttgggccagtttacgcttcgctcagctgaaattgtttggctgctttggccaactcactcagttctggactctctggtagtctgaaatgctctgaagttctcgtctccacaatttctcgatcgagttgaatgacacgtcagtgaatagaagcggctctctcactcaaaaccggctatttcgttgaccaactcttgttgttagttcagctgttttggctgtgggtctattgtaacacttgtagggagatttattatataatgcctggtacttaatgcgtgtgcctcgtttttgactgtcgcttttaaacgtagaaataattgtcatcccaatagctggggaatgaacattgatgccaagctgatagaaaatatatttcggccaaaaacgatcagttggccaatagagcgtgccacattaaaccagagcaattagccatgttcacaaaactgacagtgcaagcgaagtccacaggaagtggtaatttgcaactgtacatgagtgttttcgggtctttcgaattgtggataccctttaaaggtatatatatgaaattcaactcctttcaatcacaagatttcttatttatacgttttagtaacttaactttacaaatgaactatgcattaaagtatctctacatacaatgaattgacatagtagccgatcgactctttagaagtttgctaaggaaaatggaaacacctgccagtggacggaaaaacggggttagtttgccataattttcattagcctggaattgaaattttcccggcacccgatcccacccccaattccgtgctccttcccttttgtcccggttaatggacattttcggcaattgtcaattaataattcatgtatgcggcacacatgttggtcacctca

SEQ ID NO: 16103 - DNA, 774 bp, DROSOPHILA
atgatgcatattttggtgactctgctcctggtcgctatccactcgatacccaccacctgggccgtcacctgcacgggctgcgtggatctggatgagctgagtttcgagaagacggtggaacgatttccctactccgtagtgaaatttgatatcgcatatccgtatggggaaaagcatgaggcctttaccgccttctccaaatctgcccacaaggcaactaaagatctgctaatagccaccgtgggtgtcaaggactatggagaactggagaacaaggccctgggcgaccgttacaaagtcgacgacaagaacttcccgagtatcttcctgttcaagggcaacgctgatgagtacgtccagcttcctagccacgtcgacgtaacgctggacaatctgaaggcttttgtcagtgccaacacacctctgtacatcggtcgtgatggctgcatcaaagagttcaacgaagtgctcaagaactatgccaatatccccgatgcagagcaactgaagcttatcgaaaagctgcaggccaagcaggagcagctgaccgatcccgagcagcagcagaacgccagggcctatctgatctacatgcggaagatccacgaggtgggctacgatttcctggaggaggagaccaagcgactcctgcgcctcaaggccggcaaggtcaccgaggccaagaaggaggagctgctgaggaaactgaacatcctggaagtcttcagggttcacaaggtcaccaagacagcgccggaaaaggaggaactgtga

SEQ ID NO: 16104 - protein, 257 aa, DROSOPHILA
MMHILVTLLLVAIHSIPTTWAVTCTGCVDLDELSFEKTVERFPYSVVKFDIAYPYGEKHEAFTAFSKSAHKATKDLLIATVGVKDYGELENKALGDRYKVDDKNFPSIFLFKGNADEYVQLPSHVDVTLDNLKAFVSANTPLYIGRDGCIKEFNEVLKNYANIPDAEQLKLIEKLQAKQEQLTDPEQQQNARAYLIYMRKIHEVGYDFLEEETKRLLRLKAGKVTEAKKEELLRKLNILEVFRVHKVTKTAPEKEEL

SEQ ID NO: 16105 - DNA, 2750 bp, DROSOPHILA
tgttgactcacgccattgttcgtggggagcctttgtgcgccctgcactgcgctaattctgcatctcattaataaagagcgcttaaagccggctatgccagccggcaatggcaatcaagactcgtttcgcgattgtcggccggcggggccaaagtccagtgagttcacttggacgagaaatgttcatgtgggtctcatgtaccgacaaagaaatgcgtcgcaaataatcttagttactaactaacatgcagatttgccaacctgcccgtggagaatctggcagtgcatcacctttcgccgccgccggagaaatactggagcatgatggcctacaacaatgccaagctatgcaatgtcttgttcgcccaggagctcgcccaggtgagtccttaaattgggtcaattgaattccacttgccaaccctttttttttgtttttttgttgcagcgttggaagcagcgaggcatttctgtttttagcctgcatccgggcaatatggtgtccagcgatttgtcacgaaactattggttctaccgcctgctctttgccattgtgcgtcccttcaccaagtcgctggtgagtttggcaatgagaagaactctctgttttcccttaactttcactaattgctttctgtgccccatatggcagcaacaagcggctgccacgagtatctactgtgcgacggccaacgagctgaccggattgtctggactgtacttcaacaattgcttcttctgcgagcccagcaagttgtccaaaagtgctgcactgcagcagcaactgtggaagctgagcgagaacctgattgccgagcttgtggagcaggagcagcattagccaagtcatttggctactgttttttaaatatatttatgcattatgctaccaccaatgattccattaggtataattttacattttaaaccagctattcattacaaagatatattttgaattctttaatagtttctgcccaataagtgcaatgcaaataaacttttgtacgttaagaatatcatgtattttctttttacactaaacaagtatacattttgatttgtttttaagtcttaatggctagcatttaaataacagtctaagtactagttaaggaactcttcatttgggcactagaaatcggagacgcgtcccttgcgctcccagtcgccgtagcgtgtgggctccggcccggctggtccgccgatctcgcccgtatacggattggtctgattgggccagggcttgagtggttccttctcctggtacggatgtcgcgagaattcatccagcttgcccagcggcgttttagcgcgcagcttcttctggaaggccattagcttctcggtgcgcgtctttggttccttgatctcgaccaccatgtcgccaccgctggcggttgcccgccaagcgccactcgtcgatagatagctcactgttaatgaaaaattgaaagaacgttagcatcgccactccagcacagtgcgcacacacacacacacacacacacacacaccttgtttgcccatttggggcaggactcgcgccgtttgtctggtcacggattgcattttgttttttgtttggatttcctttatcggttatgcaagatgatgccggcgaatcttcgtttttgttcgcttcttagtcgcagttacactttgtgtgtttactcaaaagtctcactttcggctgggagtcaatgtcacttgcttgttgcttcgcgtctgaattgcaatctgcgaggctgcgtttcgcttttatagcccgcgttgcttgtttagttgctttatttattgtgccatatgttgtggtggcactgaaaatgtactaaatatagccatacaatacgcacagcggagacgcacaccagggtgcatgactgtgctaggcattgagctgtaactctagctacatgctatctggcaacgctggcttttaaatttaaatccgttattgaaagaaagaaactgcgaaaaatattgcaactttatttattttaagtgcattcaaccatttactcaagacatttaacagttagttgcatttattttttattacgccttaatggtatagtactatcacacttcttaaaatctattgcaaatttgtttgctcacttctgcataataattaaattcaaaaatgttcaaaccatttcttaatatattatcaactggcattttttatcagtttttttttttttttttgtataagaaaccgacgtataatcgcgcctatctggagtttgtaatgttctatatgcttttcattatgttgtcatattaaagacatgtaaagctgattagagccatcgatcgttgaaatccagcgagctcacccttttcattttatatcaaaggttagttgcacggctataaggtcgcccagtcgccctgttcttatcgcaaagtcccatcggtaattgagagcaggcgattaggaattgggtcccggacattatcttggcttatcaaccaaataagttaagaagccgaaatcgtaaagggctactgaaattactctggagtttgcttttgctttatattacttgcaatgcgagtgctttcggttcataaatccctactattttaaacactcgcggtatcgttaaatggtaaccccagattcagaagccgatgaacccaggcattatattaaaactttgcgcgactttaaacactataaactcgaggaatactgagaaaaatactttgagcttatagaacatcaactacaacaattaaata

SEQ ID NO: 16106 - DNA, 669 bp, DROSOPHILA
cagcctcgcagattgcaattcagacgcgaagcaacaagcaagtgacattgactcccagccgaaagtgagacttttgagtaaacacacaaagtgtaactgcgactaagaagcgaacaaaaacgaagattcgccggcatcatcttgcataaccgataaaggaaatccaaacaaaaaacaaaatgcaatccgtgaccagacaaacggcgcgagtcctgccccaaatgggcaaacaagtgagctatctatcgacgagtggcgcttggcgggcaaccgccagcggtggcgacatggtggtcgagatcaaggaaccaaagacgcgcaccgagaagctaatggccttccagaagaagctgcgcgctaaaacgccgctgggcaagctggatgaattctcgcgacatccgtaccaggagaaggaaccactcaagccctggcccaatcagaccaatccgtatacgggcgagatcggcggaccagccgggccggagcccacacgctacggcgactgggagcgcaagggacgcgtctccgatttctagtgcccaaatgaagagttccttaactagtacttagactgttatttaaatgctagccattaagacttaaaaacaaatcaaaatgtatacttgtttagtgtaaaaagaaaatacatgatattcttaacgtacaaaa

SEQ ID NO: 16107 - protein, 118 aa, DROSOPHILA
MQSVTRQTARVLPQMGKQVSYLSTSGAWRATASGGDMVVEIKEPKTRTEKLMAFQKKLRAKTPLGKLDEFSRHPYQEKEPLKPWPNQTNPYTGEIGGPAGPEPTRYGDWERKGRVSDF

SEQ ID NO: 16108 - DNA, 2682 bp, DROSOPHILA
ctggcaatttgttctctgttggtagtggatcgctgtacgcctacggtgtcctggactctggctatcattgggacctggaggacaaggaggcccaggagctgggacgtcgcgccatctaccatgccaccttcagggatgcctactccggtggtatcattcgcgtgtatcacattaaggaggacggctgggtaaacatctccaacaccgactgcatggagctgcactacatgtaccaggagcagttgaagcagcaggccgctaagtagagttttgattaagggaatataagatattcagtttgtatacgtttgaatttcttggaataaataaacgtgctagagactatgttttgtgtataattgattgggctaatttgttttgcttttcataggtttattactataaatgtagttgtatgtatgtaatgtatttttggtaaatataacaagtacgcatatattaatagtttaggtttccttattctttttttgctgtgagatcatttgcaatgtttccttgtgtcgcacttccgctcgtttttgcttgaatgtccgctttccgcccttggtttccactcgctttcttcgcaggactccccgttccattgcgcttcgaagttcctgctcggcatccaagtacgaaggtatgtggatctgccgtatcattcgattccgcaccataaagtgatcaaaggggtgctgaccaccattgcgatcgatgaaaactgcatgggtgagctcgcaggtcatgtgtccatccgctacatcgatgattccggccacagaggtctcgttgtgcagatcgatcagtacggaatgaccctgcagcatcacgggccaacaatttaaggtgttggacaccaaatacttctcccgcgcactaaactgctgcattatatcgatatgtttaaaaataagtgtttgctcttggacacggagctgccaactcgcttcataagtaatttgacattttcattaattagttttgaactacatctaagagaagtacttacggaagttttcaagtaaaggttttttccctttttcacgtttgcgtgacggtcgtgtaaaacagttttggcaaacaaatccagctatggtgcgtatgaacgtattggccgatgccctgaagtgcataaacaacgccgagaagcgtggcaagcggcaggtgctgctgcgtccctgctccaaggtgatcatcaagttcctgaccgtgatgatgaagcatggctatatcggcgaattcgagatcgtcgaggatcaccgtgccggcaagatcgttgtcaacctgaccggtcggctaaacaagtgcggcgtcatctcgccccgcttcgatgcgcccatcaacgacatcgagaagtggaccaacaatctgttgccctcgcgtcagtttggttacgttgtgctcaccacctctggcggcatcatggaccacgaggaggctaggagaaaacatttgggaggcaaaattctcggcttcttcttctagagacaccaagttcacatcgtagagggatggagtttgatatgtagattgacgttttatttcaccgaccatgcatccaactatgtactttgtgcacaggaaacaaagggcgaaaacgctactacgttcattcagaaaacaaacgacgatgaatgttcacaaagttacgcgaaataaaatgaaaaatttggacatctaatatcgaaataatgagtttactttttaatcttccagcttcaacatttcctacgtttaaacttttatgtgtaaacaattggacgattgtgtggtattataggcgaatttcatgtaaactgcacttgcaaaaattatacgtgcacaaattgaactctaatcttaagggtaataaaatactaaacttaaatagctgttccccgctccaaattttgtttgatctcggctgtatgctcgctgtagaagcggtccagctttttgttgaacttggaattcctctcgttgatgaagtccacatccgcatcgtcgttgtagatcctcctgcgagagtacttcttgcggcgctctatctgctgctccaggtctgttaccattttgttaatagcacctggagtgtccttcgtcctcgaatgcaaagtggtgtgtgctccaccgtagaaggcgtcaccgagttcctccttctggcgctcgtacttttccaaatcgcgagcaggcatactcttgaccaatcggttgtactgtctagctgtttgagcttcgtatgtggagaaaccaagatctggattgtctttacgcttcttctttttctcaatgcgatccgcatccacagcggatacctccaaaagcttcaaacgctcgtaatccttgccagctgcctgcgcctcggctcgcgccttgtcgtccgctagtatccattccgcctgtcgcttgcgagcctcccagttcttggggagcttcttgcgagcgtcctctgccaccacttcctggtggttgtccgtacgcgcctcctggcgcttcttgtgtaggtccagcaaacgcgccttgcgctccgccaatttttcggcagccgttttcgtcttttccataggtaatttttattaaaaacttgttttgtttttagaaattgtgaaaatgcgttgttttcctttctttgatattttggtcggttttgggccgcgttggcagcaccagtaaaaacatctgtttcggagcgtagtacag

SEQ ID NO: 16109 - DNA, 682 bp, DROSOPHILA
agaagtacttacggaagttttcaagtaaaggttttttccctttttcacgtttgcgtgacggtcgtgtaaaacagttttggcaaacaaatccagctatggtgcgtatgaacgtattggccgatgccctgaagtgcataaacaacgccgagaagcgtggcaagcggcaggtgctgctgcgtccctgctccaaggtgatcatcaagttcctgaccgtgatgatgaagcatggctatatcggcgaattcgagatcgtcgaggatcaccgtgccggcaagatcgttgtcaacctgaccggtcggctaaacaagtgcggcgtcatctcgccccgcttcgatgcgcccatcaacgacatcgagaagtggaccaacaatctgttgccctcgcgtcagtttggttacgttgtgctcaccacctctggcggcatcatggaccacgaggaggctaggagaaaacatttgggaggcaaaattctcggcttcttcttctagagacaccaagttcacatcgtagagggatggagtttgatatgtagattgacgttttatttcaccgaccatgcatccaactatgtactttgtgcacaggaaacaaagggcgaaaacgctactacgttcattcagaaaacaaacgacgatgaatgttcacaaagttacgcgaaataaaatgaaaaatttggacatct

SEQ ID NO: 16110 - protein, 130 aa, DROSOPHILA
MVRMNVLADALKCINNAEKRGKRQVLLRPCSKVIIKFLTVMMKHGYIGEFEIVEDHRAGKIVVNLTGRLNKCGVISPRFDAPINDIEKWTNNLLPSRQFGYVVLTTSGGIMDHEEARRKHLGGKILGFFF

SEQ ID NO: 16111 - DNA, 4679 bp, DROSOPHILA
tttaagtgcattcaaccatttactcaagacatttaacagttagttgcatttattttttattacgccttaatggtatagtactatcacacttcttaaaatctattgcaaatttgtttgctcacttctgcataataattaaattcaaaaatgttcaaaccatttcttaatatattatcaactggcattttttatcagtttttttttttttttttgtataagaaaccgacgtataatcgcgcctatctggagtttgtaatgttctatatgcttttcattatgttgtcatattaaagacatgtaaagctgattagagccatcgatcgttgaaatccagcgagctcacccttttcattttatatcaaaggttagttgcacggctataaggtcgcccagtcgccctgttcttatcgcaaagtcccatcggtaattgagagcaggcgattaggaattgggtcccggacattatcttggcttatcaaccaaataagttaagaagccgaaatcgtaaagggctactgaaattactctggagtttgcttttgctttatattacttgcaatgcgagtgctttcggttcataaatccctactattttaaacactcgcggtatcgttaaatggtaaccccagattcagaagccgatgaacccaggcattatattaaaactttgcgcgactttaaacactataaactcgaggaatactgagaaaaatactttgagcttatagaacatcaactacaacaattaaataaacatcatataatatattatatcataggatatgagtattatcacgtctcattatatgcaaaacactttgattttggaaaagtcttaacagtgatcactttctttcagtgtcgtaattaacattttccgaagttctgtatcattttattccgacatttatgtttatttttcaggcccgttctatatagccgtctggtcggattgaaaacattttccaacctccagttcagttcagtcgttatcaagtcggcactcgaagtggttggatcgccaacacccaagaccaagaattacaaattacagatccattccgtcagatcgcgaggagtattgaacgtactacacaaatagtgccacactttccttagactcgattccaaccggaatgtttgcaacttgagttgcattatcagaggtgccagagataacctccaccctgctgcgtggacttggactcggatcagatcagatcagatcgaatcgcatcagacatcataaggaagtgggaggaatcagacagtctgcacatttagcagccagacgaaatatcatctcgagcaaagaccacatttaagtgagtttttaaagcgaaaagaaataaaaaagtccattagatcatttataagttaggaaatatacaatcgttatttaattagagagcataaaaattaaataaaaattagttaggcctataattcatagagataagattaagccataataaccattttaaaagtattttaaatatctattaaaaggagtgaataaactcatacttacgggtgaataacttaagtggaaacataagtactataatgtacaaatcgttaataatattcgttaataatacttcgttacttttaaacattttatcaatgtcgcattcattcattattatatgtaattagtttcattacaaatattcatgatctatttaaatgcgagtacatcgttaatctaataattatccctactcctaaaagaagaaatggaaccaagttatatgtaaataagtctaatggtaatgacttaccataatggccagcaatcttagttaattgcaaacgagttgaacgtgctcaattagtatgttaactaagcaataaaaccgtttcttatttcagaccgtttcccactaagcatacatacataatacatacatacataaaaagatacactatcatgattggaaaacagcgcatttggcagacaagtgtgttgggtctgcttttggccagcttcagtctgttctccgtgctctatatggagcaaatcgaacgctggatgctggagtggttcatggtgctccgcccaggaacaatgatcagcagcctgtggcagtcaccggccatggacataaacgttgacctgtacatattcaactggacgaactcggagaagttcagtgatcccacagtgaagcccaggttcgaggagcttggtccgtatcgcttcaccgaacggatgcagaaggtcaatgtggagtggcacgatgagaactcgacggtttcctatcgacgtcgcagtcgattcgatttcgatccgaaacttagtgtcggacgtcctacagatcccattgtggcgcccaacctgctcattgtgggactgtaccagaagatggtcatgtggagtcccatgctgcgttccctcatgctcttggccctgaatatctacggcaaggagcaggccatgatacggccagccagcgattggatgttcgacggcttcgacacgccgatgatcaagatgagcaaaatggtgccaccaagtcttgtgccggagatgaagttcccctatgagaagatcggctatgcgtatccagtgagttaggaggcgatatatatttaatagttccacaattaaaatacataattcctgcagcgcaatggcagcatggaaatctacgggcatcacaatgtgtacacgggacgggatgagttccaaaaactgggtcaaatagccaggtggcgctacaacaatgtcactgaggccagtcccaggtgcaagttgaagggcagcgccggagaattccatccaataccgctggtaaagggcagacccatctcctacttcctgccggatctgtgccgtgagctgcaggtggactactccggcaccacaatcttcgagggcatcgatgctttcgtttacagaggcagtgcacgcaatatggcaaatggtaagtactggataatcaggagtgaaattgctagtttatctattaatcaccttttccataccaggtactgataacccggataacagttgctattgccaggataactgccaggaggtgagatccggtcttctcaacatatcctcctgttggtatggaacgcctgtctttgcttcgtatccgcacttcttcaaagctgatccctactacggagagcaggtggagggcatgaagcccgacaaggatcgccacgagatggtcattatgttggagcccaaaacgggaatggtgctggagatcaaggcgcgcattatggccaacttgctggtggagcccaaaactcatttgtaagtattggggcctattgaaatctgattcagcataggaaactccaaaatataaatatttgcagaatttaccggacggcgagaagaacattctttccgttgatctgggcggattacaatgtccgcatcacggatgatcttctggtctacgtgaagctaatgccgatccttgagtttgtgggcaagatctgtggcatcctgggcgtggtcttgggtttgctgatggtattctggtatccccatcaaatgatctggcagaagagcctgatgcacaagatcgagattagttccatcgagacgaatagctcgttggagcctgtgaagaataatgatgtggaggactcgccactgctgaagggattgcaatatgcagcggccaaagatggggcgggaaatggaaattaagaatttatgcttactaagtgccatatgtttaagtttgcaaggtttttcttgcctagtctacagttaaagccaataaatggtaaatggtgttcaaatgctgaaatgaatcgaaattaaagattacacacatttgtatgtacatacatatgtatgtacatacatacgcttgaaccgttttttttaccgctgactgggattgtccgttgacttttcttatcactctgaatcatccagctaaatatgtacataagtcaaaaagaagacttcacactgattactaaataggcacatatgtatgttgtttgaactgcacaaatcgcataatattaacaccaaactgaaataacccgatgcacttgtaaatacttaaccgattcagaaccgtttcaagaaaatgcttacaccacaaaaacaaaaaagaaccggtttggcgggccatgaataagagatttaaagagagccaagagagctgtatatgaccgcacatgtgtatgtgtatgtttgctcatttgcgacgctatctgattataccgtacaattggcgaagtccattgatttggaaagtatacaacatattcagaatatctattaaacacattatccttgtagcagcgctaataaaaaaaaaacagttttaacagtatatgatttaatttatatttttcgtcaacgtcagcggagtttttcggctgtcgagcaatggtaacactggcaacgctgggaaaaagggcatttcacagtcaccgtagcccacagaccgcttttcgccttaacgaagaatagataattgttgctggtggcggctctttggaaaatacttatttagtcgcaggcgcagcgccgctctgacacgttcgctcttgatcgcgcgcgtaagttcgagatcaacaattaacggtgcgtagccgcctcctgaaaccctgcaagtggaagcgagacggccaatggcaagaaatagacgcgtgctgtggaagcaaaaacaacacaaaagcagcggaga

SEQ ID NO: 16112 - DNA, 1940 bp, DROSOPHILA
gcactcgaagtggttggatcgccaacacccaagaccaagaattacaaattacagatccattccgtcagatcgcgaggagtattgaacgtactacacaaatagtgccacactttccttagactcgattccaaccggaatgtttgcaacttgagttgcattatcagaggtgccagagataacctccaccctgctgcgtggacttggactcggatcagatcagatcagatcgaatcgcatcagacatcataaggaagtgggaggaatcagacagtctgcacatttagcagccagacgaaatatcatctcgagcaaagaccacatttaaaccgtttcccactaagcatacatacataatacatacatacataaaaagatacactatcatgattggaaaacagcgcatttggcagacaagtgtgttgggtctgcttttggccagcttcagtctgttctccgtgctctatatggagcaaatcgaacgctggatgctggagtggttcatggtgctccgcccaggaacaatgatcagcagcctgtggcagtcaccggccatggacataaacgttgacctgtacatattcaactggacgaactcggagaagttcagtgatcccacagtgaagcccaggttcgaggagcttggtccgtatcgcttcaccgaacggatgcagaaggtcaatgtggagtggcacgatgagaactcgacggtttcctatcgacgtcgcagtcgattcgatttcgatccgaaacttagtgtcggacgtcctacagatcccattgtggcgcccaacctgctcattgtgggactgtaccagaagatggtcatgtggagtcccatgctgcgttccctcatgctcttggccctgaatatctacggcaaggagcaggccatgatacggccagccagcgattggatgttcgacggcttcgacacgccgatgatcaagatgagcaaaatggtgccaccaagtcttgtgccggagatgaagttcccctatgagaagatcggctatgcgtatccacgcaatggcagcatggaaatctacgggcatcacaatgtgtacacgggacgggatgagttccaaaaactgggtcaaatagccaggtggcgctacaacaatgtcactgaggccagtcccaggtgcaagttgaagggcagcgccggagaattccatccaataccgctggtaaagggcagacccatctcctacttcctgccggatctgtgccgtgagctgcaggtggactactccggcaccacaatcttcgagggcatcgatgctttcgtttacagaggcagtgcacgcaatatggcaaatggtactgataacccggataacagttgctattgccaggataactgccaggaggtgagatccggtcttctcaacatatcctcctgttggtatggaacgcctgtctttgcttcgtatccgcacttcttcaaagctgatccctactacggagagcaggtggagggcatgaagcccgacaaggatcgccacgagatggtcattatgttggagcccaaaacgggaatggtgctggagatcaaggcgcgcattatggccaacttgctggtggagcccaaaactcatttaatttaccggacggcgagaagaacattctttccgttgatctgggcggattacaatgtccgcatcacggatgatcttctggtctacgtgaagctaatgccgatccttgagtttgtgggcaagatctgtggcatcctgggcgtggtcttgggtttgctgatggtattctggtatccccatcaaatgatctggcagaagagcctgatgcacaagatcgagattagttccatcgagacgaatagctcgttggagcctgtgaagaataatgatgtggaggactcgccactgctgaagggattgcaatatgcagcggccaaagatggggcgggaaatggaaattaa

SEQ ID NO: 16113 - protein, 518 aa, DROSOPHILA
MIGKQRIWQTSVLGLLLASFSLFSVLYMEQIERWMLEWFMVLRPGTMISSLWQSPAMDINVDLYIFNWTNSEKFSDPTVKPRFEELGPYRFTERMQKVNVEWHDENSTVSYRRRSRFDFDPKLSVGRPTDPIVAPNLLIVGLYQKMVMWSPMLRSLMLLALNIYGKEQAMIRPASDWMFDGFDTPMIKMSKMVPPSLVPEMKFPYEKIGYAYPRNGSMEIYGHHNVYTGRDEFQKLGQIARWRYNNVTEASPRCKLKGSAGEFHPIPLVKGRPISYFLPDLCRELQVDYSGTTIFEGIDAFVYRGSARNMANGTDNPDNSCYCQDNCQEVRSGLLNISSCWYGTPVFASYPHFFKADPYYGEQVEGMKPDKDRHEMVIMLEPKTGMVLEIKARIMANLLVEPKTHLIYRTARRTFFPLIWADYNVRITDDLLVYVKLMPILEFVGKICGILGVVLGLLMVFWYPHQMIWQKSLMHKIEISSIETNSSLEPVKNNDVEDSPLLKGLQYAAAKDGAGNGN

SEQ ID NO: 16114 - DNA, 5756 bp, DROSOPHILA
ctgtatgctcgctgtagaagcggtccagctttttgttgaacttggaattcctctcgttgatgaagtccacatccgcatcgtcgttgtagatcctcctgcgagagtacttcttgcggcgctctatctgctgctccaggtctgttaccattttgttaatagcacctggagtgtccttcgtcctcgaatgcaaagtggtgtgtgctccaccgtagaaggcgtcaccgagttcctccttctggcgctcgtacttttccaaatcgcgagcaggcatactcttgaccaatcggttgtactgtctagctgtttgagcttcgtatgtggagaaaccaagatctggattgtctttacgcttcttctttttctcaatgcgatccgcatccacagcggatacctccaaaagcttcaaacgctcgtaatccttgccagctgcctgcgcctcggctcgcgccttgtcgtccgctagtatccattccgcctgtcgcttgcgagcctcccagttcttggggagcttcttgcgagcgtcctctgccaccacttcctggtggttgtccgtacgcgcctcctggcgcttcttgtgtaggtccagcaaacgcgccttgcgctccgccaatttttcggcagccgttttcgtcttttccataggtaatttttattaaaaacttgttttgtttttagaaattgtgaaaatgcgttgttttcctttctttgatattttggtcggttttgggccgcgttggcagcaccagtaaaaacatctgtttcggagcgtagtacagtaaacaactggtatgacagttaccgtaaatgtgaagtgattattttataacatgaattcaaaaaattaaagtttaagcaatgaagtattttaaaaattaagtattatgttatatattcttataaagacgtggcttattatttgctttattcgatgtttgtcaccgttgtggtatatactgtgctgcgggatttaagaatgcgttagtgcaattccatcctcatgtgctgtttacctcaacacgtgcgggagtttttgtttatattttagctcgtggttttagttaaaagcccgccgcaatatgaagttttcctacaaagtaatttgtctcataagttaatactacaaattgctaatgtctggtttttatagttttccaacctgttgggcacaatatatcgtaatggaaacttggtgttcacaccggatggcaattccgttatcagtccggttggcaataggataacggtctacgatttaaaaaagtgagttaccgttttaaatccaaagacttcatgaatatattttattcctttgcagcaacaaatcgcgcaccttgtccctggaatcgcggtataactacacgaacatagctctttccccggatggaagtctgctcatcgcagtcaatgaaaagggtgaggcgcagctcatcagcatgatgtcctgtacggtgatacatcgtcacaagttccagacgggcgtacagtgcatctgcttcagtccaaatggagcattctttgccgtcgctgtgcagaacgtagtgttgatattctgtgcacctggtgagatcacaggggagtacaatcctttcgtcctgcgccgaagattcctaggtggattcgacgatgtcacttggctggactggtcttcggactctcgacttttggcaatcggctgtcgggatagctccaccaaaatcgttgccatcaactatacaaagaacttccgcacctataacctaagtggccacacagacgccattgtagcttgttttttcgaggcaaacagcttgcacttgaacaccataagccgcaatggtcagctctgcttgtgggaatgcagcctagctccctcggatttagaggatgctgaaaggccaaaaatcgctccccctcaaaggaagaaggaaaagaaggcagtatctgacaatgagtcagaagatgacgttgaaaatgtagtggaaaaggatgcgttgaaggaggaatctaccaaggaagccgaagatgtcaaccatataaaaaatgaggacgagacgaagagtcaccccttcttttacaaaaaaataactcgtcattacttggccgatgagccgcgaaaagaacagcgggatgtacaactgaccgcggcaaactacaacactcgtaccaaggttttggtggtagccttcagttccggagctttctacctctacgaattgcccgacgtcaacatgattcattcgctgagcatttccgactatcctatttcggcggctctcttcaactgcactggtgactgggtcgcattggcctcccgagagattggccaacttctggtttgggagtggcaaagcgagcaatacataatgaagcagcagggacacagcagcgaaatgacctgcattgcttactcctcggatggtcagttcatcgccactggcggcgaagactccaaggtgaagctctggaacacgcagagcagtttctgttttgttactttcagcgagcacaccagtggagttactggcatacagttcagcaggaacaagaagttcctggttagcagttccctagacggcacagtgcgtgcttttgatgtcaacaggtggattttgcttaggtctcaatcgtatggtatacttatatgctgtttcttatttcagataccgcaacttcaggactttcacctcaccgaatcctgctcagttctcctgtgtagctgtggattactctggcgagttagttgtggctggcggccaggacgtattcgatatcttcctgtggtcagttaaaacaggaaagctgctggagatcatcagtggccatgagggacccgtagtttccattgcattctcaccagtggctacttcatcaactttggtgtctggttcttgggacaagaccgtcaagatatggaactgcctggagagcaacagcgagcacgaaactattgatgctgtttcagatgttacaaatgttactttcagtcctagtggtgaagaggtatgtgtttactacatcattcgttcgacaatacctttgtacatatggcattcaaactctggcagattgctgtggccactctcagtggtaatataacaattttcgacatcaaatctgctggccaagttactactatagagggtcgcaatgatctgagcgcagggcgcctggaaaccgatattataacagcgaggaaaaatgctcaggcaaagtaagatgatccgtgtatttaaaataagttctatatattaactgcctttcttgctagctatttttccaccattgagtactcagcggatggagagtgcatactggcggctggaaagtctgcaaacatatgcatttaccatgttagggaggcaatacttttgaagaaatttgagatcacacaaaaccacagcttagatggccttaatgtgagtaatcaaagaaattttgtacaaatatccttgtattcactgtatattttgttcacaggactttatcagtcgaaaacatttaagtgaatttggcaacatggctcttgtggaagaacgagaagagctggagggcggcagggtggctattcgattgccgggcgtacaacggggagacatgtcatccaggagattccagcaagaggttagggtgttctccgtaaagttctcacccacaggccaggcatttgcggctgctggcactgaaggactatgcatatacgccttagataagggtaggctctactagtatttattatgattaccatatatatattgactctacgcatttctgttcaggtgttgtcttcgatccctttgatctctcgctggaagttacgccgaaagcggtccacgagtccctcaagcagcagaattacaccaaggcgttggtcatgtccctcaagctaaacgagcccaatttgattgccctagtgctggagcgagtgccgtataaggacggtgagtaaaatgctaaatcgcctgctgcattcaggggccagtccttgtcagttttggcaaccttcatcgctgccgcgactaaaaatagcggcgacacactccgccgtagtggcggagtggttcgccacttgccctgactccgttctccgatcgaatgtgcaaatttgcacttttgctgtgttaataaacagtttcaaggtcctcgccccagctcttaccttggttaataaccccttccaataccgcttgcaaacgaactataatggtagtacatgcaaatggcttgccgtaaacagctttggcagcacgtgtctgtattgcatgcatattgagtccttgctcctttcgcttttccagtcgaactggtttgtgcggatctgtcgccggagtttgcccagcgactgttgcaacaattggcccgtcagctccagtccacgccacacatagagttctatctgcaatggagctgctgtctgctgaccaaacacggaaaccaagatggagtctttcagcacacgggcttgctggcactgcacgaggttctttcgaggaaatacgaaatgcttaacaaaatgtaagtatacttttttatattgtgtaaaaggagatttcactaagttctttatatatgcagctgcgactacaacaagtacacgttgaaagtactcctggatagagctgataagttggagcagaaaaacgagggcaaacccaatgcgacggaggaagatagtgatgaggaaatgctacttatcaggtcgaaggacgacgaaaatggacaggcgcagtttagcgatgaggaggagagcgacagcggatccgaagaagagatggcttgaatcggagcattgccaactatttccttgttatctaaatcgacgcatactttgatttgatagatgtacgcgccttgtcttttattaagaataaatttaaagcttttcgataacattgttagagggttcactgaactacgattagctgagtgaacaacataacttaaaaatggaaagaatacagatatttatataaacttaactttttatagcagttacaatcctagataaatatatgcatgtaatatatatagtagtgatgtaatgtatttacattgtgtttgtatttccatatcaaatataaactcgatttagcttaacatatatatatgtatatatatatgtttatagtttcaaaaattctgcctgatgtgcgctgtttgaactacaggtcgattttagtattagatgtaaaagccacagctctaatgtttgcattaaaatgcgctataatggataaataattctaaatatgtaaaaatctctaaaagcattcactgttcgtttcgttatttacaatccaaatatcctttgaggccattgtattattattatcttcgtaaagcaccaattccatatcttggctgatttgcttaagcctaatacaaaagttcaattaaaatcgtttgcccgaaaatgatttatgcgtgtagctcgcaattgtagagagtgtatactttgaaagtagggacaaccctttcgactctgggtattgtcactagcacagtgatatacgtttgtttgttatccggtgtacaatacatatatgtatatgcataaggcagaactaaactcaaatttgggtaatccttgtgggatcatggctaatatagttgagtagcgaagcattccatcctgtgggtgtgcgcggtgtcctgccgaaagagttacatacgtgttttgttttgcgattgaggcatagatttgaaataatttggggtattgtaataatatcggtattgtttggatctgtacaaagcatatactcaaatgaacaatatga

SEQ ID NO: 16115 - DNA, 2926 bp, DROSOPHILA
tgctgtttacctcaacacgtgcgggagtttttgtttatattttagctcgtggttttagttaaaagcccgccgcaatatgaagttttcctacaaattttccaacctgttgggcacaatatatcgtaatggaaacttggtgttcacaccggatggcaattccgttatcagtccggttggcaataggataacggtctacgatttaaaaaacaacaaatcgcgcaccttgtccctggaatcgcggtataactacacgaacatagctctttccccggatggaagtctgctcatcgcagtcaatgaaaagggtgaggcgcagctcatcagcatgatgtcctgtacggtgatacatcgtcacaagttccagacgggcgtacagtgcatctgcttcagtccaaatggagcattctttgccgtcgctgtgcagaacgtagtgttgatattctgtgcacctggtgagatcacaggggagtacaatcctttcgtcctgcgccgaagattcctaggtggattcgacgatgtcacttggctggactggtcttcggactctcgacttttggcaatcggctgtcgggatagctccaccaaaatcgttgccatcaactatacaaagaacttccgcacctataacctaagtggccacacagacgccattgtagcttgttttttcgaggcaaacagcttgcacttgaacaccataagccgcaatggtcagctctgcttgtgggaatgcagcctagctccctcggatttagaggatgctgaaaggccaaaaatcgctccccctcaaaggaagaaggaaaagaaggcagtatctgacaatgagtcagaagatgacgttgaaaatgtagtggaaaaggatgcgttgaaggaggaatctaccaaggaagccgaagatgtcaaccatataaaaaatgaggacgagacgaagagtcaccccttcttttacaaaaaaataactcgtcattacttggccgatgagccgcgaaaagaacagcgggatgtacaactgaccgcggcaaactacaacactcgtaccaaggttttggtggtagccttcagttccggagctttctacctctacgaattgcccgacgtcaacatgattcattcgctgagcatttccgactatcctatttcggcggctctcttcaactgcactggtgactgggtcgcattggcctcccgagagattggccaacttctggtttgggagtggcaaagcgagcaatacataatgaagcagcagggacacagcagcgaaatgacctgcattgcttactcctcggatggtcagttcatcgccactggcggcgaagactccaaggtgaagctctggaacacgcagagcagtttctgttttgttactttcagcgagcacaccagtggagttactggcatacagttcagcaggaacaagaagttcctggttagcagttccctagacggcacagtgcgtgcttttgatgtcaacagataccgcaacttcaggactttcacctcaccgaatcctgctcagttctcctgtgtagctgtggattactctggcgagttagttgtggctggcggccaggacgtattcgatatcttcctgtggtcagttaaaacaggaaagctgctggagatcatcagtggccatgagggacccgtagtttccattgcattctcaccagtggctacttcatcaactttggtgtctggttcttgggacaagaccgtcaagatatggaactgcctggagagcaacagcgagcacgaaactattgatgctgtttcagatgttacaaatgttactttcagtcctagtggtgaagagattgctgtggccactctcagtggtaatataacaattttcgacatcaaatctgctggccaagttactactatagagggtcgcaatgatctgagcgcagggcgcctggaaaccgatattataacagcgaggaaaaatgctcaggcaaactatttttccaccattgagtactcagcggatggagagtgcatactggcggctggaaagtctgcaaacatatgcatttaccatgttagggaggcaatacttttgaagaaatttgagatcacacaaaaccacagcttagatggccttaatgactttatcagtcgaaaacatttaagtgaatttggcaacatggctcttgtggaagaacgagaagagctggagggcggcagggtggctattcgattgccgggcgtacaacggggagacatgtcatccaggagattccagcaagaggttagggtgttctccgtaaagttctcacccacaggccaggcatttgcggctgctggcactgaaggactatgcatatacgccttagataagggtgttgtcttcgatccctttgatctctcgctggaagttacgccgaaagcggtccacgagtccctcaagcagcagaattacaccaaggcgttggtcatgtccctcaagctaaacgagcccaatttgattgccctagtgctggagcgagtgccgtataaggacgtcgaactggtttgtgcggatctgtcgccggagtttgcccagcgactgttgcaacaattggcccgtcagctccagtccacgccacacatagagttctatctgcaatggagctgctgtctgctgaccaaacacggaaaccaagatggagtctttcagcacacgggcttgctggcactgcacgaggttctttcgaggaaatacgaaatgcttaacaaaatctgcgactacaacaagtacacgttgaaagtactcctggatagagctgataagttggagcagaaaaacgagggcaaacccaatgcgacggaggaagatagtgatgaggaaatgctacttatcaggtcgaaggacgacgaaaatggacaggcgcagtttagcgatgaggaggagagcgacagcggatccgaagaagagatggcttga

SEQ ID NO: 16116 - protein, 949 aa, DROSOPHILA
MKFSYKFSNLLGTIYRNGNLVFTPDGNSVISPVGNRITVYDLKNNKSRTLSLESRYNYTNIALSPDGSLLIAVNEKGEAQLISMMSCTVIHRHKFQTGVQCICFSPNGAFFAVAVQNVVLIFCAPGEITGEYNPFVLRRRFLGGFDDVTWLDWSSDSRLLAIGCRDSSTKIVAINYTKNFRTYNLSGHTDAIVACFFEANSLHLNTISRNGQLCLWECSLAPSDLEDAERPKIAPPQRKKEKKAVSDNESEDDVENVVEKDALKEESTKEAEDVNHIKNEDETKSHPFFYKKITRHYLADEPRKEQRDVQLTAANYNTRTKVLVVAFSSGAFYLYELPDVNMIHSLSISDYPISAALFNCTGDWVALASREIGQLLVWEWQSEQYIMKQQGHSSEMTCIAYSSDGQFIATGGEDSKVKLWNTQSSFCFVTFSEHTSGVTGIQFSRNKKFLVSSSLDGTVRAFDVNRYRNFRTFTSPNPAQFSCVAVDYSGELVVAGGQDVFDIFLWSVKTGKLLEIISGHEGPVVSIAFSPVATSSTLVSGSWDKTVKIWNCLESNSEHETIDAVSDVTNVTFSPSGEEIAVATLSGNITIFDIKSAGQVTTIEGRNDLSAGRLETDIITARKNAQANYFSTIEYSADGECILAAGKSANICIYHVREAILLKKFEITQNHSLDGLNDFISRKHLSEFGNMALVEEREELEGGRVAIRLPGVQRGDMSSRRFQQEVRVFSVKFSPTGQAFAAAGTEGLCIYALDKGVVFDPFDLSLEVTPKAVHESLKQQNYTKALVMSLKLNEPNLIALVLERVPYKDVELVCADLSPEFAQRLLQQLARQLQSTPHIEFYLQWSCCLLTKHGNQDGVFQHTGLLALHEVLSRKYEMLNKICDYNKYTLKVLLDRADKLEQKNEGKPNATEEDSDEEMLLIRSKDDENGQAQFSDEEESDSGSEEEMA

SEQ ID NO: 16117 - DNA, 4229 bp, DROSOPHILA
cgcccgaatatgcaaatgaccaaatcaatcgaggaccaaattaaaatcgatcaaaattgatttgttgcccggtgtgcagaaacccaaacaccgcaccccgaaatgccagatcacccaggaccgcgatgcctccaagatcaggacattgccgaaggagttgtgcgaggagcgtgagaaagtctcctttttgcacgagtgatttacataatttttgggcaagtaaattgcatgcacatctcgtgtgtggaccttatgcaaatgagctgcgacgctattgccatagtgccgtcccttttcaaccccctgctgccagcacgcaggacgcaggacgaaggactcgggccgggccgcaggactcaggtgtgcgagcgtgtcggcatgctgtgaacaaggcgccgtccactgtgcccgtaattaacccctgtctctgtggcatttccctttttccatcccattttcactttcgtttgcatccgagttcttttggcagtttcgcaatgcgagtttccttatgcaaatgagagtgcatcctcgcccttccctttatattcgccaagtgaaaatcttatgcaaatttccttggctgtgaaaaactccttccgccgcgagatacaggatctgcgtgatctccgctctaatttgactgctgggtgtcaggtactgcgagcatcgttatccttttttggctgcgatcgtgagaaagttcggaaatttgcataatttttcgtgaaaattttgctggtctacgtgatcgttgcaaagacagtagagattggagatgctaaatctctgatcgcaatttcccaagctcttaggaaataatgaattacaaacatattaattttttttagtttcttgtccaaccatatatgtacacatgaatgtgtaatataggtgtttacagtttttattttcttatatttgggatatttgtagtgaaaccccccttttttttacatatacataaaatgcaagaattcataagacttctttatgaggattaggccctcagctgtccttcgggtacattggggaccacttcaacgtcagaggaatcgttggactcggagctgttgttcgaagatgaactggaactggagcttgatctggagcgcgaccctgagctggagccagcgttggagccagagctagaactagagttagatctagagctggcgctggagtttgacctgggtctcaacttggtgtcggacatggacctggacctggacctagaaagtctgccggacttggatttcatttccgactcgctgctgctgctgctgctcatctggagttcgacaacgtgtggcaacttggggggggatctgatgggttgcatttgcaaaggattactatttattgggagattcctcattggagtgccaccaatagccgacagttttaccggagcggagacgtcatcgtcgctggtatcgctcagattgtgagtctcaacaacacctgctcccaattgtggagccattacattagcctgtagcggcttcaatttggcggttagcggagcagttgctctcttacgcaccacgttattggcagtgttgtttttattcctgaaattgatcaagggaccacatcggcgacgatttttgttgagcatccgtgtaatgttcaccagctgcgactgcagtgcccgctgaagtccttccttttccgaaggctgcatgtccttgagcttcagcttgctatgggccctagttgccttggtgacggcacttttcatcatgatcatagtatccgtggcgagacctttgacatcgaagctcagatctccacagttctctgaggaaaatccttcgatttgctggaccatgtgaattatctccttcatggcgtttgtcggaagcttggcaaataatttctgtgtggcacatcgatccgcgtcagtgatacgcattgaggcatcgatagcttcatcatctgaggattcaatgctaactgccatgaggttatctatttcatttccacttaacaactccatagctggcttaaattcgccttggaccaaatccgtttcctgctcggggctcatcttctgtcgtttgctagatgatgggtttggagaatttcgttgacctgcctccattttgtttatcatcttgtttaaggtgtcacagaaagtctccaccaaactcttggctgtcagaggttccccggaaccgggcatttggacgcactgcatcaagctatttaccgttaacttggcggcagccagtagttcatttagatctgcggcattcaaagcagattccagcgatgagtttccattcatggaagtacaccaagccgccggctgattaaagactctttcgtagaggattttagccggttcgtggtactttctaaagcagccatccacatgcaagcaaaattcattgacagacttgaagtactggcgatcaactttcttttgcaacgaatcccacttgttactgaagaaattgcgcgtcatggcatctgtctgattggtgatgctctgcaacttcttcaataattcccggcacttgcgttccgtctgcgcggaactaggagcattggtcctaggcctgcccaccgccttgggatccctattgcagggcacctctggaccagacggcatgcctcggagtttcttgtgaaagaacttctccagcatctggcccttgcggtaaacgacatcgccggatcgattgaataggaagcaattgctaataatttgcttgaaatcggcaatcgcttcattgacagatttatagtagttgttctgaactcttttcacaatggtaccgatatccatgggacgatggataaccgtgtagtatgtgggcaccatcagagcctccgtgtccacgggctccaagaagtccaaggcatacttcttcttgcgagcctcgtcgagcaaatgcttcttgaagtaatgcaacttattggtataacgacccgccattccgggatgcggtataaactcgggttggacacgatttgggagttttagttttacggaaagcggcttgcaagatgcctgccaatagaatgatttgtagaaattcgcgcagtgaatagcttacgaactcaccatgctagagatatatttttcagttactggttactggttgttcgtttgtttcgatttttgaaaacgtgtctctttcaattttacacaaatataaactcgaatttgactacgattacgattgagttttgggaacacttttgccgttcgaccgtccgctttcaggaacaaatttttgtgatggaaaaacacatatcaccgctcagctgtcctattttgacaagtgaagtaattgcacagcctactgccatttagaaatcactagcatgaaagtttcgaaagttctagtcagggatgccaagacattgcatttaaatatgcggcaacccctaggattttgcaaaagtgaaagtcactattagaacattcgtttattttaaaatcctgcctattcttaagccctcgataagcagcagtgcaccaattataggctggttgatcagaaagacaccgaaactaaagcaaacaatggcacatcaaagggaatggaggcaaacatccaaccacccataccacccaccaccacacccgaccggccccatccactgaatatttataataatttgcaccacttcagaggctttcagcgttttgtaccccacctcccggttggaaaatgtggcaatgggacataaaaactgctttttgcaatttacatcaacatttttatcaccccaccacccatcggcacatcccaccaccgacaaccttcaaggagtacagcaacaacaacacgcttttcctatttgcatacatatgtaagtgtgtcccataaatacagatatacggccacgcccctcaccgccgcccaccacgacagcctcctgcgtctttttgcgcacttaattacacacgcatacgcttcattccactttgcggtgctgcttgtctaggcatacgagccacccaaccagccaaaccacccacccaaccaggcacccactggaggacaggaaggactccgcaaccatttgcgaaccaccgcggtgggacaggcccactacggaaatagacacggggcacactccggaaaaatcgtacaaaatggaggtcatcactgtaatcccaatcgataatgcaaattaacaaggagtcgtaaaaattatgaacttgaatatgggcaaaattaattgcaaaattatacaaactaattccc

SEQ ID NO: 16118 - DNA, 2175 bp, DROSOPHILA
gacggtcgaacggcaaaagtgttcccaaaactcaatcgtaatcgtagtcaaattcgagtttatatttgtgtaaaattgaaagagacacgttttcaaaaatcgaaacaaacgaacaaccagtaaccagtaactgaaaaatatatctctagcatggcatcttgcaagccgctttccgtaaaactaaaactcccaaatcgtgtccaacccgagtttataccgcatcccggaatggcgggtcgttataccaataagttgcattacttcaagaagcatttgctcgacgaggctcgcaagaagaagtatgccttggacttcttggagcccgtggacacggaggctctgatggtgcccacatactacacggttatccatcgtcccatggatatcggtaccattgtgaaaagagttcagaacaactactataaatctgtcaatgaagcgattgccgatttcaagcaaattattagcaattgcttcctattcaatcgatccggcgatgtcgtttaccgcaagggccagatgctggagaagttctttcacaagaaactccgaggcatgccgtctggtccagaggtgccctgcaatagggatcccaaggcggtgggcaggcctaggaccaatgctcctagttccgcgcagacggaacgcaagtgccgggaattattgaagaagttgcagagcatcaccaatcagacagatgccatgacgcgcaatttcttcagtaacaagtgggattcgttgcaaaagaaagttgatcgccagtacttcaagtctgtcaatgaattttgcttgcatgtggatggctgctttagaaagtaccacgaaccggctaaaatcctctacgaaagagtctttaatcagccggcggcttggtgtacttccatgaatggaaactcatcgctggaatctgctttgaatgccgcagatctaaatgaactactggctgccgccaagttaacggtaaatagcttgatgcagtgcgtccaaatgcccggttccggggaacctctgacagccaagagtttggtggagactttctgtgacaccttaaacaagatgataaacaaaatggaggcaggtcaacgaaattctccaaacccatcatctagcaaacgacagaagatgagccccgagcaggaaacggatttggtccaaggcgaatttaagccagctatggagttgttaagtggaaatgaaatagataacctcatggcagttagcattgaatcctcagatgatgaagctatcgatgcctcaatgcgtatcactgacgcggatcgatgtgccacacagaaattatttgccaagcttccgacaaacgccatgaaggagataattcacatggtccagcaaatcgaaggattttcctcagagaactgtggagatctgagcttcgatgtcaaaggtctcgccacggatactatgatcatgatgaaaagtgccgtcaccaaggcaactagggcccatagcaagctgaagctcaaggacatgcagccttcggaaaaggaaggacttcagcgggcactgcagtcgcagctggtgaacattacacggatgctcaacaaaaatcgtcgccgatgtggtcccttgatcaatttcaggaataaaaacaacactgccaataacgtggtgcgtaagagagcaactgctccgctaaccgccaaattgaagccgctacaggctaatgtaatggctccacaattgggagcaggtgttgttgagactcacaatctgagcgataccagcgacgatgacgtctccgctccggtaaaactgtcggctattggtggcactccaatgaggaatctcccaataaatagtaatcctttgcaaatgcaacccatcagatccccccccaagttgccacacgttgtcgaactccagatgagcagcagcagcagcagcgagtcggaaatgaaatccaagtccggcagactttctaggtccaggtccaggtccatgtccgacaccaagttgagacccaggtcaaactccagcgccagctctagatctaactctagttctagctctggctccaacgctggctccagctcagggtcgcgctccagatcaagctccagttccagttcatcttcgaacaacagctccgagtccaacgattcctctgacgttgaagtggtccccaatgtacccgaaggacagctgagggcctaa

SEQ ID NO: 16119 - protein, 648 aa, DROSOPHILA
MAGRYTNKLHYFKKHLLDEARKKKYALDFLEPVDTEALMVPTYYTVIHRPMDIGTIVKRVQNNYYKSVNEAIADFKQIISNCFLFNRSGDVVYRKGQMLEKFFHKKLRGMPSGPEVPCNRDPKAVGRPRTNAPSSAQTERKCRELLKKLQSITNQTDAMTRNFFSNKWDSLQKKVDRQYFKSVNEFCLHVDGCFRKYHEPAKILYERVFNQPAAWCTSMNGNSSLESALNAADLNELLAAAKLTVNSLMQCVQMPGSGEPLTAKSLVETFCDTLNKMINKMEAGQRNSPNPSSSKRQKMSPEQETDLVQGEFKPAMELLSGNEIDNLMAVSIESSDDEAIDASMRITDADRCATQKLFAKLPTNAMKEIIHMVQQIEGFSSENCGDLSFDVKGLATDTMIMMKSAVTKATRAHSKLKLKDMQPSEKEGLQRALQSQLVNITRMLNKNRRRCGPLINFRNKNNTANNVVRKRATAPLTAKLKPLQANVMAPQLGAGVVETHNLSDTSDDDVSAPVKLSAIGGTPMRNLPINSNPLQMQPIRSPPKLPHVVELQMSSSSSSESEMKSKSGRLSRSRSRSMSDTKLRPRSNSSASSRSNSSSSSGSNAGSSSGSRSRSSSSSSSSSNNSSESNDSSDVEVVPNVPEGQLRA

SEQ ID NO: 16120 - DNA, 5596 bp, DROSOPHILA
tgaccttagtatactaacaacaccgttttcctaacagggtcatgctagacttagcatttcaacggttctatgccaacggtggcaagtgtgccaaaaaagacatattagtgactaagcgttgataatcagtgttctatatatgtatgtatgtatggtacaaaaacagtactgtctgagtatagattccgtggagtgataactgaatcttcatggtccgctggcacctgacgtaattcctgtattgagaagagtattatatttatttaagccagcccttctgaccggtttacttcaaacaacccccaaaaacaagtgatacatatatgaacatttaagcaattatttcgttaatttacaaatgtacagtcttacatctgtaatgtggatgtaatgatctcacctttattcgaatttctgctctacatagtatctagtttctagaataaatgtagcacagaaaaggatttgcttaacaaaaattattaggctgtgcttaatttcatattgtaaatgttacactgtagcttgcagttacttatgtacatacatgtacatacaaatgcttgtacttgtaggtattcattttagtacatacatatgccatacatacgtaagtatgtacatattaagtttgcggtttggccagtaccaagtaaaaactttattacaattagacacaaaatgtgtataattacgccgcagttaagcattatgatcgccacttatgcgtcgccactctcgcctctctctctccctctcaccggttctcttcacaattctctttctccggcgcatttcccgatcctcatgaaatcgaattcggctggctagcctgctgggccgccgaaagtgtgcgcgtgcgataagacatactgtacagtggtctctctgttagcgataagcccgcattcctatttcccaccgccactctcacttacttactctctgcctttctctccctagacgccaataacgggaacgcagtcgatgcgagggttccatgctcagtgcgcaacaagagatcgatcgaggaagacgccctgcaaacaaagaacatcaatttacagcaccgccaccaagactcaggcgcagctccaccaagatgacatcacggacgcgccactgtgcccgactggggatcgttctccttgggatctgttgcatcgccagcggaatttacctcttccgcaactggatcgatatgtttacacgcatgcgcggccaggttggtactccactagatgtatatatgtatttattagaagcaatacttgcaatcggtttcaacctatcttatcgatattgattgccttggattctcagacctttgggttaagtttcgcaagccggcaaattggcaatgtgtgcagaggtcaactgggagactcatttgcataccacttggattgggaggcaacaattttttccattgatttaaagcaaagacgaacgcaaagacactgaaaattgactgtgtgcaggtgttcgagtaattccaaatcaccccaagccaatagataagataaggactaacaacaggcgaaataataccttatagagaacattttgtaacgttattgtttgggggtggtaaaaatataaaaatcttataagatcctaaacatttgcatgtgcctttaattagcatgttaatgctatagttgatatgttttttttcttctgtatgtagagtgcttagtcacggcagttaaaatctcattgcaatgcgttctccttaatcgttgtgatcgttaaatggcaatgaacgaagagcgaggaaccttgttgaaatgagcatttaatcttgcacgaattttttttagaatgatgtcaagttttatattaacgcgaattttgtaattttttttttcaatttccaaataatcatcaatcaaattgataatattttggttagccaggtgtttttttgactcacgaaagtttcgatcgtgattcctattggcagtggcaactaaaaatagtaagtgattaattggctttatcaaaaagaaaagggcacacctgtcaatgtgaatcatgggtttcgatgcggggtcaataatccaacattgaaatgtatttcactttaatgtttttggtctctgggttggcggaaataccatccgaagtgttggagttgcggccgcgaaattgcaatgggtttctcgatatcttatcttggacaaaacctgaaaaataacccattttgcgatagccatgttcgattagacaacgctcttcagttccatacctacatactatatgaatatatggcaaaaaatgctcataaacggccataaccatccagaaccgacatgtgcatgtaaccgcacttttgcacgtccgatgaccctgaccgaacacctgtgctccatttcgatacgcaatccggcagacatgtgtaatccattaggattttacagggcttatgacgaatatggttgaaactgcttagaatctaattcaaacctatagcattttatcaatttagtcatttcctgtagctcagtcgcagttccaattataaagattataaggccctgggtcatacaaaatggtggccagtggtctgcgatctagacgatcgttattatgtctatcgttctggcttacaatgattgatggctgataagagcaatcatagcacctgaaatttcgcagagatagagcccaacaatgtagcgagaaagtgcatttcaagcgtcactatcactattagttttatgcaaaatagtgcccatatatatggcacttttaatatgcacaatactacatgtgtatgtgccagtcaatcatgaaagctccaatggataccaattgcacagatcatttgtgaactttgatcggttcttccatatgcacattggtcgcatactcggtgcgcaattgttcatcaacgaattcgacgtttaattgctgtgccaatttagcaaccagttatcctaaattatagcaaactcattatgtaaatcgattatcattgtattgtttgatcattgtatattttaataaaaatttttcattattataggaaatggccctgagccccaattcacgatcattcgagggctggaaggtgtcgccgctgcctttagacttcgatatatatctatttaactggaccaatccagatgacttctatgtgggatcgaacaagaagccacactttgagcaactgggaccctatcggtttcgagagaaacccgataaggtggacatcgaatggcacaatcataacgcctccgtatcatttcacaaaaagtcctggttctactttgatgctgccggcagcaacggaagtttatgggataaagtgactacggtcaacagcgtagcgcacgtaagttctcagaacatctctcaatctcaatgaaatctattaacatcttaattatttttaaacagtctgctgctagacgtgcggccgtcgactggtttgccagaactggcgttaacattgccaataaattatatagacagggagtgaccattacgaaaacagttgatgaaatgcttttcaagggctacgagcatccattcataagcgtgggcaagctgttgagacctcaggatgttccctacaaacgtataggctaccattacccacgaaatggcagttccgagttcgatggtgatatcaacatgtttacaggagctgatgatatcgctaaaatgggtcagattcatacgtggaataatttgacgcatactggagcctttgagggcacctgcgggcaggtgcacggctcgatgggcgaattctttccgcccaatcttggcaccaaagacaccgtctacatgtacatgcccaagatgtgtcgtgctataccattggactacgtggaaactgtgaccgtgcacggcgtgaccgcctacaaattcagtggcacccggcacgctgtggacaatggcactctatatccggatacccgttgctattgcgtcggaggaaagtgtatgcccagcggtgtgatcaatatcggaccctgctcctttaacgcatccgtctacatgtcctttccgcacttttacatggcggatccaagctatctggaggccatcgagggtttgcgaccagaacgcgagaagcacgagttcttcatggccctggagcccaatgcgggcgtgccaatggacgtgggtggtggctttcaggccaactactacatggagccaattccgggtattacgtaagtaacttgacctttacataagccttttccttacataaactaatattttcattttctttcagcttgtatgagaatgtcccgacggtcatgatacccatgatgtggtgcgaggagcgcgtacgcgtatcagaggaaattgccgcagacattgcgcttgttccgctaattgtcctgctggggcagatagtaaccggcatccttttggcgggcggtcttatatgcacctgctggtacccgacgcgacaagtgacgcacttttgtcacagcgatccaaaggcgaaggccagtgtcctgcgaccactgaacgcctttggtgtaaattcgtcggcagccacagcgccggtggcccaactattccggaacaacattagttcatcgggcaacgagcgtgtgggagtgcgcctactggattataatcgcgattctggcataagactggagagtggtaccatggaaagctcgcacagggagcgtctgatcagcgaggactcgcccgatgttgtagttagataatacatgcgttggcatcaagccattctgacggtgccgccaacgatcatctgcctgagactcatttacgtcgccgtagcttagaatagcttagaacaacgtgatgaaaccattctgccttagccaggctctaagaggctggaccaagttgctcatcgaggatgtcgttccaattcacgtcacataccaccacattacctaccacgcatgccccaatcgcattaggagttccctcaacacatctgcacgctttgcggacagcgagagagatttataagattatttattttagtgccaaataacagcagaaaacgcaagcaaaaagtcattaactattttagtaggataaactaaattgtatatagagcgactcgcttagagcgccccattactcattttccttaattcttgaagtttaaactgcgcatgcccaaagtatttatatttatataataatgcataacatttgtagagcgatatttaagattttaatgcagattgatctgaagttatatagaaataatattgaacagagaacataggtagcgagaattgttgctcatttacataggtaggccgaaaaactaaaaattatagttgttgttttaagtcttgtacaaataacgctagcactgcaaagattacgcatatcctatgtacaaatgtcgatcagtgtaagatctaaatacctagattataaagcacagctgtgaaccccggaaatatttccaaaaattccttaagataaatgaatagaaaaaattattaaaatcaagtgatcaaagagggactttctgaaaatggcagtagttactaaaactacgtatggagaccctgaaaaaaaaatatccaaacatatcttcatataaattttaaattcgaaatccaatcaa

SEQ ID NO: 16121 - DNA, 1660 bp, DROSOPHILA
atgctcagtgcgcaacaagagatcgatcgaggaagacgccctgcaaacaaagaacatcaatttacagcaccgccaccaagactcaggcgcagctccaccaagatgacatcacggacgcgccactgtgcccgactggggatcgttctccttgggatctgttgcatcgccagcggaatttacctcttccgcaactggatcgatatgtttacacgcatgcgcggccaggaaatggccctgagccccaattcacgatcattcgagggctggaaggtgtcgccgctgcctttagacttcgatatatatctatttaactggaccaatccagatgacttctatgtgggatcgaacaagaagccacactttgagcaactgggaccctatcggtttcgagagaaacccgataaggtggacatcgaatggcacaatcataacgcctccgtatcatttcacaaaaagtcctggttctactttgatgctgccggcagcaacggaagtttatgggataaagtgactacggtcaacagcgtagcgcactctgctgctagacgtgcggccgtcgactggtttgccagaactggcgttaacattgccaataaattatatagacagggagtgaccattacgaaaacagttgatgaaatgcttttcaagggctacgagcatccattcataagcgtgggcaagctgttgagacctcaggatgttccctacaaacgtataggctaccattacccacgaaatggcagttccgagttcgatggtgatatcaacatgtttacaggagctgatgatatcgctaaaatgggtcagattcatacgtggaataatttgacgcatactggagcctttgagggcacctgcgggcaggtgcacggctcgatgggcgaattctttccgcccaatcttggcaccaaagacaccgtctacatgtacatgcccaagatgtgtcgtgctataccattggactacgtggaaactgtgaccgtgcacggcgtgaccgcctacaaattcagtggcacccggcacgctgtggacaatggcactctatatccggatacccgttgctattgcgtcggaggaaagtgtatgcccagcggtgtgatcaatatcggaccctgctcctttaacgcatccgtctacatgtcctttccgcacttttacatggcggatccaagctatctggaggccatcgagggtttgcgaccagaacgcgagaagcacgagttcttcatggccctggagcccaatgcgggcgtgccaatggacgtgggtggtggctttcaggccaactactacatggagccaattccgggtattaccttgtatgagaatgtcccgacggtcatgatacccatgatgtggtgcgaggagcgcgtacgcgtatcagaggaaattgccgcagacattgcgcttgttccgctaattgtcctgctggggcagatagtaaccggcatccttttggcgggcggtcttatatgcacctgctggtacccgacgcgacaagtgacgcacttttgtcacagcgatccaaaggcgaaggccagtgtcctgcgaccactgaacgcctttggtgtaaattcgtcggcagccacagcgccggtggcccaactattccggaacaacattagttcatcgggcaacgagcgtgtgggagtgcgcc

SEQ ID NO: 16122 - protein, 553 aa, DROSOPHILA
MLSAQQEIDRGRRPANKEHQFTAPPPRLRRSSTKMTSRTRHCARLGIVLLGICCIASGIYLFRNWIDMFTRMRGQEMALSPNSRSFEGWKVSPLPLDFDIYLFNWTNPDDFYVGSNKKPHFEQLGPYRFREKPDKVDIEWHNHNASVSFHKKSWFYFDAAGSNGSLWDKVTTVNSVAHSAARRAAVDWFARTGVNIANKLYRQGVTITKTVDEMLFKGYEHPFISVGKLLRPQDVPYKRIGYHYPRNGSSEFDGDINMFTGADDIAKMGQIHTWNNLTHTGAFEGTCGQVHGSMGEFFPPNLGTKDTVYMYMPKMCRAIPLDYVETVTVHGVTAYKFSGTRHAVDNGTLYPDTRCYCVGGKCMPSGVINIGPCSFNASVYMSFPHFYMADPSYLEAIEGLRPEREKHEFFMALEPNAGVPMDVGGGFQANYYMEPIPGITLYENVPTVMIPMMWCEERVRVSEEIAADIALVPLIVLLGQIVTGILLAGGLICTCWYPTRQVTHFCHSDPKAKASVLRPLNAFGVNSSAATAPVAQLFRNNISSSGNERVGVR

SEQ ID NO: 16123 - DNA, 3967 bp, DROSOPHILA
tcacgtcacataccaccacattacctaccacgcatgccccaatcgcattaggagttccctcaacacatctgcacgctttgcggacagcgagagagatttataagattatttattttagtgccaaataacagcagaaaacgcaagcaaaaagtcattaactattttagtaggataaactaaattgtatatagagcgactcgcttagagcgccccattactcattttccttaattcttgaagtttaaactgcgcatgcccaaagtatttatatttatataataatgcataacatttgtagagcgatatttaagattttaatgcagattgatctgaagttatatagaaataatattgaacagagaacataggtagcgagaattgttgctcatttacataggtaggccgaaaaactaaaaattatagttgttgttttaagtcttgtacaaataacgctagcactgcaaagattacgcatatcctatgtacaaatgtcgatcagtgtaagatctaaatacctagattataaagcacagctgtgaaccccggaaatatttccaaaaattccttaagataaatgaatagaaaaaattattaaaatcaagtgatcaaagagggactttctgaaaatggcagtagttactaaaactacgtatggagaccctgaaaaaaaaatatccaaacatatcttcatataaattttaaattcgaaatccaatcaatttatacatttgttactattaaactttacatttgtctttgccttgagaaacatattcccttaaataagtttctttaaatccacacaatacacttgaataattaaatgtgttttaaaattcatcttttttatataagatgactcgtcatccaaggcgatttccaacaattccacctaaacgaaaataaaactgtcaacacataaaagtataagttttaattatgttttctggaagttgtataaaaattgctctgattaccgtacttatattaattacgtatattataaccgctgcatccagctggacagagcccaaaaacaaaggctcatgaaactgaagccaaacagggatttgaaggtgctggctccgttgccgggattgtccaggttcaattgtgaggccagctcctccggcacatccagatagactctatccaagccgaagctgaagatcagtttgcgcaacttatccacatccacatagtcaccggcagacgaccagatggtcagggtgctctcgtttgtctcgttcaccgcggccaccagtcgatgcagttgctcctcgctgttggcggcaatgccagcgcgcacgggaaaggttatggcctggccagtggataggacattgttctcgctcagcgtttccagcatgtcatcacactgctgctgcgtgtactcgccatcccggaagtcggctccccagttagttgtccagccaatggagagcactgcctgtttgtagcgcatacagccggcgaagaatcggtccgcatcaacgggtacggttctattctgttccacgggaccacttagaatatcggcgtttatccacacaggatacgtggtaggctgcacaacacagagatattgtttaatttgttctgatatctgagattcgatgaccaaacttacgttcggaatattcacgtccagaatgtccagggaaccctcgaatacctcgatcgacttgaagtcgagcttaacgccctttttttggtcctcatgatcacggttgaaattaatgatctggttgagaaattccgacagcgtaagatcagagacattggccggcggatgggccattatgggcatgtcctcgccatcgccattcagtttgcccagcacaatgtccgcttcgatgaagtcaatgccaccttgggcagggaaatgatactattgataagttggttacacgcgcatatttggccaatgatcttactggtttcggttaggacctcgtccagcaattgctggctgttgacggcatgggcccaggtaatggcagtgagatttgtgccccataccttcatcatatccgactgtttgaggaatatatattcgatctgggaatcgtctggcgctgtctgctcgaccaccacttggtactgataattgctggcgttcagagcagacccattgattttggccacgagcactgcgagtggacgtgaaatagacggcattaatattccacaattggacaatgggacgcacagagggcataatatggcagatacgcgtagataagcccatttgccttccttaccaccctaccagcgagaattgatacgcaaacacatgcaatccaatccaatgtgaatttgtttacttcgcaatgagcgtgtacatatgtatgtgtgcgcgaatggactctaattaactccctttgttatgcgatttttatggaatgcaaagcgcgttgtgcccttcttccgctttcaccgaatgctgcaatgcaactgcacatcaataattctcttcaatctgtcagctgtgcaatggcgcaagcgtagagagcagacgtgaagtgagaatggcgagaaatgtgcttaacttcaagagaccgacgctcatataccctagctctaagagtttacatgacaacttattgacaaaaaataacaaaatgttgctattttacgttttaccccctttttgcgattgtgtaaatgtattatcaagtaatgttacccaacacactcgtcagatttaaatgttttaattgagtacaggagcatcgactatcagatacctgttagtttttttaagttatgtcaaaactaaactgtctggatcctaatgtttccaagcgacccaggggtcgtatgtacatgagttaaaaacattaaaaaatgatgatatgtaatgattttgaaaagtgcaaaaatacgaattaccaaatagtagcgttgtaagtagaaaggtaatttttgagtccattttttctataggtctaagggcacttgatcatgaacttgggaccgccacggttagaaacgaactaaatggcaatttttcagtttggcttatcgatagcatttgctgatttaattaaacattgattaagtattgtaaattggtagtgacaatctatccgcatatcccaaaatctaatcttttaagtggtcacgttatccgatgaactcgcggactagttaaactagttactacattataaagaagaaagaacaaacaaacgtttttatggaaattattaccacacatcttgtaaaatcatatatttcattaagtacgatttacatttatttgcttattaaaagataaaatgttatttaaataagtttagaccgcggtctctgttagaaaagcgttgcattttaacatttctgttaaatgagcagcagtaatagaagagaaaacgtaagagagcggttcaaagagcggcactagagtgaccatgcggcggtacacaagaaatgcggccaataagcgagagcacaaactttaccgaaacgagcgctagaagaactggccacactacacccccgacactcagttttagttcgaaaatttaacggctctggaaccgttcggacgtgtcgctctcggtgcgcgtgtgtgtgagtggcgaatataaatatcgggggaaaagctcgcacgtgcgacgcttgcgaaaaaaaaaattgaaaatatatagtaaaattgttgttttatttatgagtcgaactaatgtcccgtcagttgactaaggacaacgccaagaaataaaaaatagttttaggagaaatagtttcacgactttattctttggatctcagcttaagactaaaaatcaaatgcaaattggattgaggagaagcctcagtatttgaacaatatttgtatttcgggagagcctcgctcttgggttcttaagattaggtagcgttgaaagagggcagtcaaatctgcttaggtcaggctttaggatgtttacaagaacggctgcgctgccaaagataaacgaat

SEQ ID NO: 16124 - DNA, 1606 bp, DROSOPHILA
gttgtccttagtcaactgacgggacattagttcgactcataaataaaacaacaattttactatatattttcaattttttttttcgcaagcgtcgcacgtgcgagcttttcccccgatatttatattcgccactcacacacacgcgcaccgagagcgacacgtccgaacggttccagagccgttaaattttcgaactaaaactgagtgtcgggggtgtagtgtggccagttcttctagcgctcgtttcgtaactagtttaactagtccgcgagttcatcggataacgtgaccacttaaaagattagattttgggatatgcggatagattgtcactaccaatttacaatacttaatcaatgtttaattaaatcagcaaatgctatcgataagccaaactgaaaaattgccatttagttcgtttctaaccgtggcggtcccaagttcatgatcaagtgcccttagacctatagaaaaaatggactcaaaaattacctttctacttacaacgctactatttgtgctcgtggccaaaatcaatgggtctgctctgaacgccagcaattatcagtaccaagtggtggtcgagcagacagcgccagacgattcccagatcgaatatatattcctcaaacagtcggatatgatgaaggtatggggcacaaatctcactgccattacctgggcccatgccgtcaacagccagcaattgctggacgaggtcctaaccgaaaccagtggcattgacttcatcgaagcggacattgtgctgggcaaactgaatggcgatggcgaggacatgcccataatggcccatccgccggccaatgtctctgatcttacgctgtcggaatttctcaaccagatcattaatttcaaccgtgatcatgaggaccaaaaaaagggcgttaagctcgacttcaagtcgatcgaggtattcgagggttccctggacattctggacgtgaatattccgaacgtaagtttggtcatcgaatctcagatatcagaacaaattaaacaatatctctgtgttgtgcagcctaccacgtatcctgtgtggataaacgccgatattctaagtggtcccgtggaacagaatagaaccgtacccgttgatgcggaccgattcttcgccggctgtatgcgctacaaacaggcagtgctctccattggctggacaactaactggggagccgacttccgggatggcgagtacacgcagcagcagtgtgatgacatgctggaaacgctgagcgagaacaatgtcctatccactggccaggccataacctttcccgtgcgcgctggcattgccgccaacagcgaggagcaactgcatcgactggtggccgcggtgaacgagacaaacgagagcaccctgaccatctggtcgtctgccggtgactatgtggatgtggataagttgcgcaaactgatcttcagcttcggcttggatagagtctatctggatgtgccggaggagctggcctcacaattgaacctggacaatcccggcaacggagccagcaccttcaaatccctgtttggcttcagtttcatgagcctttgtttttgggctctgtccagctggatgcagcggttataa

SEQ ID NO: 16125 - protein, 321 aa, DROSOPHILA
MMKVWGTNLTAITWAHAVNSQQLLDEVLTETSGIDFIEADIVLGKLNGDGEDMPIMAHPPANVSDLTLSEFLNQIINFNRDHEDQKKGVKLDFKSIEVFEGSLDILDVNIPNVSLVIESQISEQIKQYLCVVQPTTYPVWINADILSGPVEQNRTVPVDADRFFAGCMRYKQAVLSIGWTTNWGADFRDGEYTQQQCDDMLETLSENNVLSTGQAITFPVRAGIAANSEEQLHRLVAAVNETNESTLTIWSSAGDYVDVDKLRKLIFSFGLDRVYLDVPEELASQLNLDNPGNGASTFKSLFGFSFMSLCFWALSSWMQRL

SEQ ID NO: 16126 - DNA, 3423 bp, DROSOPHILA
tcacgtcacataccaccacattacctaccacgcatgccccaatcgcattaggagttccctcaacacatctgcacgctttgcggacagcgagagagatttataagattatttattttagtgccaaataacagcagaaaacgcaagcaaaaagtcattaactattttagtaggataaactaaattgtatatagagcgactcgcttagagcgccccattactcattttccttaattcttgaagtttaaactgcgcatgcccaaagtatttatatttatataataatgcataacatttgtagagcgatatttaagattttaatgcagattgatctgaagttatatagaaataatattgaacagagaacataggtagcgagaattgttgctcatttacataggtaggccgaaaaactaaaaattatagttgttgttttaagtcttgtacaaataacgctagcactgcaaagattacgcatatcctatgtacaaatgtcgatcagtgtaagatctaaatacctagattataaagcacagctgtgaaccccggaaatatttccaaaaattccttaagataaatgaatagaaaaaattattaaaatcaagtgatcaaagagggactttctgaaaatggcagtagttactaaaactacgtatggagaccctgaaaaaaaaatatccaaacatatcttcatataaattttaaattcgaaatccaatcaatttatacatttgttactattaaactttacatttgtctttgccttgagaaacatattcccttaaataagtttctttaaatccacacaatacacttgaataattaaatgtgttttaaaattcatcttttttatataagatgactcgtcatccaaggcgatttccaacaattccacctaaacgaaaataaaactgtcaacacataaaagtataagttttaattatgttttctggaagttgtataaaaattgctctgattaccgtacttatattaattacgtatattataaccgctgcatccagctggacagagcccaaaaacaaaggctcatgaaactgaagccaaacagggatttgaaggtgctggctccgttgccgggattgtccaggttcaattgtgaggccagctcctccggcacatccagatagactctatccaagccgaagctgaagatcagtttgcgcaacttatccacatccacatagtcaccggcagacgaccagatggtcagggtgctctcgtttgtctcgttcaccgcggccaccagtcgatgcagttgctcctcgctgttggcggcaatgccagcgcgcacgggaaaggttatggcctggccagtggataggacattgttctcgctcagcgtttccagcatgtcatcacactgctgctgcgtgtactcgccatcccggaagtcggctccccagttagttgtccagccaatggagagcactgcctgtttgtagcgcatacagccggcgaagaatcggtccgcatcaacgggtacggttctattctgttccacgggaccacttagaatatcggcgtttatccacacaggatacgtggtaggctgcacaacacagagatattgtttaatttgttctgatatctgagattcgatgaccaaacttacgttcggaatattcacgtccagaatgtccagggaaccctcgaatacctcgatcgacttgaagtcgagcttaacgccctttttttggtcctcatgatcacggttgaaattaatgatctggttgagaaattccgacagcgtaagatcagagacattggccggcggatgggccattatgggcatgtcctcgccatcgccattcagtttgcccagcacaatgtccgcttcgatgaagtcaatgccaccttgggcagggaaatgatactattgataagttggttacacgcgcatatttggccaatgatcttactggtttcggttaggacctcgtccagcaattgctggctgttgacggcatgggcccaggtaatggcagtgagatttgtgccccataccttcatcatatccgactgtttgaggaatatatattcgatctgggaatcgtctggcgctgtctgctcgaccaccacttggtactgataattgctggcgttcagagcagacccattgattttggccacgagcactgcgagtggacgtgaaatagacggcattaatattccacaattggacaatgggacgcacagagggcataatatggcagatacgcgtagataagcccatttgccttccttaccaccctaccagcgagaattgatacgcaaacacatgcaatccaatccaatgtgaatttgtttacttcgcaatgagcgtgtacatatgtatgtgtgcgcgaatggactctaattaactccctttgttatgcgatttttatggaatgcaaagcgcgttgtgcccttcttccgctttcaccgaatgctgcaatgcaactgcacatcaataattctcttcaatctgtcagctgtgcaatggcgcaagcgtagagagcagacgtgaagtgagaatggcgagaaatgtgcttaacttcaagagaccgacgctcatataccctagctctaagagtttacatgacaacttattgacaaaaaataacaaaatgttgctattttacgttttaccccctttttgcgattgtgtaaatgtattatcaagtaatgttacccaacacactcgtcagatttaaatgttttaattgagtacaggagcatcgactatcagatacctgttagtttttttaagttatgtcaaaactaaactgtctggatcctaatgtttccaagcgacccaggggtcgtatgtacatgagttaaaaacattaaaaaatgatgatatgtaatgattttgaaaagtgcaaaaatacgaattaccaaatagtagcgttgtaagtagaaaggtaatttttgagtccattttttctataggtctaagggcacttgatcatgaacttgggaccgccacggttagaaacgaactaaatggcaatttttcagtttggcttatcgatagcatttgctgatttaattaaacattgattaagtattgtaaattggtagtgacaatctatccgcatatcccaaaatctaatcttttaagtggtcacgttatccgatgaactcgcggactagttaaactagttactacattataaagaagaaagaacaaacaaacgtttttatggaaattattaccacacatcttgtaaaatcatatatttcattaagtacgatttacatttatttgcttattaaaagataaaatgttatttaaataagtttagaccgcggtctctgttagaaaagcgttgcattttaacatttctgttaaatgagcagcagtaatagaagagaaaacgtaagagagcggttcaaagagcggcactagagtgaccatgcggc

SEQ ID NO: 16127 - DNA, 1239 bp, DROSOPHILA
gcacaacgcgctttgcattccataaaaatcgcataacaaagggagttaattagagtccattcgcgcacacatacatatgtacacgctcattgcgaagtaaacaaattcacattggattggattgcatgtgtttgcgtatcaattctcgctgtgctcgtggccaaaatcaatgggtctgctctgaacgccagcaattatcagtaccaagtggtggtcgagcagacagcgccagacgattcccagatcgaatatatattcctcaaacagtcggatatgatgaaggtatggggcacaaatctcactgccattacctgggcccatgccgtcaacagccagcaattgctggacgaggtcctaaccgaaaccagtggcattgacttcatcgaagcggacattgtgctgggcaaactgaatggcgatggcgaggacatgcccataatggcccatccgccggccaatgtctctgatcttacgctgtcggaatttctcaaccagatcattaatttcaaccgtgatcatgaggaccaaaaaaagggcgttaagctcgacttcaagtcgatcgaggtattcgagggttccctggacattctggacgtgaatattccgaacgtaagtttggtcatcgaatctcagatatcagaacaaattaaacaatatctctgtgttgtgcagcctaccacgtatcctgtgtggataaacgccgatattctaagtggtcccgtggaacagaatagaaccgtacccgttgatgcggaccgattcttcgccggctgtatgcgctacaaacaggcagtgctctccattggctggacaactaactggggagccgacttccgggatggcgagtacacgcagcagcagtgtgatgacatgctggaaacgctgagcgagaacaatgtcctatccactggccaggccataacctttcccgtgcgcgctggcattgccgccaacagcgaggagcaactgcatcgactggtggccgcggtgaacgagacaaacgagagcaccctgaccatctggtcgtctgccggtgactatgtggatgtggataagttgcgcaaactgatcttcagcttcggcttggatagagtctatctggatgtgccggaggagctggcctcacaattgaacctggacaatcccggcaacggagccagcaccttcaaatccctgtttggcttcagtttcatgagcctttgtttttgggctctgtccagctggatgcagcggttataa

SEQ ID NO: 16128 - protein, 321 aa, DROSOPHILA; identical to SEQ ID NO: 16125

SEQ ID NO: 16129 - DNA, 6366 bp, DROSOPHILA
ttttgttttgttttgtcttataaatagtttagttttagtgcttacgtttagttgatggccttagaactaatcaatttgcgggaaacttacagattttcaactaaggatctcgattcgtatttaagtttagtttataattttattttattttattttaatgcgtgtgctcttgctcgtggtacgtttgagtcggtgtcagtcttataaattcaacccaggacgatttaaatatctcgctaacaggataacatgaggctaacaaagatacgctatttgaggtagttctgttcaagtgggatcttctggtttctcttcgattcgaaaatcataaaagtaaggccacgtacatgcatggtcgttataaataatctagtgctaataatttttaaaacaaatcactggcatttaacaaagttgtacaaggtgtagctaacccgctaacccattctgatgggagcctctactgctctgtccttagatagctcctccaccgcctcccgattccgccttcagtcttatgtaagtgggtttacatatgcacacatatcttagttttgtcagttggccggcatctgggatggtggagtaacactgttttaaggcctacaactagctggtttccaaagatggcctacgagtgcctagcctaagggtacctatctgtattctatgctgtcctatcctactatctatatcctaacatttctgttttttttaggcacaaagtgatgctgacaacaatttagtttagtgtgtgggtttgattttcgatgggtgccaggtgctggtgcggatgattcccacaacgactgggatgaggtttcttcgtttaaagcttcaccaacgctggtcggcgcctgagtcgccgatggtaagtaaggaaagtaacacaaggatggatctaattgggtttgaataataggagttgctatctaagcctggcctactccaaggagtctaggctgtccgtggcatactgccaggccatggtgagcgttaatcagtcggcccgggcctgagcgtcctcgccttccatcagctccctcttcagaccaatgggaacgaactgcggcgaggatgggtagtccacgtgatccttgccattggcggacgcactgctggcgtgcataatcacgccggcaccagcctcggttggctggggcgagtagggcgatggtggccgctcctttctagccagcgagagatcctccacgtgctcttgctcatgatcctcctcatcgtccgcatcttcacgttcgtcctggtcgcgttccctcttgataatattttgctcgtgcttctccatctccaagtccatggcctcctgctcgtgcgggtagtgacgaccttgcggacttggcgaccgcatgccatggccattggagcgctggtccatctccgctggactgctggaaaggcgattggcagcggcatgggccgctgcggccagagccatggcatggagagcctctcggccggccatgtcaccaccacggttctccagagcctgctgaaggaaagcgtgatccagaagggccgcagctgagggtggaatggtgggcggcatgccgtgatgggcgggcacatggtccaccttctgatcacgcttcacctccgagtgatggccatgtccatgaccgtagttgtgtgcagcagcggctgccgcagcggaataggagaaaccttgtgaggactcagctcccggcgggctgcgcttgggtgtgcggtgtgtgccacgtcctgtggtgatgttcagcttacggactttgtcgtagagagtgcgactgggcaggccgtacttcctgctcgcctgcagggcactcattccctccctcaccgcttggatggcgcacatcatatccgctctggtatactgcttgtatcgcttccattccggcttcttgccgccagactgaccggtctcctcttcaaaggaacgatctgtgtagggcgaaagtggttccttgtcgccgccgtagtcggagccattgaagctgtggttgcgctcgcctccacttactcccaatccggcaggaagctgggtgttctggtggggatgagtgggcgtcttctctccattggcattcattggtccgggttgcgaggagtcagcgggattagcttgggccagaacgtttctcaggatgggtgtgtcgcggtttccactcagaagcatgcttgaaatggccgacagcttcttgcgcttgagaggattcatatcggcggctgattcgtagacagagttcaacatggcggcggcggcggagggtgtcagtggccactgtccaccggcttctcccgctcccgaggccgccgagtggggtgtggcctgggtgggggtcagtggagcctcaccggccggaatctgactagccgacatcggctgctgctgaggataatggctgtagcccggctgatagccaaactgcggcggcggtggtggcgagcagctgctcgagatggcggcactgggcgagatgtgcgtggatgtggagatcacggatgaggagtggttggatgctgatccgttctggggcttggctccgccagctcccgaactggaggtgggcgtgacgctggcatgattgaacttcatcaagttgtcgtacagacccttgacctgaagctccttggctgtgcgcagaatctccggctcctggctcttggtcaccgtcgtctcgcccgtgtacatgtactgcagcaaagcggcaatctcgaagcccttcactcccggcagtatgatgctgcagtggtcctgcggcacatccttcaggatgtgctggaaatacggtgaattggccgccagaaccacgcgatgggcctggaactgttcatcgtccaccaccaggctgcagtccacatagctgcccacctcgtgcagggcgtgtagaatctgtaccagattggtctggtggttgttccagcggaggcagtacgtctgtcccacctcgccactgctggctaccggcgccgttgggccgcccatctcctggtcacgctccgtttcgcgatccctgtcctgcttggcctcccgcggaatgtggtggtggctcacccttgaatggtggctgtggtggtgctggttcgctggctggtcgggctcctcgtccggagcgggatcgctgctattgctgctgttgttgtacacaccgttcagactggtgaaggcggcgctcagcagcgtcggcgagtagaaggatagatgcttcctgaccttgagcgccagtttaaggcctacggatcacctggttgcctggttaacggaaacgaaagagaacaagcggagaaaatgccaattagtacgagttctagagcctcggccaagcgattagattttggcaaatgtcagagggttggtgtggaacatttcaaatttcgcatgggttgctaaaatcaacaggaagcacacacagaacttcgtacacacacaaacaacagatttgcccaaagtgggcaaatggaagtcaggtgtgcgaaactggggatggtcgctcctccagtgccaccatttctctttttttttttttggcggaaaatcttgcttgtaaaatttatgcccttcgccaccccccgaagttttatgcgccgtaaaaaagtgaaagtgaaatggggaagttggcggtgggtggcagtggtggtgtcgaggaaaaacgtgtaggaaaaatgggggaaaaaaatatgcaaacatccctcgaaagatgtgtgcgcgtatttttccggctgcttttcgcgcgttttacttttacgcatacatatacatattcaaatctatatgtataatgtcaggctttcttttttttttaccgccaccgctgcctggaatcgggcaatggaaatgggaaggcaaggaaaataagggaaaatgtggctgaaaaacttgcaataattttcattcatttcgtgtacaaaaaaggaaggggagcgggggcgaaaggcaggccatatgcctatgcccttgtccttggcatgacttcaaattcggtactcgggttgtggtcgagtttcagattcaagtggacgccatatgctggcatcctggcgtcatgtgttggccattcgtcaaggagttcgcattccaaattgcggccatgtggcgtgtgtgaatctccagttaccaacaggtagagtggcgcaggatccccccataaacgataatggcaatcagacaacaagaggaaaatgtcaaaggggcgaggcaccgtaaaaaataaaccagaaggtacatatatggcaaaaaaaaaatgaggatagaaatgcggacaatcaaacaaaggcggcaaacaaacgatcgcattattgtctgcggaaaatgcgcaagagatcatcaattgttgttgtctagccattgtctagccgacaggataatgggcaacctgcggagatcccaatcccattcccattccagttcccactcccgttttgcgcaacatcgagcaggtaagcgattttgcagcaagaagcaagcgcattagatgcggttataataatgccataaaggcgacgcctcaacgcctcgaagatcgcgcattgcgtatacgccacgatcgccaaatgatcgaaagctcgcgccggaaagcggaaagctttggccaacttttgctaacagagctcgccaacagcggccaccattttgtgagaaaaacgtttaattaaaattatcacaaacgtcattgaggcgaatgcacttgggaaccggtttcgctgggcttagggtttccagtttctatttttttattttttttgacacgtattgggcttgaaaattgcgaaattacaccaaaaataattcggaaatttaaaggtctgcgaagagcacagtgctactaagttataaatttggacttttaataacggcaaataaaaagaaaccatcttagggttactgcctaaacgaaaacacattttcagttatattctgagttcgcgtttaaattaggtaaaataaattatttataaccttaccacgaaataatgaaaatgccgcaggtggggcacaatatcgatggtgctaagtggccaatttagttgctggtacactttaaagggtatttcgcattcagttgtccactgttgttcccttgatttgtttaaatgttgtagctttcggagtttttcgatgttaaaaatgttttcacattctcagaacagagtttttttttagttggtatttttcctggttgttcgctcttctgctccacacacacacacaattgcacaaaacacgagatgttgccaaaaatattagatattttccaagaaactgcgacacgtttagcgtttatacttgagttttccgctcgccttgtgattttgatgtttttgagaaaattttgagagttttgcgtgcacgttgttgcagattcgagcgctcaaacttgaataaaactgccacggttttcgtgtgcagcaagtcattgaagaccaaatttcccgagcgctgccagagcgggatggagcgatgcacagagggtgagagcgagagagcggcgagaaaactgttcgaatgcgaaggggaaacaggaaaactgtgctacgaatccaccctcgcgccctctctttcgcgcagttgcagttttgtgcgtgagcgagattgcgattgcgactgcttgtgtgcgtgtgcgtgcgtgcatgtgtgtgcgagctgcatatatggttgctgccattggatgcagtgcgtgcgagggagaggggcatagctgtgtcccagtcttttgcctttttggcgactgcattttttacgtttcttttttttttctttctttggttaatactcgaatttaggcaggttgcgtgaaaaactggtctcggatctttcgttgttcgatctttactattttattcgacaccctttctcctcgtttcgcttctccgcggcattcgtcgccattttgaactgcctgttttgatactttgtcgccttgtcttttcgtatattttcaatttttctcgctttactctctttcaacgtttttttctgccacaacttcttagttatgcaaatttgaatttaagtgtagagataaagtaacgaccttcggcaatcaatgcacaattgaatgcagttttggcctgcaacgcgattaatttgcatatgtctcgaccttcgacccctcggacgataacccttcgatttcttgattttttatgcaaattgcaaattaacggtcgctaggggatgcgttttgaaagggtaacatataacatactgccaatttgggatttcgttattatcatgcaaattatgcgaggcacctgtaaaatgtcttagggtatctcgttttttatttttctaaaatagcattctttggggttgaggttttcaaggagaccttaggtaatggactttctaaagaacaaaagctctgc

SEQ ID NO: 16130 - DNA, 2638 bp, DROSOPHILA
ctcgaatctgcaacaacgtgcacgcaaaactctcaaaattttctcaaaaacatcaaaatcacaaggcgagcggaaaactcaagtataaacgctaaacgtgtcgcagtttcttggaaaatatctaatatttttggcaacatctcgtgttttgtgcaattgtgtgtgtgtgtggagcagaagagcgaacaaccaggaaaaataccaactaaaaaaaaactctgttctgagaatgtgaaaacatttttaacatcgaaaaactccgaaagctacaacatttaaacaaatcaagggaacaacagtggacaactgaatgcgaaataccctttaaagtgtaccagcaactaaattggccacttagcaccatcgatattgtgccccacctgcggcattttcattatttcgtggccttaaactggcgctcaaggtcaggaagcatctatccttctactcgccgacgctgctgagcgccgccttcaccagtctgaacggtgtgtacaacaacagcagcaatagcagcgatcccgctccggacgaggagcccgaccagccagcgaaccagcaccaccacagccaccattcaagggtgagccaccaccacattccgcgggaggccaagcaggacagggatcgcgaaacggagcgtgaccaggagatgggcggcccaacggcgccggtagccagcagtggcgaggtgggacagacgtactgcctccgctggaacaaccaccagaccaatctggtacagattctacacgccctgcacgaggtgggcagctatgtggactgcagcctggtggtggacgatgaacagttccaggcccatcgcgtggttctggcggccaattcaccgtatttccagcacatcctgaaggatgtgccgcaggaccactgcagcatcatactgccgggagtgaagggcttcgagattgccgctttgctgcagtacatgtacacgggcgagacgacggtgaccaagagccaggagccggagattctgcgcacagccaaggagcttcaggtcaagggtctgtacgacaacttgatgaagttcaatcatgccagcgtcacgcccacctccagttcgggagctggcggagccaagccccagaacggatcagcatccaaccactcctcatccgtgatctccacatccacgcacatctcgcccagtgccgccatctcgagcagctgctcgccaccaccgccgccgcagtttggctatcagccgggctacagccattatcctcagcagcagccgatgtcggctagtcagattccggccggtgaggctccactgacccccacccaggccacaccccactcggcggcctcgggagcgggagaagccggtggacagtggccactgacaccctccgccgccgccgccatgttgaactctgtctacgaatcagccgccgatatgaatcctctcaagcgcaagaagctgtcggccatttcaagcatgcttctgagtggaaaccgcgacacacccatcctgagaaacgttctggcccaagctaatcccgctgactcctcgcaacccggaccaatgaatgccaatggagagaagacgcccactcatccccaccagaacacccagcttcctgccggattgggagtaagtggaggcgagcgcaaccacagcttcaatggctccgactacggcggcgacaaggaaccactttcgccctacacagatcgttcctttgaagaggagaccggtcagtctggcggcaagaagccggaatggaagcgatacaagcagtataccagagcggatatgatgtgcgccatccaagcggtgagggagggaatgagtgccctgcaggcgagcaggaagtacggcctgcccagtcgcactctctacgacaaagtccgtaagctgaacatcaccacaggacgtggcacacaccgcacacccaagcgcagcccgccgggagctgagtcctcacaaggtttctcctattccgctgcggcagccgctgctgcacacaactacggtcatggacatggccatcactcggaggtgaagcgtgatcagaaggtggaccatgtgcccgcccatcacggcatgccgcccaccattccaccctcagctgcggcccttctggatcacgctttccttcagcaggctctggagaaccgtggtggtgacatggccggccgagaggctctccatgccatggctctggccgcagcggcccatgccgctgccaatcgcctttccagcagtccagcggagatggaccagcgctccaatggccatggcatgcggtcgccaagtccgcaaggtcgtcactacccgcacgagcaggaggccatggacttggagatggagaagcacgagcaaaatattatcaagagggaacgcgaccaggacgaacgtgaagatgcggacgatgaggaggatcatgagcaagagcacgtggaggatctctcgctggctagaaaggagcggccaccatcgccctactcgccccagccaaccgaggctggtgccggcgtgattatgcacgccagcagtgcgtccgccaatggcaaggatcacgtggactacccatcctcgccgcagttcgttcccattggtctgaagagggagctgatggaaggcgaggacgctcaggcccgggccgactga

SEQ ID NO: 16131 - protein, 661 aa, DROSOPHILA
MGGPTAPVASSGEVGQTYCLRWNNHQTNLVQILHALHEVGSYVDCSLVVDDEQFQAHRVVLAANSPYFQHILKDVPQDHCSIILPGVKGFEIAALLQYMYTGETTVTKSQEPEILRTAKELQVKGLYDNLMKFNHASVTPTSSSGAGGAKPQNGSASNHSSSVISTSTHISPSAAISSSCSPPPPPQFGYQPGYSHYPQQQPMSASQIPAGEAPLTPTQATPHSAASGAGEAGGQWPLTPSAAAAMLNSVYESAADMNPLKRKKLSAISSMLLSGNRDTPILRNVLAQANPADSSQPGPMNANGEKTPTHPHQNTQLPAGLGVSGGERNHSFNGSDYGGDKEPLSPYTDRSFEEETGQSGGKKPEWKRYKQYTRADMMCAIQAVREGMSALQASRKYGLPSRTLYDKVRKLNITTGRGTHRTPKRSPPGAESSQGFSYSAAAAAAAHNYGHGHGHHSEVKRDQKVDHVPAHHGMPPTIPPSAAALLDHAFLQQALENRGGDMAGREALHAMALAAAAHAAANRLSSSPAEMDQRSNGHGMRSPSPQGRHYPHEQEAMDLEMEKHEQNIIKRERDQDEREDADDEEDHEQEHVEDLSLARKERPPSPYSPQPTEAGAGVIMHASSASANGKDHVDYPSSPQFVPIGLKRELMEGEDAQARAD

SEQ ID NO: 16132 - DNA, 3017 bp, DROSOPHILA
aacaagacgcagacgagacggggcgcaaataaattgagcggaaagctaaaaataagctctccattccgattcgctggcagcgctgccgcggcggcaaacattcagaaatgcggcagacgctttggcaaccgcaaaatgcaacggcagctacaacaaaccatttaaacaacaacaaacatataacaaaaacaacaacaaatgagaaaaataagagacaaaaattcagcagcggaaaaatgtattatttattgtgtttttttgcgggtaaatatttcgcgagcgctgtttaagcataaaattaagtagtttaaataaataatcacaaaaaatggcctagccgaaaaaaaatgttttacaccccggccacgaaagcagcgccataaattgcagctgcattgaaattataattattatgaattatattataaatggccagcggtgaaatttgtttttatatttatatatgtatataaaaaattcttctttttttttgcactactctgtgcattttgcgctttttatgtcttttttttaacggcagcaaacacaaagtgtcgttaaagaagatcaaatcgaatgtgaaacgtgaatgtgaatggaagtcgtcgtagcagtccaccaaatatggagccgcagtagccgccgctgaaattttgtgatatttgtatcgcatttgtggctgccgcgtggggcgttcgttcttatgcataattaataagatcaaggctgtggatactgaaaaaaaaacagggaggagggtgtagcaataataattgagcggacgaagggcggcctgattatcgagttaataataatcgcatgcgttctgggaaattgttaatatgcccaagtaggtgcgcattatgtatcccataagaaacacttgtccaatggagctaattttatacgcttagcatggaaaggtagacgaaaagaccttactgattacttcaaggagaaaatagttaccattttattggaatttattttctctcttatattaaacccaacgcacctttcttttcttatgctccaattcccgctgcgccttgtgcatctccttgagctccacctccttcaactgatcgaggatgatctggtatttctcccgattctccacatcgagcgccacatgaagatagtcgtgccagttgcgcgaatcgaagccccagtggcaggtgtgattctcgaacttgcgatgcacatgacccacgaatttctgcggcgagaaccagccgtcgcactccaggcacttgatgcaggtcggtttctgataggagtacatgtccggcgtgcagataccctcgcatttgccaaagcacttgtgatacacgtggaagctgagggcacccttggccaaactctcgatcggcacatagctattccggtcggagcgatgaagcagggcggcacagaggcgttccgcatcggttcgggtgatcaggccactggccttgacatcggatggcaggatcttggcggccttgaactccaccagctgatcgtgcgtacactgcgagcaatagatgcccagctcatcgaagatcctgttgatctgctccagcgaaaagtcattgagaacattgttgagaaactgtggcaggcacagtctcatctcgccgcccacggagaagcatccaatggtcttgccctccagtttcgtctcgtacaactccccacatcccgcatctgccaccgataaaatcggctgcgatagttcacggggtggcgtggcaggcgaatatatctgtggcggcgtgcccctcgtcgagcattcgtgatgatgcagatcctgcggctccggcgaactgagtatttcctttttgatcagcgccacaactggcggagatgcttggcacttgccattgaggccaggactctcgctcctgccattggtgactatgtcgaggacaccggcggtggtgagggcgtgtcctggtccctggagcgatttggtggcactcgtctggtatttcttcaagacggtgctaatcattggcgtcacgtattcggtcatttttgggcaatactttcgataaccaaatgtggatactactagtaatcagttatccattttcgccaaatgccgattgttacccttttcgacttttaacaaaaattttgctgtttatctatattcttagcaactctttatttagtgataggagtacgacgattgggatccataatattgattactttaaaggttcgatttgtttacttgcacttcacttaacaatttggcacattcgttgattggtttttgtttggttttgtggtcagctagtttaactaattttgttgcatttgcattttgccgacggcaaaatcagctcgaaccaccacacaggatagcaatttcgtactttcacaattttgtcgcgtgtttcgaatatttcgatattatttcagtcgtatttttagaaggaaatatatataatcgggccggcttttgtcggctgtgtaaaacttgtgcgcacttttcctactattccaattcgcctgccctgcacttattaaattttcgccataaattaattcctcttcggcgcaatttcttaagttgaatttttgtatttcatttcgtatatctcaatttctgaacttttttatctttgcgctgcacagacgacggacgcacacacacacacacgcgcacgcacacggggacacacgcacacacgcgacgaaggccggcagacagagacggagcggaaagcacgacacagacgatgggcgagagagaaagagagagggtgaacaaaaacaaacgccgcctgacaaattcttttattgtgtcgctgttgttgttgctattatcgttgctgttgctgccgccgttgttgttgcactatttataaatcttttttacgcttgcaaattatttttgcactcgttattgaatatttatttgcattcagcctggctgggcccctctcttcgcaatatatgtatatatatagtgacgtatttgggtggtccaaaccagccacttccattatttcaaagaaatcagt

SEQ ID NO: 16133 - DNA, 1017 bp, DROSOPHILA
atgaccgaatacgtgacgccaatgattagcaccgtcttgaagaaataccagacgagtgccaccaaatcgctccagggaccaggacacgccctcaccaccgccggtgtcctcgacatagtcaccaatggcaggagcgagagtcctggcctcaatggcaagtgccaagcatctccgccagttgtggcgctgatcaaaaaggaaatactcagttcgccggagccgcaggatctgcatcatcacgaatgctcgacgaggggcacgccgccacagatatattcgcctgccacgccaccccgtgaactatcgcagccgattttatcggtggcagatgcgggatgtggggagttgtacgagacgaaactggagggcaagaccattggatgcttctccgtgggcggcgagatgagactgtgcctgccacagtttctcaacaatgttctcaatgacttttcgctggagcagatcaacaggatcttcgatgagctgggcatctattgctcgcagtgtacgcacgatcagctggtggagttcaaggccgccaagatcctgccatccgatgtcaaggccagtggcctgatcacccgaaccgatgcggaacgcctctgtgccgccctgcttcatcgctccgaccggaatagctatgtgccgatcgagagtttggccaagggtgccctcagcttccacgtgtatcacaagtgctttggcaaatgcgagggtatctgcacgccggacatgtactcctatcagaaaccgacctgcatcaagtgcctggagtgcgacggctggttctcgccgcagaaattcgtgggtcatgtgcatcgcaagttcgagaatcacacctgccactggggcttcgattcgcgcaactggcacgactatcttcatgtggcgctcgatgtggagaatcgggagaaataccagatcatcctcgatcagttgaaggaggtggagctcaaggagatgcacaaggcgcagcgggaattggagcataagaaaagaaaggtgcgttgggtttaa

SEQ ID NO: 16134 - protein, 331 aa, DROSOPHILA
MISTVLKKYQTSATKSLQGPGHALTTAGVLDIVTNGRSESPGLNGKCQASPPVVALIKKEILSSPEPQDLHHHECSTRGTPPQIYSPATPPRELSQPILSVADAGCGELYETKLEGKTIGCFSVGGEMRLCLPQFLNNVLNDFSLEQINRIFDELGIYCSQCTHDQLVEFKAAKILPSDVKASGLITRTDAERLCAALLHRSDRNSYVPIESLAKGALSFHVYHKCFGKCEGICTPDMYSYQKPTCIKCLECDGWFSPQKFVGHVHRKFENHTCHWGFDSRNWHDYLHVALDVENREKYQIILDQLKEVELKEMHKAQRELEHKKRKVRWV

SEQ ID NO: 16135 - DNA, 6161 bp, DROSOPHILA
tgaagaacaagtggtggaagaaccacaatgtcacctgtgactcctaccacgaggtggatggtgacgagctgtccattattgagctgggcggcgtgtttcttgttctggccggtggcgttctcatcggcgttatcctgggcatctttgagttcctgtggaacgtgcagaacgtggcggtggaggagcgagtgactccgtggcaggctttcaaggcggagctcatctttgccctgaagttttgggtgcgcaaaaagccgatgcgcatctccagcagcagcgacaagtcgtcgtccaggcgatcatccggttccagacgcagctccaaggaaaagtcccgcagcaagacggttagctaggtggtcggaatattggacgattggcgtcttctactttggcatttcattagagagtcgcattggaaatgaggcactccatggtgtccacattgtatattgtgagctatatttgtagaattattttagaacacagatagcgcatttgggtatattgaatgttctgaagatttaacgaaactttcaatgaaataatttggataactaattttagtaaacttttctgttggctctaatgttttaatagttgacaataattgattttccttacaaagatttaataaataaacattaaaatataatatgtgtgtttatatacaatatatagtcagttagttgtgaaattatattctatacatttcttttgaaagctgcctaattttagaccacatttagttttcattcactggtccatttccagctaatgctcgtgtctgcatggtctagattaaagagtatagagtatagacgctagactctaaagtctagacatgtggtgattgctcttctcgccgagcatggaatccatccacaatggctgctgttctccatgacgtagtaagtctcgcagagatcgctcgtggcggaggtttaaaaaatatacacattttttgtgattgtcagtgctcgtggagcgttgcccggatctggccgatttctggctgggaattatttcgctgcgcgttaaaaaatatatactttttagtgcgttaatagtggatctattgttctggtgctctttttaaagttgtagtaatgcacggtctacagttcctggttcttctggcactagcaattgccagcggcgccaatgaagacaccttagtgatcaaaatcggttggttgataacttaagtgtatgttcaaaatgtacaaactgatttcgtttaggagccattttcttcgacacggaaatgaagttggccgatgcctttagtgcggcactcgaggaagtgaatgcaataaatcccgctctcaaactggatgcaatcaagcgctatgtgaccgtcgacgacagcattgttctgcaggatatttgtgagtactgacggaagtacggaagtggtgcacaattaatcctataaatcttactgctttagcttgcgatttgattggaagtggggtggctgctattttcggaccaagttcaaagacaaacagcggtaagtttcattttcctacgtataccataccctctgggatatattatttttaaaacgaatcatatggttcggcgtcataaaataaattgtctagctgcatatacgcgcgtatacaaaatccattaaagagaacggcgatagagaaagagcagcgaggagatcttctaaaggctcgtcaacctcgttaatgattcttcaaaatacccaaaaaaacacactcacacaattcggtcataaaattgggctgcccaacgttggatccaaatatttttgcagtaaataaagcgtccggtggttggggaccatttggagaagagccaagaaaaatcgacgcgttttttgtttgcgttgtgctctctgtgttttgatcgccactttcgttgtgcgttccggtagttcccccgatcattctaaacaaaaataaacacccccacattcgttctccttctccccctctaaccatagacatcgtcgaggtactgtgcaatatgacgggtataccgcatctgcaattcgattggcatccccagcagtcgaacagggagcgtatgaaccaccaacttaccgtcaatgtggctccaatggagctcttcctgtccgccgccttctcggacatcttggccagcaagaccttcgactggaagtcctttaccatagcctacgagaggagttcccgtatgtattgtgatatgattacatataacatttacaataatttatttaagtttttatgctttacctctaactttcaattccttagtagatcctaacacatcctttcgcacatagaccttattcgcttgcagcacatcctagcatggaaacagctccacaaagctggtatcaagatgcaggaattcgaacgaggggatgactacaggatactgtggaagcgcatcaacaacgctcgtgaaaaatttgtccttctggactgtccatccgacattttggtggacgtaatcaatgcctcgattggatataatatgactggttcatttaatgtgagtactaaaaagcagttttgtatcttaaaaccacgtactaagtttgattactttctaaatcaacagcatttatttctaaccaacttggatacacatctgagcggcattgatggattctactcccgggatttcaccgtcgccgtggcagctgtcaggatacgaacctatgtgcctccgccagttcatgatgaaatagatgtgtttgacaacagtgtggataccagggtaaaatcgaagaatccaacttgaaatatgctgtgcttatgtaatttttccttggtatacaatagttttcctcactgggatcacagctcgtgtatgattccattgtgctgttctacaatgctctcttggaaataagtcagcgtccaggattctacatacctaattttagctgcggacgtggcttctggcagccaggaccgcgtctggtggagcaaatgaagcaggcaagttgtttgatttatacggaaaagtaaacggacatgttctaaggtacttcgttttcagattaccccaaagatggtgaaacctccatttaaaacacaaaggctacagataaatgctgatggccagcgagaagattttaatcttgaagtttacaaccccataattgatcgcgtaactcacatatggaataaggagtttcagcttgtggactttgaaaaactgagagagaactcgactcaagcccttaaacagaagagacttcagaacaaagaggatttctcccagaagcccatcagatacacagtggccactcgagtgggcaaaccgtacttcagctggcggttagttgggaaaatatcttatatcttattttattattattcattattattagtgaggaacccgaaggagtccattacgagggcaatgaacgttttgagggctatgccgtggatttgatatacatgttggcccaagagtgcaaattcgatttcaactttgaaccagttagggataacaaatatggcagttacgatgcgaatacagatgaatgggatggcataatcaggcaattgattgataatgtaagatactttaagatactttaagatcggatatcttaaaatatttatttgttaaatctcttttgttttatcatagaatgctcaaattggaatctgtgacttgaccataacccaggcgcgtcgttcggtggtagacttcactgtacccttcatgcagctgggcataagtattctgtcgtacaaggagcctccaccaaaggcggatatatatgctttccttaatccgtataatgccgaggtatggctattcgtcatgattgcgatgatgatcacggcctttgccttgatcttcaccggtcgcattgatcagtatgaatgggatcagccggtggagaatgtgaatcgcgaaatggagcggcagaatatctggcatctgagcaacgccttgtggctagtgttgggctcaatgcttaatcaaggttgcgatctattgcccaggcaagtgaaagatcttcgacttctagcttatactaactagtaggatttgcattaatccaaacgtacctttccgtttaggggccttccaatgcgtttgctgaccgccttctggtggatctttgccctgctaatctcccagacatacatagccaagttggccgcctttataacctcgtctaagattgctggtgatattggctccctgcacgatctggtggaccaaaataaggtgcaatttggcactattcgtggcggggcaacttcggtgtacttctccgaatcgaacgacaccgacaaccggatggcatggaacaagatgttgtccttcaagccggatgccttcaccaagaacaacgaggagggcgtggatcgggtgaagctgagcaagggtacctatgccttcctaatggagaccaccaatctgcagtattacgtgcaacgcaattgcgagctaacccagatcggtgaaagttttggcgagaagcactatggcattgcagtgccgttgagtaagttactccgtttaatgaacgttctcatctagttttcctcgaacttttccaaacagacgccgactttcggtccaatctcagcgtgggaatcttgaggctcagcgagaggggtgagctcttcaagctgcgaaacaagtggttcaacagcaatgagagcacctgcgactcgaatgtcccgaccatcgatgatggccagttcgacatggattcggtgggtggactgttcgtggtgctgatcgtcggcgtggtcgtgggactcgtgatcggtgtcgccgagtttttgtggcacgtccagcgcatttcggtgaaggagaaggtaggatgcccccacttccaggatgataattcccttttaatgaaatcttcttgttagattccacccatgctggcactgaaggcagagttttactttgtaattcgattctggttgactagaaaaccgctgcacacctatcgccaaagtcgggattcaacttcgacgggttactcatcgctggagcaaattacaagtgcttccagtgcgaaaaagaaaaaaaagaccaggcgaattgaaaagtaggggagtaaaaaggcttgcgaacattcagtgaaatacgattaagattaggataaggatattttaaaatggatcctttaaaagctctacatacgaaacttgttaatttcttagaactaagggatagtaaggtaataaaacaaataaaaaatatacattgaactacaaagatggcgcttttcaacaacagtatctgaactacatgaattaacttagtttggcaatcaaaagttacaattcaggggccaaaatcaatgctattaaacttcattttatttgcaatgttattttaattaaacagcagtaagtgataaagcctaacacttaccatatgcgtatgtatacgtttacattttttttaatctaaaacaatttgtttaacttgatttgcgagaaacatgacaagaacacaaatcgccttgtaaacatatgtatgcaaaatgcatgctggtccataaataccaattaatatttaacccgcaataaaaaatacacagacagtttaaaacagtttgtggtttttttagaaacgttttgccaagctcgaaaaaaagtgagaattgtggcataaataacaataacacaaatagtacaatgtggtttgaggattcgcagtagcgtaaacaattcgaccaacgaaatcaaataaaagaagaggagtcgaacacacatttattcaaatcaaatcaaatgaaatgaaagcgagcagaaaaccctgtcaaaaaagtccttagaccgattggcgaaaatctagtggaaaggactccggaaaactaaacagaggtcgacccacatttaacccgagtccatccatccctccccctcgaccattcgacatccattcacacgcactctttgcacttgccacaatgtatgtgtgtgtgtgtgtggtttctgtttcgttgtcctttttttgttgcttttattggtatgtcatgtttatgttggcaagttgtttttgtttgccgggtaatcgagtcaattgtttccggttcgtcgatcaggcaatcgagtgagtctgctttttacggcgtctttttcgcaccccctcccattattttctgttttttttctggtaaaaaaaggagcttttgttggcca

SEQ ID NO: 16136 - DNA, 2949 bp, DROSOPHILA
ctggccgatttctggctgggaattatttcgctgcgcgttaaaaaatatatactttttagtgcgttaatagtggatctattgttctggtgctctttttaaagttgtagtaatgcacggtctacagttcctggttcttctggcactagcaattgccagcggcgccaatgaagacaccttagtgatcaaaatcggagccattttcttcgacacggaaatgaagttggccgatgcctttagtgcggcactcgaggaagtgaatgcaataaatcccgctctcaaactggatgcaatcaagcgctatgtgaccgtcgacgacagcattgttctgcaggatatttcttgcgatttgattggaagtggggtggctgctattttcggaccaagttcaaagacaaacagcgacatcgtcgaggtactgtgcaatatgacgggtataccgcatctgcaattcgattggcatccccagcagtcgaacagggagcgtatgaaccaccaacttaccgtcaatgtggctccaatggagctcttcctgtccgccgccttctcggacatcttggccagcaagaccttcgactggaagtcctttaccatagcctacgagaggagttcccaccttattcgcttgcagcacatcctagcatggaaacagctccacaaagctggtatcaagatgcaggaattcgaacgaggggatgactacaggatactgtggaagcgcatcaacaacgctcgtgaaaaatttgtccttctggactgtccatccgacattttggtggacgtaatcaatgcctcgattggatataatatgactggttcatttaatcatttatttctaaccaacttggatacacatctgagcggcattgatggattctactcccgggatttcaccgtcgccgtggcagctgtcaggatacgaacctatgtgcctccgccagttcatgatgaaatagatgtgtttgacaacagtgtggataccaggttttcctcactgggatcacagctcgtgtatgattccattgtgctgttctacaatgctctcttggaaataagtcagcgtccaggattctacatacctaattttagctgcggacgtggcttctggcagccaggaccgcgtctggtggagcaaatgaagcagattaccccaaagatggtgaaacctccatttaaaacacaaaggctacagataaatgctgatggccagcgagaagattttaatcttgaagtttacaaccccataattgatcgcgtaactcacatatggaataaggagtttcagcttgtggactttgaaaaactgagagagaactcgactcaagcccttaaacagaagagacttcagaacaaagaggatttctcccagaagcccatcagatacacagtggccactcgagtgggcaaaccgtacttcagctggcgtgaggaacccgaaggagtccattacgagggcaatgaacgttttgagggctatgccgtggatttgatatacatgttggcccaagagtgcaaattcgatttcaactttgaaccagttagggataacaaatatggcagttacgatgcgaatacagatgaatgggatggcataatcaggcaattgattgataataatgctcaaattggaatctgtgacttgaccataacccaggcgcgtcgttcggtggtagacttcactgtacccttcatgcagctgggcataagtattctgtcgtacaaggagcctccaccaaaggcggatatatatgctttccttaatccgtataatgccgaggtatggctattcgtcatgattgcgatgatgatcacggcctttgccttgatcttcaccggtcgcattgatcagtatgaatgggatcagccggtggagaatgtgaatcgcgaaatggagcggcagaatatctggcatctgagcaacgccttgtggctagtgttgggctcaatgcttaatcaaggttgcgatctattgcccaggggccttccaatgcgtttgctgaccgccttctggtggatctttgccctgctaatctcccagacatacatagccaagttggccgcctttataacctcgtctaagattgctggtgatattggctccctgcacgatctggtggaccaaaataaggtgcaatttggcactattcgtggcggggcaacttcggtgtacttctccgaatcgaacgacaccgacaaccggatggcatggaacaagatgttgtccttcaagccggatgccttcaccaagaacaacgaggagggcgtggatcgggtgaagctgagcaagggtacctatgccttcctaatggagaccaccaatctgcagtattacgtgcaacgcaattgcgagctaacccagatcggtgaaagttttggcgagaagcactatggcattgcagtgccgttgaacgccgactttcggtccaatctcagcgtgggaatcttgaggctcagcgagaggggtgagctcttcaagctgcgaaacaagtggttcaacagcaatgagagcacctgcgactcgaatgtcccgaccatcgatgatggccagttcgacatggattcggtgggtggactgttcgtggtgctgatcgtcggcgtggtcgtgggactcgtgatcggtgtcgccgagtttttgtggcacgtccagcgcatttcggtgaaggagaagattccacccatgctggcactgaaggcagagttttactttgtaattcgattctggttgactagaaaaccgctgcacacctatcgccaaagtcgggattcaacttcgacgggttactcatcgctggagcaaattacaagtgcttccagtgcgaaaaagaaaaaaaagaccaggcgaattgaaaagtaggggagtaaaaaggcttgcgaacattcagtgaaatacgattaagattaggataaggatattttaaaatggatcctttaaaagctctacatacgaaactt

SEQ ID NO: 16137 - protein, 913 aa, DROSOPHILA
MHGLQFLVLLALAIASGANEDTLVIKIGAIFFDTEMKLADAFSAALEEVNAINPALKLDAIKRYVTVDDSIVLQDISCDLIGSGVAAIFGPSSKTNSDIVEVLCNMTGIPHLQFDWHPQQSNRERMNHQLTVNVAPMELFLSAAFSDILASKTFDWKSFTIAYERSSHLIRLQHILAWKQLHKAGIKMQEFERGDDYRILWKRINNAREKFVLLDCPSDILVDVINASIGYNMTGSFNHLFLTNLDTHLSGIDGFYSRDFTVAVAAVRIRTYVPPPVHDEIDVFDNSVDTRFSSLGSQLVYDSIVLFYNALLEISQRPGFYIPNFSCGRGFWQPGPRLVEQMKQITPKMVKPPFKTQRLQINADGQREDFNLEVYNPIIDRVTHIWNKEFQLVDFEKLRENSTQALKQKRLQNKEDFSQKPIRYTVATRVGKPYFSWREEPEGVHYEGNERFEGYAVDLIYMLAQECKFDFNFEPVRDNKYGSYDANTDEWDGIIRQLIDNNAQIGICDLTITQARRSVVDFTVPFMQLGISILSYKEPPPKADIYAFLNPYNAEVWLFVMIAMMITAFALIFTGRIDQYEWDQPVENVNREMERQNIWHLSNALWLVLGSMLNQGCDLLPRGLPMRLLTAFWWIFALLISQTYIAKLAAFITSSKIAGDIGSLHDLVDQNKVQFGTIRGGATSVYFSESNDTDNRMAWNKMLSFKPDAFTKNNEEGVDRVKLSKGTYAFLMETTNLQYYVQRNCELTQIGESFGEKHYGIAVPLNADFRSNLSVGILRLSERGELFKLRNKWFNSNESTCDSNVPTIDDGQFDMDSVGGLFVVLIVGVVVGLVIGVAEFLWHVQRISVKEKIPPMLALKAEFYFVIRFWLTRKPLHTYRQSRDSTSTGYSSLEQITSASSAKKKKKTRRIEK

SEQ ID NO: 16138 - DNA, 3996 bp, DROSOPHILA
gaatctctgcagctaagtaaattataaatgatttatacttcgaatatagggaatcgaagattaattttattttgggaacacttatacgaatacttggcattttatgaacatatggcgttaaataatgtaaatcttctggacattggcatcatgttcttcggttgtattttaattctgtccagcatgagacatataagaatgagagctgaaaataatcgaattccgccatgtgttgtcgcaggctgatagcaaatttgctctgaactccaggctctgacacttttccaggtaattaaaacacaaatattagcgaatggatggggatgtaaccgcccacctatagagcccattttgcaatttaaattttcatgaacaagcaccgccagttgtcttcaatctctggtcctccgcccccccccccctcacgatcctgttcgtccttagctgcaaggctcgccttacgttgccttaacagttttcaattttccgacgcttgtaagcgcagctgacagcgactagcgaacgatactccagcgaagagcttatgtttcttgaatttcgggggtgaatcggggtctctggtaagggggaaagtcatttcactttggcttttattgtatttcggtcgctgtcgtcgcacatttttacgactatttaaatggttttcccttttcggttacaaattgtcgaccaggtaagtgttcactggatatgggcagagttgacgtgaagggttgggcatggtctgccatactcatttcaatagtatcgcatggtagtgccctaattcaatgtctaagaactaggatacgctctgtcagaaaataaattgatcatacttttcagattcactgctaaactaaatgtggataggaaaatattgaatttttttattcattttagattattttgaaaaaacacagcaggctgtaaacctgtggatcaacttgtcatcagcacttggcatttcagctctccatattacatttgaccgctctagcttcaacatcgttttccgattcataggcaaatatcagtgagtgggattaacgcaccgccttcattccagttaacccagttttccaatcctcccacaggtcaacatgatgcgcatgttccgttacaccaacacattgcagcgtactgcaaagatcagtcacgtcctgtgggcccgtaactatgcaaaggatgttaggttcgggccggaggtgagggccatgatgctgcagggagtggacgtgctggcggatgccgtggccgtgaccatgggaccaaagggacgcaacgtgatcatcgagcagagctggggatcgccaaagattaccaaggacggcgtgacggtggccaagtcgattgccctcaaggacaagttccagaatatcggcgccaaactggtgcaggatgtggcgaacaacacgaacgaggaggcaggtgatggcaccaccacggccaccgttctggcccgcgccattgccaaggagggattcgagaagatttcacggggtgccagtccggtggagatccgccgcggagttatgctagccatcgagacggtcaaggacaaccttcgtcggttgtcccggccagttaacacgcccgaggagatctgccaggtggcgacgatctctgcgaacggcgacaagtcggtgggaaacctcatcagcgaggccatcaagaaggtgggtcgagacggcgttatcactgtcaaggatggcaagaccctttgcgacgaactggaggtgatcgagggcatgaaatttgaccgtggttacatttcgccttactttattaacacctccaagggagcaaaggtggagttccaggacgcgcttctcctcttttgcgagaagaaaatcaagtcggcacctagcatcgtgcctgccctggagttggccaacgctcagcgcaagcccttggtcattatcgctgaggacttggaggcggaggcactcagcactctggtggtgaaccgcctaaaggtgggcctccaagtgtgcgcggtgaaggcacccggttttggtgacaatcgcaaggagaatctgatggacatggccgtggccaccggtggaatcgtgtttggagacgaagccaatatggtacggctcgaggatatcaagatgagcgactttggacgtgtaggcgaggtagtagtctcgaaagacgacacaatgctgctcaagggcaagggacagaaggcagaggtggagaaaagggtcgagggtctgcgcgaggccatcaaggagtcgacttcctcctacgagaaggagaagatgcaagagcgcttggcccgcctctcctccggtgtcgccttgctgcgagtgggcggttccagtgacgtggaggttagcgagaagaaggatcgagtcatcgatgccctgaatgccacccgtgctgccgtggaggagggaatcgtgcccgggggcggcaccgccctgctgcgttgcatccagaaactgaacgatttgaaaggcgccaacgaggatcaaaacatgggcatcgagatcatccgacgtgcgctgcgcatgccctgtctcacgattgccaagaatgctggcgtagatggtgcaatggtggtggccaaggtggagatcctcgacggtgactatggctacgatgccctgaagggcgagtatggcaacatgatcgaacgcggtattatcgatcccaccaaggtggtgcgcaccgccatctcggacgcagccggagtcgcctctcttctgaccactgccgaggctgtagttacggagttgccgttggaggaggccgccgctgctggagcggcagccggattaggagctctcggcggtatgggcatgggcggaatgggcatgtaatccttaatgaattccttaccacgtaatatccttacctaaattcaaaacaaggaaacgctcatggtttgccacattctagccgagcggtttgctttacccttttacaatacaattgatgttaagcatatatgtgaaataaggaatattctagtgacaaagaaaagttggtgtttatttcatttactccgtccctatgtcattatattctccataattagtggaattgacaggaaactccttacgtctgtctgcaaaaagcatgccggtgttggatttgaaatcactgattgttaatgcttcctttcgtggtttttgtggctccatttctcaatgcctttccccagttgcttgttactttgcagcgccctggccactgacagtctgctagtcctggaagtgctcttttacacatgtcctttgctgtgttttgtcacagttgccctgttgtgccagccacttggtgcagtttttgtcgtgtgccgggctcttccgtttttgcatttcgctatgaaatatgaagcagtcagggacagcgtggagtacgctttcgggcttttctaattgtgctgggttagcggggaagggtgctaaggacacaggatgagggtagaaataataaaccgccacttgactttcatgcatttgctgcttaactttgcgacatttataatggcattcgttgtgtccttcgggcggaaagaaatctgcttggatagtttccacttggccttgcactaagcgtatgcaggcctcttcagcctcattcccattccgtgccccatccccatccccattatcatgctcatcctcatcctcatccttgggctcatcgtcggaaagcggctaagaaaatcgcttgggcccgcgggccaagtgggtaacagagcgtatactgaagcctcgttgcccctcgtttcagcactctatgcatgttgagcattattcctgcggcttatccttggcgctgcttacactcgagtcgctgctgttgcaacatcctgccaggacacagcccacttcgcaaccacctctaaaatcccctacctacagcccctggctgtttatgttgtcaacgcaaattgcactttctgcttgccgtgtgatgttcaagtgcctgttaggaagatgatccgcccacgtgtcttaatgatgctacacgaga

SEQ ID NO: 16139 - DNA, 1935 bp, DROSOPHILA
cttcaacatcgttttccgattcataggcaaatatcagtcaacatgatgcgcatgttccgttacaccaacacattgcagcgtactgcaaagatcagtcacgtcctgtgggcccgtaactatgcaaaggatgttaggttcgggccggaggtgagggccatgatgctgcagggagtggacgtgctggcggatgccgtggccgtgaccatgggaccaaagggacgcaacgtgatcatcgagcagagctggggatcgccaaagattaccaaggacggcgtgacggtggccaagtcgattgccctcaaggacaagttccagaatatcggcgccaaactggtgcaggatgtggcgaacaacacgaacgaggaggcaggtgatggcaccaccacggccaccgttctggcccgcgccattgccaaggagggattcgagaagatttcacggggtgccagtccggtggagatccgccgcggagttatgctagccatcgagacggtcaaggacaaccttcgtcggttgtcccggccagttaacacgcccgaggagatctgccaggtggcgacgatctctgcgaacggcgacaagtcggtgggaaacctcatcagcgaggccatcaagaaggtgggtcgagacggcgttatcactgtcaaggatggcaagaccctttgcgacgaactggaggtgatcgagggcatgaaatttgaccgtggttacatttcgccttactttattaacacctccaagggagcaaaggtggagttccaggacgcgcttctcctcttttgcgagaagaaaatcaagtcggcacctagcatcgtgcctgccctggagttggccaacgctcagcgcaagcccttggtcattatcgctgaggacttggaggcggaggcactcagcactctggtggtgaaccgcctaaaggtgggcctccaagtgtgcgcggtgaaggcacccggttttggtgacaatcgcaaggagaatctgatggacatggccgtggccaccggtggaatcgtgtttggagacgaagccaatatggtacggctcgaggatatcaagatgagcgactttggacgtgtaggcgaggtagtagtctcgaaagacgacacaatgctgctcaagggcaagggacagaaggcagaggtggagaaaagggtcgagggtctgcgcgaggccatcaaggagtcgacttcctcctacgagaaggagaagatgcaagagcgcttggcccgcctctcctccggtgtcgccttgctgcgagtgggcggttccagtgacgtggaggttagcgagaagaaggatcgagtcatcgatgccctgaatgccacccgtgctgccgtggaggagggaatcgtgcccgggggcggcaccgccctgctgcgttgcatccagaaactgaacgatttgaaaggcgccaacgaggatcaaaacatgggcatcgagatcatccgacgtgcgctgcgcatgccctgtctcacgattgccaagaatgctggcgtagatggtgcaatggtggtggccaaggtggagatcctcgacggtgactatggctacgatgccctgaagggcgagtatggcaacatgatcgaacgcggtattatcgatcccaccaaggtggtgcgcaccgccatctcggacgcagccggagtcgcctctcttctgaccactgccgaggctgtagttacggagttgccgttggaggaggccgccgctgctggagcggcagccggattaggagctctcggcggtatgggcatgggcggaatgggcatgtaatccttaatgaattccttaccacgtaatatccttacctaaattcaaaacaaggaaacgctcatggtttgccacattctagccgagcggtttgctttacccttttacaatacaattgatgttaagcatatatgtgaaataaggaatattctagtgacaaagaaa

SEQ ID NO: 16140 - protein, 573 aa, DROSOPHILA
MFRYTNTLQRTAKISHVLWARNYAKDVRFGPEVRAMMLQGVDVLADAVAVTMGPKGRNVIIEQSWGSPKITKDGVTVAKSIALKDKFQNIGAKLVQDVANNTNEEAGDGTTTATVLARAIAKEGFEKISRGASPVEIRRGVMLAIETVKDNLRRLSRPVNTPEEICQVATISANGDKSVGNLISEAIKKVGRDGVITVKDGKTLCDELEVIEGMKFDRGYISPYFINTSKGAKVEFQDALLLFCEKKIKSAPSIVPALELANAQRKPLVIIAEDLEAEALSTLVVNRLKVGLQVCAVKAPGFGDNRKENLMDMAVATGGIVFGDEANMVRLEDIKMSDFGRVGEVVVSKDDTMLLKGKGQKAEVEKRVEGLREAIKESTSSYEKEKMQERLARLSSGVALLRVGGSSDVEVSEKKDRVIDALNATRAAVEEGIVPGGGTALLRCIQKLNDLKGANEDQNMGIEIIRRALRMPCLTIAKNAGVDGAMVVAKVEILDGDYGYDALKGEYGNMIERGIIDPTKVVRTAISDAAGVASLLTTAEAVVTELPLEEAAAAGAAAGLGALGGMGMGGMGM

SEQ ID NO: 16141 - DNA, 2234 bp, DROSOPHILA
ttgccggagccaaagaaaatacaagtaaacacaaacagcaatggcgaaagggaaaaaatgtgaataaatgggtaaaaactcattcaacaggagcatgaaaacgagctgaaaatatatactcctttgtgctgagcaagtgcctcgaagtgaaagaattcccgcaagtggctttagtcggcaaatgcaaaataaatgcttcaattcttccacaactaaacaaagaaatatttgaattcaatttaaagagttccatggaatttcaatccaatttgagccctttttgttatgtgtttttgactacacacaagttgtcagcaaaaaatctcaaaatataaaatcgcacccgactttaaaatcagtattctctttaaattaatatttaatgcgagtgtttcgcttcatttacatgtaaatatttatatttttccatttaaactacacaaaacaaagtagagcaacaaaatctgaatcagaacaaaaagttgataacgtttttatagagttgctcgtaaatgtgagttttcattgtttcctaaatatttaaaaagcattgtccgaacatgccaaatctcgcaggacactccacccttttgcagtgagtcccttgaatatttaattcctggaaaaggactcattacatatgcacgcgtgcgtttaaagttgagcggaaaagggcagcaagttcgctattaatattaatgcctaggaaattgtcaggcggtgaaaaaattaattaataccttaacaatgtgacggggcaaattcaattttaatgacttgtaagtaaaaatgttaccctcatttattaatcagcattggtgtgtattgaggtccaactgtttgtcggcttaatgaacaaaatcaatttaaatgggaatacattatgaatgcaaatggcataagctgatagtaatcaaggcattccgtagtttattaattacattatgcggggaatgccacgccccctcgtgaaaactttatttaattgcaaccgataaaaatgacgtttgtttgccctctcttaattgcagccaagcggccgccggtcgaggagaccgcatccttcctccagagcctgatcgcctcccacggacccaattacctggaaaaacttttcggcagcaaggcacgtgatgccctttcacctctcggcggagtcgagaaggtcgccatcgcgttgagtgagtcgcaaacgattgaggattttggagctgcccttcatctaatgaggtgagtaccggcgctcttaactacccaaagtgaactgcagcgtcggagtgcgtccactgagagaaagcaggggtgcattagattaactaataaaaacgttatatttatgaactaagggctctttagcttaaatttgcataaaactattgaaatttaaagtgtgtaggaggaatgaaatctaactaaatgcttaaaatgcttaaacgtataaaatttatttataggaaatattatcgaatttattattttaattgaatctctctttaaattttttaaggaaacaagtatattattaagtagactggccatggtttaagtgccttaaatttaaaggttttctccccagatggtcataacattacaatcatgcttgtttcaacattttctgagtaaaaatatacttttgtaatagtttttttttgccaatgtcatgccttcggtagaaaatgtctgtgcttgagttggttgctttgccgccagaaaacctcaaagcgaaattattttccctttttgtcagctgcttttcgagaacgaaacataatttcggccaggtcctaagctcatccgagttgcataaatagtgaaagctgtttaaggaactttggcaatgccaagggctattttcgctttgtgggtgaatccttttattcgacagaaactatgttgcagagtgaaagtccagaggccagcctttgtccttgtccttgtccttgccccatgaattatccgtgcatctggttgtctactggcattcgagtccctttttctctgtttatctatttttgtggctactggaataataaaattgttcagcttcacgccaagccacacacaacgtgcacaataagtgtcatgaaattttaaaatatgcatgtcatttatattcctacttttacggttttattttataaagagcttctttatggctttcactgtttttcataatatttgcttgacttggcctaaataaacaaaatatttgtctttgcctaatgaattaaaat

SEQ ID NO: 16142 - DNA, 234 bp, DROSOPHILA
atgacgtttgtttgccctctcttaattgcagccaagcggccgccggtcgaggagaccgcatccttcctccagagcctgatcgcctcccacggacccaattacctggaaaaacttttcggcagcaaggcacgtgatgccctttcacctctcggcggagtcgagaaggtcgccatcgcgttgagtgagtcgcaaacgattgaggattttggagctgcccttcatctaatgaggtga

SEQ ID NO: 16143 - protein, 77 aa, DROSOPHILA
MTFVCPLLIAAKRPPVEETASFLQSLIASHGPNYLEKLFGSKARDALSPLGGVEKVAIALSESQTIEDFGAALHLMR

SEQ ID NO: 16144 - DNA, 3297 bp, DROSOPHILA
tgctgaaaaatactgaaaactgggcaattccaaatattagctgatataagctaatagtgcctgaaattcgatgcttcaactcatgatattgttgcaaacattagtattattttttctttgctgcccttgcttcgccttagaatagtctcagcgcgctataagcttcactaatcctttcatcaccatcctttggggcacacgtttctctgacgcttcttgaaggacatcaacaaagtccttgggacacgactaggatacacgaaagccgatacgtgtcgctgattatctgccgtgtgcttagcactggattaagctgccaaaaaacgtggtatggacgccaggaggcgatatctgtcgacgatgaaatacttcaggagcggagcctcaaaagagggtatcaagcagttcatgtatatatatcaaaggactgcaaaacagaccttattgaatcaaatataaagtaaacgaacttataacattatataattataaatgttctattaaaagggctccgctgttcccaatccgctcctggttaaatagatgtaaaaatgtgtaatccagaccaggctcaacaagtaggtgagagttggaggtggaatgtaaccgtttgactagtcgacatgctgcaaggatttttaattcgatgtacgtgtgtgtgcaaggctgaaaaggattcgagccaggacgcaactggaaagtgaattaaagattaacctggagtgatttgcgaatctcatggactaacggaattgaaaatttatggaataaaacattatgtagcacattttatttgatgacagctgaaaattgcactttagacttagttactaattcagttcggcccgaagggatgagttgccaagtgtttacgaacgttccacccagtgatatattaatggattacttttacacatttattcccagcagtaaataagttaaatttcgggctcaattctcgctcaaggacattacttcgttacaaattctctgctcaaactcaaattgtgggcagatgatgctcggtgcgatgtagcaggtttgcattcttgttcaggggctgcagcttcacgtaatcttgatgcgggtgatgatgatgctgcgtgctaggcagcagcggtagtgatgtgtttgaagtctgtaatcgaaaggatatactaatagattgaattatcctctgagaggactgccgtacgcacctttgatttatcccgggccgccgcgatggccgccgcctgagcaggacccgtctggagctgctgggccgccgtggccagcatgaactgctgggaggcgagctgctgctggcggagattggccgcctccaggctgttgacgtgctccagttcgcgctgcttagcgatgtagtcatcgaagtaggagtgctttgtgagcttctcgcaggaccagcgcttggtcggatccttgtccaggcacttcttgagaaagtcaatggtcaggggattctgctgcgacttggccggcatcttgtcctccagcggctccagcgtcggcggcactggcagcgtgatgcccttaaagtactcgttctgtccaaagatctggatgtggcgcggcagcaggtcgccgagcgtcttgcggatcagatagagctgatccacatcgctacgtcctggccagagggcctcgccccggaccagctcggcgaagaggcaaccgatggcccagacgtccaccggagtgccgtactgagtgtcgcccaccagcagctccggcgcccggtaccatctggtggccacgtagtccgtgtaattctcgcccggactgagcatccgggcgaagccgaagtcacacagcttcacctgaccctgggccgtcagcagaatgttctccggcttgatgtcgcggtgtaggcagccctgcttgtggcagtaggccacgcccagcagggtctggtagcagatctgtttggtcaggtgctccgggcagccctgtggatgccgctccagttcgtgcagcacggtcagctcgcagaactcgaagaccagatggaggcgtcgcttccgtcggaacacttctagcagggagacaaggttcggatgcttcaggttctgcaggaaatttcgagtgattaagtgattcaagtgatttaagttattaaggcttaccttcagtagcctaatttctcgcagtgcaattttacgaatcgctggatcatcctcggactccacaaacctcttgaccgccaccagagcacccgtttcccgatcccggcacttgtagaccacaccgtaggagccctcgcccagccgactgagcttctcatagcgatccattttgctgctaccttgtggtctgcaaggaagttaacaggtatgagttattccggaattcccaccccgattgcggctaacgttcagtttgagtttggagtggattttaccttaagctcaaacattgaccacgtttgatgtttgcacgtcgcattgctttgcattgggcacacaaaatgttcaagaatttttctgtttgatacctcagacacgaacacatgtggactcacaggggcgaacttgcattctaggatatgcgagcgagtatgaagtgatttgatattcgatctggtattatttcaagggctgtcttacgatttgatgtgtatgcatatatgtacaagttattatattgaataggtttggtttttttttggggatgtccagaacattttggaggtttggtttcacgaattcggtatgatttggttagtcgatttcgatggaatgaaacaaacaacaaatgagagaacttttagaatgagttatttggtttaaacgttaattttggtgggccaaaggaactgttaaataaaatgtaataataataaattaaaatgtgccgaagtacatcaatataaacttcttcctgctaactttttccaatctaaatgcagctattatagctaatcaaataaatcgatattgtaaacattcaattgccattagatacacaacctaatcattactactctgccatttataagcacgagaactaaatcgatttttttgacccaagtaaacataaccctatgtggaattgtcattgatttgagtgtatggactaatgaattctaacatttttacacagtttaagtgaaaataagattaaaataacttattctgttcattcagaattgtaccattagtattagattagaaaccgagggtaattaactttctagcgtgaacacgaaaactaaatcgattttgtagccccaggtgttcgagagcgtgctcctttgaaattggcattaccggtctggtcgaggacttcacgggt

SEQ ID NO: 16145 - DNA, 1179 bp, DROSOPHILA
atggatcgctatgagaagctcagtcggctgggcgagggctcctacggtgtggtctacaagtgccgggatcgggaaacgggtgctctggtggcggtcaagaggtttgtggagtccgaggatgatccagcgattcgtaaaattgcactgcgagaaattaggctactgaagaacctgaagcatccgaaccttgtctccctgctagaagtgttccgacggaagcgacgcctccatctggtcttcgagttctgcgagctgaccgtgctgcacgaactggagcggcatccacagggctgcccggagcacctgaccaaacagatctgctaccagaccctgctgggcgtggcctactgccacaagcagggctgcctacaccgcgacatcaagccggagaacattctgctgacggcccagggtcaggtgaagctgtgtgacttcggcttcgcccggatgctcagtccgggcgagaattacacggactacgtggccaccagatggtaccgggcgccggagctgctggtgggcgacactcagtacggcactccggtggacgtctgggccatcggttgcctcttcgccgagctggtccggggcgaggccctctggccaggacgtagcgatgtggatcagctctatctgatccgcaagacgctcggcgacctgctgccgcgccacatccagatctttggacagaacgagtactttaagggcatcacgctgccagtgccgccgacgctggagccgctggaggacaagatgccggccaagtcgcagcagaatcccctgaccattgactttctcaagaagtgcctggacaaggatccgaccaagcgctggtcctgcgagaagctcacaaagcactcctacttcgatgactacatcgctaagcagcgcgaactggagcacgtcaacagcctggaggcggccaatctccgccagcagcagctcgcctcccagcagttcatgctggccacggcggcccagcagctccagacgggtcctgctcaggcggcggccatcgcggcggcccgggataaatcaaagacttcaaacacatcactaccgctgctgcctagcacgcagcatcatcatcacccgcatcaagattacgtgaagctgcagcccctgaacaagaatgcaaacctgctacatcgcaccgagcatcatctgcccacaatttga

SEQ ID NO: 16146 - protein, 392 aa, DROSOPHILA
MDRYEKLSRLGEGSYGVVYKCRDRETGALVAVKRFVESEDDPAIRKIALREIRLLKNLKHPNLVSLLEVFRRKRRLHLVFEFCELTVLHELERHPQGCPEHLTKQICYQTLLGVAYCHKQGCLHRDIKPENILLTAQGQVKLCDFGFARMLSPGENYTDYVATRWYRAPELLVGDTQYGTPVDVWAIGCLFAELVRGEALWPGRSDVDQLYLIRKTLGDLLPRHIQIFGQNEYFKGITLPVPPTLEPLEDKMPAKSQQNPLTIDFLKKCLDKDPTKRWSCEKLTKHSYFDDYIAKQRELEHVNSLEAANLRQQQLASQQFMLATAAQQLQTGPAQAAAIAAARDKSKTSNTSLPLLPSTQHHHHPHQDYVKLQPLNKNANLLHRTEHHLPTI

SEQ ID NO: 16147 - DNA, 4718 bp, DROSOPHILA
ttgactgcaccgtttcgaaccgcatctggctcactacttgcttgctttgcgtgcgccaaacgaaccgaacgcgaactcagtcagtttattcctatttccacgacgcgttctagagtcagctgcgatggccagaggtggcagcgggccgatgacaagccgatactatcgatgtatttatctatctatccatcatcgttgcccggctgcggatatcgattagttgcatgggccgctccggtttttcaaacattatttccatatttttgtaaaaaaagttaaatgagaagaaaataataataataataataataatgtataataaatgtgcgtcaaattagcgacgatagcggaacggtggaaattggaactcggggactttttttttgcgaattgtgtcccgctgatctaaactaccgtgtccctataggctaataggctaagcctaattatataatgatcctgaaaaatgctttaaaaattatccaccgatttccagaaatccgcctcacagcgaaggagtttaaatttatttaataatgccgccttctctagcaccacagccaatccatgtcataaaccacattattaacaatcaaatttcgactttaaagatttattaatcggttcaaccaaagacactaaagatacttctagtgtacttctacttcaacgcgcacgttacaaacccatgctcccacaaaataaatatataccgaaaaatactgccagtatatttacatcttaaattcatggagcatgcagctcggacccaaaccgtggtgaaaaacttggatgtaatcatatcaatttcaaaaatattcaaatccgtttcaattttatacagaataatatatctgattacttttacatatatatttagacatttgcttatatctgcagagccatctcatcatacaatcaccttatattacaaacttattagggaacagcaagagctaagcttctgatccaatccaattaaacattttccaagccaattaaacattttcgcagctatttatttaaagaattcccgtttgagagcgttctagcagatgatttagcgacaccggcttccagttgctgaagctgccatcgctgaccatgcagacgtgacgatcgatgtagcaaaacagctttcccacacgataaatctgtaaatgcaataaatctattagtatataacgctctgtggtcgaaaatggattaacagtcacctgtttgcccatctcccgtcgccctggcagaggagcgaagatgattcccaagtcggcgcattgctgcgataccaactctttgaactccagctgagcgggcggatgaatcaggtccatcattatgactggagccggaggaactggaggcgggggcgtgggcgtcaccgtgggctgcagcagggtatcgctggctctgtgcataatttccagtgctcgccgcagatgctctttaacgctgggctcgcgcagaagcggttcgctcaacatgctcttccagccggtgtaccatcgcgagatctccgcgtagtccggcgactgattcagccagacgacgagcacttgcatccagcgcgggaagaagtgtctgtccagtagttgggccatgtacatgggatcgatgagctcgtgccactcccatacctgctgccacagctccaggtcctggtgcattggattgatgatgagctcgcctagagtcgcctgcagtttgggcactatgtaccgctgcaggaactcttgcatctcttcctcggggaaggccttctgccagggcgtaagcatggctctggctgatcggtcatgcggtgaccaggcgcgcaatgctatacccaatttgctgcggatctgaggatagacggcctcctccagcttgctgcccaagatggcatgccacggcagcacccaactgtcgatcggaacggtgtcggtgagcggatcccactcctggacaccagccaccagtcgtggcagaaccagttgctcgagaaccgaatccaagacccagctaggtagcaggggtgcccaggcatctaggagtgaagccattggcggatgctccttcggctgccatgcggcagcgctggaccgaaacgaaggcatcacgccggcccagatgagcgaggagtacggatcgaagacgttgcggggctgctgctctgctgcatctccttgctggagcatgccgcgccatttcttgatgagtggcagcggttccgttgggttttccagtggctgccactgaactagttctcgcttcaggagcggcgctattacaccggctgccagatctgcaagtccgaactcatggaattcggcagcgtagtccacgagcagctcccgaaagagtcgttcagcctgaggtaaactcaagtctggattatcgattaaccgctccacgcgctccaacgattcctccagcgtgcgtatgtggtttcgttctagctggactatctcctccagtttccggtgctcgctttccagcgctgcctgctggctggaacactcgcgttcctggttgtcgatggcgatgatctgctgctcgcactggctaaccaagagctggaggttgtgcgtcagctcgggcatggcaaaaacgcaggcgggagcggatcccttttccgtcgcctccgtgtcgtagagcgtctcctctggcgtaatttttgcctgtcccaaggcatgatagccactcagcactcgtttctctgggcctgtcatatcgatcacccgcacattgcccagtttcttgcttagcttctccgacagtaggtggccggacgtgtgacccttggcaatcacctcctccacggacttgtagtagtagcgcttaccctgccgctccattggttcggcgccaccggctgagccctttcgccacttgttcagctggtctttgaactctttcgcctcgcgcacgtcctcatccactttgatgctcttgttcgtctttcctccgatgcttgccgcagtttcgggtccataggcgccgatagcacctctgcccttgcggacatgggcttgcacaggatgcgaaatgccctgcagatctttgcccaaacccttgccaggctcatagcccatttgaaggagtagcttagctccaatgccgcgtgtatgctgctcccaggcgcccacgttgcgctcgctggcgatgtgggagcgatgctgaaatgtggtgcttggctgtttccggctcagcgttggcctctcctcttctgatgagctgttggagctgcccggatcgttctggccgaaggctggccgtccgctggcggcggaatcgtcgctctcctcgccctggtcagcctctgctccctctttttgcgatcctttctcatcatcggcttggagcgccttcttcttctttttgcccgcctgctgaatgccgccggccacaaaattgacgggcatggtgtagtctttgggtttacgggcggcgcgcccccttctcttagttccgccctcgccaccactctcctcctcgctgtcatccgcccaaatacctacagaaagttcgtttacaaacaaattccggcatgtatttcaatacataccgtagatctgttggtgcctgctctggcggcctcggggccgattgatgttgaactcattgtccagatcgtagtccgttatctcgaaacgctcgtaatcgttgtccgacatcctggctagacgtgtatatattacttacagcagaaactgaaacttttgtgaatgtaaacaaacgcaccattgacaatagggatggccctaaattagcaattttatcgataagaaaatcgatacaaaagtactaaatactaactttagtacactattagtatcgcttatcggcgccaaaataaatttaaattttttgacaattgaaaaccacaactaattgactcaattaccgaactattattagtttagtaagttcattcctaacagaatgagctcccttttaattagcataagtacgcagtatgaaatacttgagaatccgatttcaaaagaaaactatttttagaaaatttttttaaaggtatttgattatagtgataagatattaaaatcgataaagtaagaaatacatgtttatgccgcctaatcgtctgttgaccatatatgtatttggctaacactcgattagcgctatcaattggttacgtctactgaattgttatgataaggataggaaaatacgacaatattgataactagacggataagaaaatcacttgaactatgatagcttcgcgggaacttcagtaattttagtctgtttccattattcatcgccgaatgttgtctgtctcgttcgtgaaataacttttaatcttaacagaaaaaaatccctcaaacaatttgcgtcgtttcgtacgtcataaaatgggttaatctttaatgtgcaaactcttgtcgatggaaatgaaagtgtcagccggtaaagtgaaaagttgttctctgtgtatggtaccataaatgtcaccgtttttatcagagtacgtaaatcatgtttagttttactgggtaaaaggaggtagtcatcttcattgttgggcagccccattatcagaacattataaaacatcgatgaacccccttgcatgctaccacattacatggaatcttatcggatgagtacagcactaatttcagttcatacaataggcccagtaaattagacataactacagacaaaaagctcagtcgctgccataaactcttctttcgatttccata

SEQ ID NO: 16148 - DNA, 2604 bp, DROSOPHILA
tttgtttacattcacaaaagtttcagtttctgctgtaagtaatatatacacgtctagccaggatgtcggacaacgattacgagcgtttcgagataacggactacgatctggacaatgagttcaacatcaatcggccccgaggccgccagagcaggcaccaacagatctacggtatttgggcggatgacagcgaggaggagagtggtggcgagggcggaactaagagaagggggcgcgccgcccgtaaacccaaagactacaccatgcccgtcaattttgtggccggcggcattcagcaggcgggcaaaaagaagaagaaggcgctccaagccgatgatgagaaaggatcgcaaaaagagggagcagaggctgaccagggcgaggagagcgacgattccgccgccagcggacggccagccttcggccagaacgatccgggcagctccaacagctcatcagaagaggagaggccaacgctgagccggaaacagccaagcaccacatttcagcatcgctcccacatcgccagcgagcgcaacgtgggcgcctgggagcagcatacacgcggcattggagctaagctactccttcaaatgggctatgagcctggcaagggtttgggcaaagatctgcagggcatttcgcatcctgtgcaagcccatgtccgcaagggcagaggtgctatcggcgcctatggacccgaaactgcggcaagcatcggaggaaagacgaacaagagcatcaaagtggatgaggacgtgcgcgaggcgaaagagttcaaagaccagctgaacaagtggcgaaagggctcagccggtggcgccgaaccaatggagcggcagggtaagcgctactactacaagtccgtggaggaggtgattgccaagggtcacacgtccggccacctactgtcggagaagctaagcaagaaactgggcaatgtgcgggtgatcgatatgacaggcccagagaaacgagtgctgagtggctatcatgccttgggacaggcaaaaattacgccagaggagacgctctacgacacggaggcgacggaaaagggatccgctcccgcctgcgtttttgccatgcccgagctgacgcacaacctccagctcttggttagccagtgcgagcagcagatcatcgccatcgacaaccaggaacgcgagtgttccagccagcaggcagcgctggaaagcgagcaccggaaactggaggagatagtccagctagaacgaaaccacatacgcacgctggaggaatcgttggagcgcgtggagcggttaatcgataatccagacttgagtttacctcaggctgaacgactctttcgggagctgctcgtggactacgctgccgaattccatgagttcggacttgcagatctggcagccggtgtaatagcgccgctcctgaagcgagaactagttcagtggcagccactggaaaacccaacggaaccgctgccactcatcaagaaatggcgcggcatgctccagcaaggagatgcagcagagcagcagccccgcaacgtcttcgatccgtactcctcgctcatctgggccggcgtgatgccttcgtttcggtccagcgctgccgcatggcagccgaaggagcatccgccaatggcttcactcctagatgcctgggcacccctgctacctagctgggtcttggattcggttctcgagcaactggttctgccacgactggtggctggtgtccaggagtgggatccgctcaccgacaccgttccgatcgacagttgggtgctgccgtggcatgccatcttgggcagcaagctggaggaggccgtctatcctcagatccgcagcaaattgggtatagcattgcgcgcctggtcaccgcatgaccgatcagccagagccatgcttacgccctggcagaaggccttccccgaggaagagatgcaagagttcctgcagcggtacatagtgcccaaactgcaggcgactctaggcgagctcatcatcaatccaatgcaccaggacctggagctgtggcagcaggtatgggagtggcacgagctcatcgatcccatgtacatggcccaactactggacagacacttcttcccgcgctggatgcaagtgctcgtcgtctggctgaatcagtcgccggactacgcggagatctcgcgatggtacaccggctggaagagcatgttgagcgaaccgcttctgcgcgagcccagcgttaaagagcatctgcggcgagcactggaaattatgcacagagccagcgataccctgctgcagcccacggtgacgcccacgcccccgcctccagttcctccggctccagtcataatgatggacctgattcatccgcccgctcagctggagttcaaagagttggtatcgcagcaatgcgccgacttgggaatcatcttcgctcctctgccagggcgacgggagatgggcaaacagatttatcgtgtgggaaagctgttttgctacatcgatcgtcacgtctgcatggtcagcgatggcagcttcagcaactggaagccggtgtcgctaaatcatctgctagaacgctctcaaacgggaattctttaaataaatagctgcgaaaatgttt

SEQ ID NO: 16149 - protein, 839 aa, DROSOPHILA
MSDNDYERFEITDYDLDNEFNINRPRGRQSRHQQIYGIWADDSEEESGGEGGTKRRGRAARKPKDYTMPVNFVAGGIQQAGKKKKKALQADDEKGSQKEGAEADQGEESDDSAASGRPAFGQNDPGSSNSSSEEERPTLSRKQPSTTFQHRSHIASERNVGAWEQHTRGIGAKLLLQMGYEPGKGLGKDLQGISHPVQAHVRKGRGAIGAYGPETAASIGGKTNKSIKVDEDVREAKEFKDQLNKWRKGSAGGAEPMERQGKRYYYKSVEEVIAKGHTSGHLLSEKLSKKLGNVRVIDMTGPEKRVLSGYHALGQAKITPEETLYDTEATEKGSAPACVFAMPELTHNLQLLVSQCEQQIIAIDNQERECSSQQAALESEHRKLEEIVQLERNHIRTLEESLERVERLIDNPDLSLPQAERLFRELLVDYAAEFHEFGLADLAAGVIAPLLKRELVQWQPLENPTEPLPLIKKWRGMLQQGDAAEQQPRNVFDPYSSLIWAGVMPSFRSSAAAWQPKEHPPMASLLDAWAPLLPSWVLDSVLEQLVLPRLVAGVQEWDPLTDTVPIDSWVLPWHAILGSKLEEAVYPQIRSKLGIALRAWSPHDRSARAMLTPWQKAFPEEEMQEFLQRYIVPKLQATLGELIINPMHQDLELWQQVWEWHELIDPMYMAQLLDRHFFPRWMQVLVVWLNQSPDYAEISRWYTGWKSMLSEPLLREPSVKEHLRRALEIMHRASDTLLQPTVTPTPPPPVPPAPVIMMDLIHPPAQLEFKELVSQQCADLGIIFAPLPGRREMGKQIYRVGKLFCYIDRHVCMVSDGSFSNWKPVSLNHLLERSQTGIL

SEQ ID NO: 16150 - DNA, 3763 bp, DROSOPHILA
ctccgtacttcgcatcatctgctgaggaaacagatcctaacgctaattggagcaacagcaacgaggcactcaagctaaatccaccgagcatagctgaagggaccacgcttaatctgaatctgatgttggaaacaagtgcggagtgctcggcatctccaaagcgagtgaactttgctgagcgtaaatgattgtattaaattagcggccaatgaagggaaaaccatagcgaaagaccccatttaacaagtggaagcgacactcattagtactaattctcataaagacttcggagccctgagaactagctaatacctctttgcgatgaaactatgttcgctttttaaactattttattttttatttatcacgattttgatggcacaaaacaagtcgttttatttgagtgtgtagtgagtatcttacagtcgaatccctctaattcagcttcttaaatagatttcatacttgaatgtagaatattttgccattaggagggcgtctaccttcacggctttaaaagtaaagataacaaagatttttactttcgatttctaactatattctttcaacttcaagaagaagattgagatgggataagtatctagcattcctatttcaatttttatttgatgaagatcgtttgttttttgtaattgtatgcacttttaaagatcctgccgattttataaacattgacataaacaatccatccacaagggcaaagaccctagaatattctattctagtgtctttgacaagggtgtatgctagtctcctttaataaaaatgttgcatacttttcagcgctgtttaatcttaaaatgttattttacatttggtgctcagtgcctcgattttaagttatttttctattaaataattataaaattctttgctccaaataatattattatataactttgcagaaatcgattgtgaaaatataacccttcggtttcaaaactcgaaaatcgataaaaaaaaagcaataatccagcgattttcgttatttaaatatatttattatttaagtttactttttaatcttacaaacagttttgcatgttttttgttaagtttcgtggcaccgatcagcctgcgaagcggcatgttgcagcaatccagtatctgaaaaccagtgttcgtgcactgcggtccaaaattgaggttatgaaaagtcggaaaaggagttcactgcggccgctgggccgtaggatgctgatgctgcttctgcagctgaaggacgtggctcagaatctgcgcctgctgctcaagacacttggggaagaaggtctgcatgaggtcgaccttgcgttcctccagctccagtcgctgccgacatatcttggtttgttcgtagagcagctggttctttcgccgaacttcctccatgtagagcgcctccagcgagtctgcgtgtgggggattcacagatccgaatggacgaccgcgcttccgtggcacagggacgggggaggcgccaacgacggcgttgttggtggtcgaaactggagctgcagccggaaccgatgccgatacctgtgcgggcaccggcgctggcatgcctccgtttgcgtttgtggccacgctgatggtgttattgctgctattgatataggctaccgccgttatgggctgatggttgacggtcgatgtggccgcagtgctaataacgctgttgttattgaattgagccggctgctgctgaaattgcgactcatagtttgtttggaactgctgctgttgttgctgctgctgctgcagttgttgctgctgctgtggcgtctgcagctcgagcagctgagccggctcggctggggaatactgttgcaactgctcctgaaagggaatggagcggtactcatcgtcctcgtactcctgcttgaccacctcgtcatactggtccgtaaacagctccgtgttgaagctaactccgccgctggtgttgttgttgtggctgctgccgtgattgctattgctgctgctattgtaataggtggcagtgcttggctcactggccagtcccaagccttgctgctgctgctgctgaacggattgctgctgtggctgctgctgcaactgctctgcggacgcatcatcccggggcggtgtcatgtcgcggttgttgagcagcgcctctggcggcagcggatcggcgttcttgggcctgtgcaggttcttcaggatgcgattgataatgtcgtacttcttccagcgcgtagcatagctcgaaggatccgcctgcagctgttttttgacttgccttaaaagggaaaccagtcagttaatccggtatagcaaagtgtctaaacggttacctacctgaacttggccctggtctggttgaccttcatctggatctcctcgggcttcacgtccacggcgaaccggtcgcgcagttcctcggcccaccggccaaagaagatggtgttcttgccggtgcgcgtcaggcgccagttgtcgcgtccccagatctcgtacaggcgctcctcctcgctgggcgtccagtagcgacgcgccttctccttgcccctgccatcgagcagctcctgaccaccgcacatgcctaagtcctgctcggcaccgctgccgcttccgcccgcgttcaacgccagcttctcgtagtccatcgactgctctgcaccggctcctgatctgctcccgcagatgtatccctgtaacgttgcctttggatatgcgatctccactctagttacacaatgcgacgctgtggtagaatggttgaagccaagtgcagtttttccgcacaaaaaatcaacaacagctctgatacacagaagagtgtgaccttgcggcgcgagaacgccgaaaatgcctagattcctgagcgaatttcctgaaataagtaatataataaatttcatttagtaccatatcagtatcatgtatatactacagctgggagaatggctttggggctagtccaatattaagaaataaaattattaagatattagatatatcttttccagatttcaatagctctataagaaaatttaaatcattgatggtattttttggcgcctgccgcgctcaagcgttattggtatttccacgcctggtccttggtcacgtacgaaaatgtttggattataacgattccacaaaattgaaattagaccggaatatgagcggccagaagcacctgcgattgcgctactacacgtcgctggaggaggccatgctactgcggctgtggcgcgagcacctgcatgccataccctcctacacggacaacctgcccattttccgggaaatcgcgcacggcctgcagcagaacggagttcggctcaataagcaggaggctcgccggcgcatcaacagctaccgcaacaagtatttgtgaggcgcagcagcggctcgggtcagttcacagtgctaatatctccttccacttctctgcaggaacgatcgcaatcgcgtggggggcaatgcgaacttcgcgaaggattggcgtctctacgcgctgatcgattgcctcttctgtcctgcctggccgtcgtccgccctcttccatttccgcaatgtgctggagacgatccgtgcgacagcacgtgtggatttgcccgccctgccgccactgctatacacttcgcccgcccagctaaaatttgagcgcgactcagagggatgcaccttcctcgatgcccagcccctagttcccgcagtagtgaagacagagcctctgccagacgaacaccaccagctggtgaatattgaatacaagcccacagtgacgcag

SEQ ID NO: 16151 - DNA, 1704 bp, DROSOPHILA
aaaaactgcacttggcttcaaccattctaccacagcgtcgcattgtgtaactagagtggagatcgcatatccaaaggcaacgttacagggatacatctgcgggagcagatcaggagccggtgcagagcagtcgatggactacgagaagctggcgttgaacgcgggcggaagcggcagcggtgccgagcaggacttaggcatgtgcggtggtcaggagctgctcgatggcaggggcaaggagaaggcgcgtcgctactggacgcccagcgaggaggagcgcctgtacgagatctggggacgcgacaactggcgcctgacgcgcaccggcaagaacaccatcttctttggccggtgggccgaggaactgcgcgaccggttcgccgtggacgtgaagcccgaggagatccagatgaaggtcaaccagaccagggccaagttcaggcaagtcaaaaaacagctgcaggcggatccttcgagctatgctacgcgctggaagaagtacgacattatcaatcgcatcctgaagaacctgcacaggcccaagaacgccgatccgctgccgccagaggcgctgctcaacaaccgcgacatgacaccgccccgggatgatgcgtccgcagagcagttgcagcagcagccacagcagcaatccgttcagcagcagcagcagcaaggcttgggactggccagtgagccaagcactgccacctattacaatagcagcagcaatagcaatcacggcagcagccacaacaacaacaccagcggcggagttagcttcaacacggagctgtttacggaccagtatgacgaggtggtcaagcaggagtacgaggacgatgagtaccgctccattccctttcaggagcagttgcaacagtattccccagccgagccggctcagctgctcgagctgcagacgccacagcagcagcaacaactgcagcagcagcagcaacaacagcagcagttccaaacaaactatgagtcgcaatttcagcagcagccggctcaattcaataacaacagcgttattagcactgcggccacatcgaccgtcaaccatcagcccataacggcggtagcctatatcaatagcagcaataacaccatcagcgtggccacaaacgcaaacggaggcatgccagcgccggtgcccgcacaggtatcggcatcggttccggctgcagctccagtttcgaccaccaacaacgccgtcgttggcgcctcccccgtccctgtgccacggaagcgcggtcgtccattcggatctgtgaatcccccacacgcagactcgctggaggcgctctacatggaggaagttcggcgaaagaaccagctgctctacgaacaaaccaagatatgtcggcagcgactggagctggaggaacgcaaggtcgacctcatgcagaccttcttccccaagtgtcttgagcagcaggcgcagattctgagccacgtccttcagctgcagaagcagcatcagcatcctacggcccagcggccgcagtgaactccttttccgacttttcataacctcaattttggaccgcagtgcacgaacactggttttcagatactggattgctgcaacatgccgcttcgcaggctgatcggtgccacgaaacttaacaaaaaacatgcaaaactgtttgtaagattaaaaagtaaacttaaataataaatatatttaaataacgaaaa

SEQ ID NO: 16152 - protein, 459 aa, DROSOPHILA
MDYEKLALNAGGSGSGAEQDLGMCGGQELLDGRGKEKARRYWTPSEEERLYEIWGRDNWRLTRTGKNTIFFGRWAEELRDRFAVDVKPEEIQMKVNQTRAKFRQVKKQLQADPSSYATRWKKYDIINRILKNLHRPKNADPLPPEALLNNRDMTPPRDDASAEQLQQQPQQQSVQQQQQQGLGLASEPSTATYYNSSSNSNHGSSHNNNTSGGVSFNTELFTDQYDEVVKQEYEDDEYRSIPFQEQLQQYSPAEPAQLLELQTPQQQQQLQQQQQQQQQFQTNYESQFQQQPAQFNNNSVISTAATSTVNHQPITAVAYINSSNNTISVATNANGGMPAPVPAQVSASVPAAAPVSTTNNAVVGASPVPVPRKRGRPFGSVNPPHADSLEALYMEEVRRKNQLLYEQTKICRQRLELEERKVDLMQTFFPKCLEQQAQILSHVLQLQKQHQHPTAQRPQ

SEQ ID NO: 16153 - DNA, 3785 bp, DROSOPHILA
ccgattatttctacctgcgattgctatttgtgattttccatacttttactaacaaattcttgtcaccatattaaattcgtttgtaagcaatgcaagcgttaccagctgtttaattatctattaactgattagatacattgttaaaccaaacccaatttttattgagcttattatcacgtgcgtattgctcattttttccgcctttctatatgatgcatcagagtataaatttcacgtccaaattaatcgcaagacgaatttcatgagaacgcatatgcttcgaataaagtactaatttattttctaatttaatttgttttttatttatttaattcactcacatttgaacatataaattatatttatagaattaagctatgatattttatagatttttcgcaactgcggcaggatgtgtgatagcaacaaaacgagcattagaacattagcagaattttgctgataagatactcgttcgtaatgctcttcacactttccccattggagtgggaaaaatcacatcattgccgctttggctattcagaatgtttgctggggtattaaaattttactgcaccttcttgatgccgccagacaaacagatattctacatatataggcaaacatatatgggctggaacagaaggagcaggaggagctggaggaacaggagcagacttcatcacatgtgcgggccagagcgtgtggcaaattggcctttgtgggttgttgtctgttggcctggcggcaaatataaatgatctaatttaaataattacgcccacaaaatgtgacgcgcctaccaaattgccttcgtttaatgcttgagtgggaaaattacctccgagccaaaccaaagactagaactaatttcaaagttggctttgcttatggcctcacaaagtgtttcccctacccaatccaattgtcattgccattgccaagtcgatttcccagccgttcggtattattaaagttttccaattgacaattctcgagtatgactgtctcttacaccgctgaggtggcaacatgcagccatttcggctgcttctggaagcttttgatgaggtgaggcatctccgattggcccattgccaaagttactaaagtatctgatcattcggcagatggcgcgcaagtatctacaagataatatgggtggatcttctggcattcctgtcctgcttctacttcatggctgtaatatatcgctatgctctcagggacgtcgataagccgtaagtagatcatagaatagaatagaacgttttaatttatttaacccccaacccccttaacccatagtgttttcgaggacattgtgatgtactgtcatagctatagcaacctgattccgctctctttcgtactgggattttatgtgggcattatcatagaacgctggtggaatcaatatatcacagttccttggcccgatccgctggcggtttatgtgagtgccttggtccgtggccaagatgaacatggtcgtctgatgagacgcacgattatgagatatgtgtgcttggcattgactatggtgctctcgatgatatcgccagttataaagcgtcgctttccaacctacgatcagttaattgaggtgggtttgctaaacgccaacgaggcaaatattatgaaggcaatggatgtgaagtttccaaagcacccaaagtattggatgcccattgtctgggccgccagtattgtaacaagggctcgaaaggaaggtcgaatttgggatgacttctccctgaagtccatgatagatgagctcaataaattccgagctggatgcaatatgctcatccattacgatacaatctcagtgccactggtctatacacaggttagtttatgactctattctaagcgatatattacgatagattattctcaggtcgtcaccctggccgtctactcgtactttgtggcctcgatatttggtcaccagtggatcgatcgggatattaagcactacaataatattgttagttactactttccgttgttcagcactctggagtttttcttcttcatgggctggcttaaggtggccgagacattgatttgtccttttggcgatgacgacgatgactttgaactgaactggctgatcgatcgcaacttgcaagtgagttacttgatcgttgatgaaatgcacaatgatcatccgcagttggtgagggatcagtattgggatgaggtgtttcccgctgagttgccatatgccgtggagtccgatagggccgaacatccggaggcatcaaccgctcgattgggcataccaaaagttgtccccgtgaccatgacgaaaagcgaagtcagtttggaaaacgattttacagagttcgacgatgaggatgaatacaacccggaagtaactatacgatttgcccgccgggagttcagttggagcaaaagttcagtatcggtatcgtactcctatgacaaccagagtattgatacccttgacgagaaggttgatgaagagaacgagggagatacaaggactctagattccagaaacaaggacgactttgaccgtctaaaggagaagcgggacagggagcgtgtgaaccggcagatgcaacaagccgccctcgccatggagttgattaaaggggatctggcttcgaatggaggatcagctcgatcaagtcgtactaatgtcccgcaaaaaaattctgatgtccagaccgacagaagctacttaagtcagaaaaagagaaaggaggaggacacggacaatgataaggacagtgacgaatctaagaaataacgaatgaatccttaaaatgtacagaaacaaattgtgattttaatatttttatttcgttttcgtctaatcctgcttttccgtcttatttggagggggttccttgctgcccgatggatcctgttgagctctgtcccccgcttcctgactctcggacagagtttcatcggatgggggacgaagaactgtgatcgtataaggagcaccggaggtatcatgtcgcagatgggtactttgcatatccaaaaatcggtgtcgaatgcgttccctgcgttcgcgacgacgctgctcaattagatcgttaaagtcaactgaaaagatataagagcaaaaaattaagagcgaataaagttagataatacaaagcctacttgtggattgcgacggcttgtgtgagctgttcgcttcatcatgtggcaaatcaaattgattctcactgaaggtcactcgcgacggcccatcttccatttggatggagtctgagtagctaccagtggcagatggtcttcccaggaagttttgtcggaagttgtttcgcgaacgggtactaagagttgacattgcagattcatggcgtttctggagctaaaaatccggatattagcttattcattaatgagaatacaaaaaataaactttacttttgattgtgattccatataggccgtggaagctgctggaggattttgacgcatttttggctgagcgtatggaatttcattagggaagacctcttcccaatactgatccttaacaagttccggatgctcctggtgcatctcatccacaatgcaataagaaacggtaagattcctatcgattatccagttgagctgcagtaaaataaagcattagactatatgtataagtaggaaaactatgttataccaattggatgtaatagttaatcgaacttaagcactcacctcgaagtcgtcatcatcctctccgaaaggatttatcagcgtctcggctaccttgagccaacccatgtaaaagaaaa

SEQ ID NO: 16154 - DNA, 1608 bp, DROSOPHILA
atgactgtctcttacaccgctgaggtggcaacatgcagccatttcggctgcttctggaagcttttgatgagatggcgcgcaagtatctacaagataatatgggtggatcttctggcattcctgtcctgcttctacttcatggctgtaatatatcgctatgctctcagggacgtcgataagcctgttttcgaggacattgtgatgtactgtcatagctatagcaacctgattccgctctctttcgtactgggattttatgtgggcattatcatagaacgctggtggaatcaatatatcacagttccttggcccgatccgctggcggtttatgtgagtgccttggtccgtggccaagatgaacatggtcgtctgatgagacgcacgattatgagatatgtgtgcttggcattgactatggtgctctcgatgatatcgccagttataaagcgtcgctttccaacctacgatcagttaattgaggtgggtttgctaaacgccaacgaggcaaatattatgaaggcaatggatgtgaagtttccaaagcacccaaagtattggatgcccattgtctgggccgccagtattgtaacaagggctcgaaaggaaggtcgaatttgggatgacttctccctgaagtccatgatagatgagctcaataaattccgagctggatgcaatatgctcatccattacgatacaatctcagtgccactggtctatacacaggtcgtcaccctggccgtctactcgtactttgtggcctcgatatttggtcaccagtggatcgatcgggatattaagcactacaataatattgttagttactactttccgttgttcagcactctggagtttttcttcttcatgggctggcttaaggtggccgagacattgatttgtccttttggcgatgacgacgatgactttgaactgaactggctgatcgatcgcaacttgcaagtgagttacttgatcgttgatgaaatgcacaatgatcatccgcagttggtgagggatcagtattgggatgaggtgtttcccgctgagttgccatatgccgtggagtccgatagggccgaacatccggaggcatcaaccgctcgattgggcataccaaaagttgtccccgtgaccatgacgaaaagcgaagtcagtttggaaaacgattttacagagttcgacgatgaggatgaatacaacccggaagtaactatacgatttgcccgccgggagttcagttggagcaaaagttcagtatcggtatcgtactcctatgacaaccagagtattgatacccttgacgagaaggttgatgaagagaacgagggagatacaaggactctagattccagaaacaaggacgactttgaccgtctaaaggagaagcgggacagggagcgtgtgaaccggcagatgcaacaagccgccctcgccatggagttgattaaaggggatctggcttcgaatggaggatcagctcgatcaagtcgtactaatgtcccgcaaaaaaattctgatgtccagaccgacagaagctacttaagtcagaaaaagagaaaggaggaggacacggacaatgataaggacagtgacgaatctaagaaataa

SEQ ID NO: 16155 - protein, 535 aa, DROSOPHILA
MTVSYTAEVATCSHFGCFWKLLMRWRASIYKIIWVDLLAFLSCFYFMAVIYRYALRDVDKPVFEDIVMYCHSYSNLIPLSFVLGFYVGIIIERWWNQYITVPWPDPLAVYVSALVRGQDEHGRLMRRTIMRYVCLALTMVLSMISPVIKRRFPTYDQLIEVGLLNANEANIMKAMDVKFPKHPKYWMPIVWAASIVTRARKEGRIWDDFSLKSMIDELNKFRAGCNMLIHYDTISVPLVYTQVVTLAVYSYFVASIFGHQWIDRDIKHYNNIVSYYFPLFSTLEFFFFMGWLKVAETLICPFGDDDDDFELNWLIDRNLQVSYLIVDEMHNDHPQLVRDQYWDEVFPAELPYAVESDRAEHPEASTARLGIPKVVPVTMTKSEVSLENDFTEFDDEDEYNPEVTIRFARREFSWSKSSVSVSYSYDNQSIDTLDEKVDEENEGDTRTLDSRNKDDFDRLKEKRDRERVNRQMQQAALAMELIKGDLASNGGSARSSRTNVPQKNSDVQTDRSYLSQKKRKEEDTDNDKDSDESKK

SEQ ID NO: 16156 - DNA, 2708 bp, DROSOPHILA
gctgatttcgtatgcggaacggccagccaagaaatgtgcagtagacactggataagagagaaataggaaatattgaaaactgacttgtgccacagaaagtaacatacccttgaaaatacctatgtaggtgtttagaagtatgatttaacttatttggaatccaaatgtttcagatcggagaatcttatttattttatcttatttttcttgtccctctcaaaactattattaaacaatttagaaagtctctttttgaaaattgttttcctttttagttttttttcggatatcttaatctgtctgtattatataaatagtcgagaaaatatataaaatcaagtaatttgagcttcagaatgacccccatttattataaggcagtgttctcattagttggtgcccactgtttgtatatgcggacaaaagcacgcagcgccaagaagtatgcaacgagaaacagccggcgcaggaaaatgcgcaaagtgtggtgaaaatcaagaagtgattgtgtgtgtgtgtgcggtgaagagagaaagttgcgaagatgacgcaaatggagtgcgaatttaagagtatttttcgtactctcttttgtttattttgctctttgaagtatttacttgtggtagttggttgtgttaagtttccggcacgttttataaacaaactcaaatctaaaagagagcgagaaagtgggataaagagagagagagagaaaaagagggagaggtggagtttatgtttaccattaacattcaacgttttaccaatgtcaacagtgccgttttttatacacttttttacacatttattacggcgaagactgagtgaagagccgctggccaatcgaacatttaaacgcacataatgcgcagcgtgataatgcaaatcaagtgaagtgttaaaatcccgcaaagccaacaacacaaaatatacaacataaaagccccgggaaaatcctttaaaacgcacaaggctgtgaagaggcgtggaaatcaatatgactgccaaaccaccgcctccaatcccgcccactttgggtggcgatgattccggcacacatggaccgaaactcgcacccgagatacctcgcatcaactcggaattggcagcacaggcggcactcagaggacagcaattgctgaggaaacagggatcgcaggagcagcatgcgactaacacgctgccggcccacaaaaccggtgccccgccccccttgccgcccacccaaagtcgtccggttccggcgattcccgccaggggcgccagcgatcgtgcggcaccaccggaaataccaccaaaacgtcacagcctgaagagcatgcccgatggacagccgatgatggtgcccggactaccgccaaccatgaggcaaccaccgccgctgcccaggaaaccggcttccactcagagttccgctcagaactcagcacaaagttccccgttggcaggcatgaagttcaaggataaaccgccgccaccgcccgaaaagcattcaacgctctccgccgagggaatggccgctcggcggtgctcaaacccctttgaaatgccaccaccaccgccgccactggtcctccaatccgccgtggcggctctcagcgaacagagctccaaaaatggcctgaatcccgtaccctcgccagcgcccacaagagccagtgaggcgaagaaaatcaaccagcgatcgattgcatcgcccacagaggagttcggatcggaggatgcactgcggggaattgagagtggcttgcgcaacatggaacgggccatgcaggagcaaatgaatctgagaaacatggaggctgcagtccaaaacaatttcgatttgagctttaaggctagcctagcggcaggtgctcgacatctgggcggtggctcggttaatctcagaacggccaactacgaaaggaacctatccttggacgaaggacgagcaggtgactcgcgacaatccctggaggaactgaaacaactgagggcccaggcccagcagcaatccctgctcaataattcctcctcatcaagctccaattcccaggtggagcaatccatgcgctccaccattgagcaccatatgcgctcactggatcgcaacttaccactggagctccaatatagtcgccatcgctttcagaacaatttgaatgccgtggccgctgctggtggtggtggtggaaattcgtccaccggaaatgcggtagcaaattcaggaacttccggttcgcagcaaccaccaatgccgctgagcagcgagtttcgcgagcagatccgccagcaattgttgggcaacataccgccacaggtggtccataatatgggccaatcgccgggttccgctgccgccgccgccttgctgcaacatcaggcacagtcacgagctgccgctgccgctgctgctgcggctgctgcagctgctgccgctcaagtggccgccggaagtggggctctgtcgcgggaggagctgcgcatgcgcagaaggtcttcgcacgacgaaacccagctaacccagaactcaagcggtggcattcaggcctccgtatcgctggtatccgagacggctgcttcgttggcgatgtactgacgaccgctcgttaaattgctctcgacaattggccgcttatcctccaattggcggcgaaaggctttatgatcgtcctgcaagtggaagggcaatgaatgcaatacatgaatgaatgaaactcttg

SEQ ID NO: 16157 - DNA, 4928 bp, DROSOPHILA
atgactgccaaaccaccgcctccaatcccgcccactttgggtggcgatgattccggcacacatggaccgaaactcgcacccgagatacctcgcatcaactcggaattggcagcacaggcggcactcagaggacagcaattgctgaggaaacagggatcgcaggagcagcatgcgactaacacgctgccggcccacaaaaccggtgccccgccccccttgccgcccacccaaagtcgtccggttccggcgattcccgccaggggcgccagcgatcgtgcggcaccaccggaaataccaccaaaacgtcacagcctgaagagcatgcccgatggacagccgatgatggtgcccggactaccgccaaccatgaggcaaccaccgccgctgcccaggaaaccggcttccactcagagttccgctcagaactcagcacaaagttccccgttggcaggcatgaagttcaaggataaaccgccgccaccgcccgaaaagcattcaacgctctccgccgagggaatggccgctcggcggtgctcaaacccctttgaaatgccaccaccaccgccgccactggtcctccaatccgccgtggcggctctcagcgaacagagctccaaaaatggcctgaatcccgtaccctcgccagcgcccacaagagccagtgaggcgaagaaaatcaaccagcgatcgattgcatcgcccacagaggagttcggatcggaggatgcactgcggggaattgagagtggcttgcgcaacatggaacgggccatgcaggagcaaatgaatctgagaaacatggaggctgcagtccaaaacaatttcgatttgagctttaaggctagcctagcggcaggtgctcgacatctgggcggtggctcggttaatctcagaacggccaactacgaaaggaacctatccttggacgaaggacgagcaggtgactcgcgacaatccctggaggaactgaaacaactgagggcccaggcccagcagcaatccctgctcaataattcctcctcatcaagctccaattcccaggtggagcaatccatgcgctccaccattgagcaccatatgcgctcactggatcgcaacttaccactggagctccaatatagtcgccatcgctttcagaacaatttgaatgccgtggccgctgctggtggtggtggtggaaattcgtccaccggaaatgcggtagcaaattcaggaacttccggttcgcagcaaccaccaatgccgctgagcagcgagtttcgcgagcagatccgccagcaattgttgggcaacataccgccacaggtggtccataatatgggccaatcgccgggttccgctgccgccgccgccttgctgcaacatcaggcacagtcacgagctgccgctgccgctgctgctgcggctgctgcagctgctgccgctcaagtggccgccggaagtggggctctgtcgcgggaggagctgcgcatgcgcagaaggtcttcgcacgacgaaacccagctaacccagaactcaagcggtggcattcaggtgacccgattgcgagagcactgggatgagacgtcccaatgtgtcctgcagcgagctgcccaactgaaaaacatgctgagcgactcacagcggttcgaggccaagcgcctggagctcgagaagtggctggcccgcatggagcagcgggctgagcggatgggaaccatcgccaccacagccgacatcctggaggcacagcaaaaggagcagaagtccttccatgcggagttgcaccagaacaagcaacacttcgatatcttcaacgagctgacacagaaactgattgccgtctatcccaatgatgataccaccaggatcaagaagatgacggaggtcatcaatcaacgatatgctaacctaaacagcggagtcatcaatcgtggcaagcaactccatgcagcggtgcacagccttcaatcttttgatcgagccatggatcagttccttgcttttctttcggaaacggaaacactttgtgaaaacgccgagtctgatattgaacgcaatccattaatgttcaaggacctacaatcggaaattgaaacccatcgcgtggtttacgatcgtctcgatggaacaggccgcaaacttttgggttcgctcacctcacaagaggatgcggttatgctgcagcgtcgcctcgatgaaatgaatcaacgttggaataatttaaaatcgaaaagtattgcaatcaggaatcgcctggagtccaattcggagcactggaacgccctgctcttgtcgctccgcgaactgaccgagtgggttatccgcaaggacaccgaactgagcactttgggcttgggtcccgttcgaggcgatgccgtcagtctacagaaacagttggacgatcataaagcctttcgccgccaattggaggataagcggccaattgtcgagagcaatttaacgagcggtcgtcagtacatcgccaacgaagcagccgtctcggataccagcgatacggaggccaaccatgattccgactcgcgttacatgtccgccgaggagcagagccgtgagctaacacgcagcatccggcgggaggttggaaaactttccgagcagtggaacaatctaatcgatagatctgacaattggaagcatcgcctggatgagtacatgacgaaaatgcgtcagttccagaagatcctggaggatcttagctcccgcgttgcccttgccgagcagacaaaaacctcctggctgccaccctcatccgtgggcgaggccaatgagcagatgcaacagttgcagcgcctgagggacaagatgacgacggccagtgcattgctggatgattgcaacgagcagcagtccttcttcaccgccaatcaggtcctggtacccacaccctgcctctccaagctggaggacttaaacacgcgcatgaaactcctgcaaatcgcgatggacgagcgccagaaggtcctttgtcaggctggagcccagcagacgcacgagaacggcgacgacggacgcaccacatcgaacagcggcaccattggaccactgcccaatctcggccagagcgtgaagccgccatgggagcgggccaccacagccgccaatgtgccttactatatcgaccacgaacgcgagaccacgcactgggaccatccggagatgattgagctgatgaagggcctggcagatctcaacgagatacgcttttccgcctacagaacggccatgaaactgcgatcagttcagaagcgattggctctcgacaggattagcatgtccaccgcctgcgagtccttcgatcgacatggcctgcgtgcccaaaacgacaagctgatcgacatacccgacatgaccacggtgctgcattcgctctacgtgacaatcgataaaattgatttgacgctaatgctggacctggccattaactggatcctgaatgtctacgactcacagaggaccggccaaatccgtgtcctcagcttcaaggtcggactggtcctcctctgcaagggtcacctggaggagaagtatcgctatctgttccgcctggttgcagacactgaccgacgagcggatcagaggcgactgggactcctgctgcacgattgcattcaggtaccccgccaactaggtgaagtagccgcttttggtggctccaacatagagccctcggtgagatcctgtctggagcaggctggcatctcgcaggaggccatcgatggcaaccaggacatctccatcgagctgcagcacttcctcggctggctgcagcatgaaccgcagagcctcgtgtggcttccggtgctccatcgcctggcggcggcggaggcggccaagcaccaggccaaatgcaacatctgcaaggagtacccgatcgtcggcttccgctacagatgcctcaagtgcttcaacttcgacatgtgccaaaagtgtttcttcttcggccgcaacgccaagaaccacaagctaactcatcccatgcacgagtactgcaccactaccacatccaccgaggacgttcgtgactttacacgcgccctgaagaacaaattcaagagtcgcaaatactttaaaaagcatccaagagtgggatacctgcccgttcagagtgttttggaaggtgatgctctggagagtccggcgccaagtccgcagcacacaacccaccagctgcagaacgacatgcactcccgcctggagatgtacgcctcgcgactggctcaggtggagtacggcggaacgggctcgaattccacgccggacagtgatgatgagcaccaactgatcgctcagtattgccaggctctgcccggaacttcaaatggaagtgcacccaagtcgcctgtccaagtaatggccgccatggatgccgagcagcgggaagaactagaggcgatcatccgcgatcttgaggaggaaaacgccaacctgcaggcagagtaccagcaattgtgcagcaaggagcagagcggcatgcccgaggactccaatggcatgcaacactccagttccagcatgacgggtctttctggccagggcgagcaaggccaggacatgatggcggaagcgaagctgctgcgccagcacaagggacgccttgaggcgcgcatgcaaatcctggaggatcacaatcggcaactggaagctcagttgcagcgactacgccaacttctcgatgaacccaatggcggcggcagtagcgccaccagcagcggtctacccagcgctcccggttccgcattgaactccaaacccaataccctccagacccggtcggtgaccgcctcgcaattgaacacggactcaccggcaaagatgaaccaacagaacggccactacgagcacaactcaagtgagtgggtgggatttactagactcaactcgaaatgattgaagaactcaagtggcctagtgaccgtaatcacaga

SEQ ID NO: 16158 - protein, 1629 aa, DROSOPHILA
MTAKPPPPIPPTLGGDDSGTHGPKLAPEIPRINSELAAQAALRGQQLLRKQGSQEQHATNTLPAHKTGAPPPLPPTQSRPVPAIPARGASDRAAPPEIPPKRHSLKSMPDGQPMMVPGLPPTMRQPPPLPRKPASTQSSAQNSAQSSPLAGMKFKDKPPPPPEKHSTLSAEGMAARRCSNPFEMPPPPPPLVLQSAVAALSEQSSKNGLNPVPSPAPTRASEAKKINQRSIASPTEEFGSEDALRGIESGLRNMERAMQEQMNLRNMEAAVQNNFDLSFKASLAAGARHLGGGSVNLRTANYERNLSLDEGRAGDSRQSLEELKQLRAQAQQQSLLNNSSSSSSNSQVEQSMRSTIEHHMRSLDRNLPLELQYSRHRFQNNLNAVAAAGGGGGNSSTGNAVANSGTSGSQQPPMPLSSEFREQIRQQLLGNIPPQVVHNMGQSPGSAAAAALLQHQAQSRAAAAAAAAAAAAAAAQVAAGSGALSREELRMRRRSSHDETQLTQNSSGGIQVTRLREHWDETSQCVLQRAAQLKNMLSDSQRFEAKRLELEKWLARMEQRAERMGTIATTADILEAQQKEQKSFHAELHQNKQHFDIFNELTQKLIAVYPNDDTTRIKKMTEVINQRYANLNSGVINRGKQLHAAVHSLQSFDRAMDQFLAFLSETETLCENAESDIERNPLMFKDLQSEIETHRVVYDRLDGTGRKLLGSLTSQEDAVMLQRRLDEMNQRWNNLKSKSIAIRNRLESNSEHWNALLLSLRELTEWVIRKDTELSTLGLGPVRGDAVSLQKQLDDHKAFRRQLEDKRPIVESNLTSGRQYIANEAAVSDTSDTEANHDSDSRYMSAEEQSRELTRSIRREVGKLSEQWNNLIDRSDNWKHRLDEYMTKMRQFQKILEDLSSRVALAEQTKTSWLPPSSVGEANEQMQQLQRLRDKMTTASALLDDCNEQQSFFTANQVLVPTPCLSKLEDLNTRMKLLQIAMDERQKVLCQAGAQQTHENGDDGRTTSNSGTIGPLPNLGQSVKPPWERATTAANVPYYIDHERETTHWDHPEMIELMKGLADLNEIRFSAYRTAMKLRSVQKRLALDRISMSTACESFDRHGLRAQNDKLIDIPDMTTVLHSLYVTIDKIDLTLMLDLAINWILNVYDSQRTGQIRVLSFKVGLVLLCKGHLEEKYRYLFRLVADTDRRADQRRLGLLLHDCIQVPRQLGEVAAFGGSNIEPSVRSCLEQAGISQEAIDGNQDISIELQHFLGWLQHEPQSLVWLPVLHRLAAAEAAKHQAKCNICKEYPIVGFRYRCLKCFNFDMCQKCFFFGRNAKNHKLTHPMHEYCTTTTSTEDVRDFTRALKNKFKSRKYFKKHPRVGYLPVQSVLEGDALESPAPSPQHTTHQLQNDMHSRLEMYASRLAQVEYGGTGSNSTPDSDDEHQLIAQYCQALPGTSNGSAPKSPVQVMAAMDAEQREELEAIIRDLEEENANLQAEYQQLCSKEQSGMPEDSNGMQHSSSSMTGLSGQGEQGQDMMAEAKLLRQHKGRLEARMQILEDHNRQLEAQLQRLRQLLDEPNGGGSSATSSGLPSAPGSALNSKPNTLQTRSVTASQLNTDSPAKMNQQNGHYEHNSSEWVGFTRLNSK

SEQ ID NO: 16159 - DNA, 11239 bp, DROSOPHILA
ttttgctatagatatcgataagatttaagagcctggatacatttttttcggatcacttaaagcatgaacttacacatttttatgaacttgaagcccgctgcttagtggtttacacatgtgtagtaagttgtaattagcttaagtcgccacacactttgagttttgcctcatcactgcgtcgaaaaccgattagaacaagttaattacagtaatctgttcggaaagttgttcagagcgtgacatagttgagctttctgtgcattccgtgagttgtctagttttccaaaggccacttcacctgtcaatttgcatatgtgtaatgtggaaaaagccagtcaaatcaagtccagcattgcagtaattactcaccgccgaaaagaacaaaaatcgatcactaattacacgcaagccgctgccaattcatataattgtctgcccaagtcggcccatcaatcagagatttctttcaaggagcgatgcaaatcgctttcgaccagaatgctctgcggtttcgcacaaaactgacaaatgacgcacacaagaaggtggtatatcatagtcatgcacatggagaaactcttatttatttgatgaaattaaagtaaaattattatttagttcttataaaaataattaatcattaaaagagttatgaaacgtaattgcaagatatttgtggttaaggcgtattggcgaaggctaaatgaagactcatagtctgttagctatataaatgaatagccttaagattcttttcggtgtactccgcacttaaatgctgactgactctcgactctcagcgatcgacttggaaaactgcaagcgacgtctccgctaattgattttgagcgagtgatttggcacgtttggctgcagttcattagcaaagttggactgctgcactgagttgcgtttttgggttgggcccttgcgatagacaagactcgagtctgaatatcgacttggcgttccaaagactcttttgggttgggcgacggcgatggcctacaatctggcactgaagccggccgacttggctcgaggttaactaaagaaagttggcaactattttggcactaatggatctaaccatttctccgcatttttttctatatttcttcgcgctccagatgaaagacagcacatacagaagaaaacattcacaaaatggatcaattcacatcttatcgatacccagtgtacaccagtgaaggatttgttcttggacctgcgggacggacatcgattgcttgccctgctgagcacgctgactcaaaccaacctggttagtatatttctctagtgattaatggttaggaatgtgatttggggctctgagtataggtaaaatccattctaatttaaaaattatgtggcgaattacagagtgaattttatgatccgtcttagcattctcccagttcataatcataagtttacctcctttcaatccatttagaaacccgaaaaaggccgaatgcgagtgcaccacataaacaatctgaacaaggtgattaccgagatccagcagcatggtgtcaagttggtgaacatctccagcgatgacatagtgggtggcaatgccaagttgaccctaggcctcatatggctgatagcgctggagttcaatggccagcatctagtcaagagtcattcgagcaacggggtggagaagtccctattggcctgggcacgtcagtatacggaacctcatggcctgcagctaaatgatttctccagttcgtggtccgacggaagagccttcctcatgatcctggatgctcacgtggaggagctgaatctgcaggcggctttgcagcaacatgcactgaaaagattgcatttggctttcgatttggcacataggcactttaagattgaaaagctattggatgccgaggatgtgcacacccacaagccagataacaagtcaatacagatgtatgtgatgtgcctttaccacgccatggaatccatgaggacaaggcagcaggagcaggagcaggatgagggacaggatcaggatccagggagagtgccctgcaccagcatcacagacttggatgaggtgccactggacaatgatcaaaccagtttggggctttatacttcagacagtgctggcagcatggagcagcgatcttcgggggagctaaagacccactccatgcgtccgttgagtacggccaccaatgcgagtgtggagatcagtggctatcagtcagctctcgaggcagtactcaccctcctattggaagatgaacagctgctctcgcagaatttgccggatccccaggattttcaaactgccaagctgcagtttcacgaaaacgaaagcttcatgctgaagctgaccgaacatcaggagtatgtgggagaagctctggaggagggtagcaacctcatcaacgaatcccagaaggcaggagctggtttgagtcaggaggatcaaaacgaagtgaggcaacaaatggtgttgctcaacgaacgttgggaaaccttgagattgcgagctttagatgttcaagccaaaattctaatgagattggccgagtttcagaagcaaaaactcgaacagcttcgtcagtttttgaccagtgtcgaagatcgtatatcccatatgagtgatataggaccaaccctagaagaagcggaaaaacaacttttggaagctcaaaaactcaaagcagatctaagtgaacagcaggaattggtggatagtctgagcagcatggtcgtcattgtaaacgatacctctggcaactttaatgatctagaagatcgcttgagtgccttgggggagagatggtcgcatgtggtgaagtggagtgatttgcgaaaagagaaactgcagcaatataaatgtatatccagatggctggatgcacgcgagcaggatctgaagctcatggagagtcgggatgtcacagatgtgggcggcattacacagcgcatcaatgagctaaactattgtgccaaggatctgttggaactgcagagatatctgatagatttgcgacaaatggtggctgccactttacaggatggtgatgacaagggcgaaagggtgctcatccaattagagagttacgaagatcgtttagatgccttgaagcagattgttgaagtgcaaactgtgcgaatcgaaacgaagggctttaactttggacgagatcgtgctagctatgatgacagcagggtagtgcgtccagaaggatgggtggactaccagatgatcatacgtttcggtgaagatgattctcaagaagacgatgacgagcatgacttggccagcaagaagcgaaagcttagaaacgctgacaatttcaatgccctcgagaatcacatcatggagcacttcggctatgtccaggaagtggagcaaaagctacagcagttgcagaggcaaagtcttcggcaacagtgtgaattactcaaggaacttcaggcggaaaatagtcgacgctgcggtactttacccgaacttaagaaactctacgaagtctgtgagctggaggatccgtcgaggaaccttctcctggaggaaacacacatcaagcagctggagcaacgatatgcgaacttgtctcaaaaactatcgagccaacagagcgaaagccatacgctgttggccaaagaaaagtattacaatagtctgacaggatttaaattagttttagctgattccagagattggtataaacaacacgctggctcagccagtggcaacgagctagaacagcgtttgagccacatggaatccctggcatcggagatttccgaggccaagacagccaccgaagagctggatgataatctaatagaatggaagcaggactttggtctgttctacgacagttggcatgacatgaagcaggctctgcaggctctaattcaacagagaggcggcgaaagtctttccagacagttgaaacaaatccaagattttgttaccaaagtgtccaatcaaaaggttcgcgtttccaatctggaagtcatgcaggagcagcagcattttctaaaccaattgttagacgaaatggagtcccttcggctaacttatgataatataccaaaacacctgattggcgaagaactacaaaccgcttggaaccgacttcccgaacagctaaatgagcgcgtgattaaacaaaccacagctatagaaaacctaaaccactttgctgcggagtataatgccattatagccatgctgcgaagtgcagccgattccaagttgaacggaagtgatggtgctagcagtcaagatcttcgaaaactggagatcgatgtgataagcgctcgaaatttcagcgaaattctgatcaaggaggcggagccagcccaaaaggaatcgctacaatcacagataagggctctcaatacgttgtacgatcaagtggaacaggttcatcgggagaagaaggaacagcagacggttctgcaatcccatattgatcttatccagctaaggctcaaggaaaccgatcagtggttaactgatctggagagtaatacacccaaatcgggaatcagcgatatagtaaactccaacgagttgttccagagcaagagtcgctttcagactcttaaagaaacctgcgaaagggaaaccacacagtttagggatctcaacgaacgtggtggtgagctgctgctccaaatggatgagcttcaggaccaggatagggagtcccgatacggatcgctagcaaagcaattcacacgcatcaatgccagatggacggaggtcaccgagctggtttatgcgaagacagctcttctcgagcatatatcaacgcagctgggggagttcaagaagttcatggttagcgagacgggttacctggacaagttggaaaacaagatacgcaacacaccagagaatgcagccgacgcagaggagatcatggaggagcttgatgtaagtttgtcgacatattcatattccattcaaaatcccattaatgaccccattttccctcaggatctggagaacgttctgcgctcgcactctgaggaatggctggacaagattcaggaaattggcaacgagctaattgacaacgaattcatggccgactccatacgacgcgacattgatgaaaccgttcaacggtggacgcaactccagcagcaggcaaagaagcgaaccgagctcctggagcaaaaggtcagcgaggcggaacagtccgagaagtgcatcgtgcagttcgagaagtggctgacacgtgtggacgacatactcagcgatcatctggataacgatgtgaccattgtagatcagccggaggaattccaggtagattttcaatagttgaggagtctttttagaatttaatgaaacttgtaattgatgaatagcgcttggcacacgagtttgtggccaatgagaaaaactttaaggagatcagcgaacttattgacgagcacacgaggaacggcaaagtgggagctgccaatcggctacaggagcagcttaacctgatggaggtgcggttcaagtactgtcaggcaaagctgagcaagtgcaccgcaatccaacattcctacgaatcgcgtttgaatagggcctatacggatcttcgaaatgtggagcgatccactgaggtagtagatgtcgcatccgccggacccaacacggttcagactcaataccaaaagtgtctggtatgtataatatatgcttaagaatatttaaaaaagtagtttcgagatgttactaataagaagcagcatagatgaaataccaaagccttaaatgaaccaaatatttttgtagcttttcacaaaactttcttcattctttcacaattcccagcaaatttatcgcactctatcggagataaagtcggaaatagagagcacgattaaaaccggtcgcagggtttgcgaggacaggtacacaaaatcgccgaagcaacttagtcagcggattgatgcgttgaagcatctgtacaataccctcggagagaatgtgacccagtcaaaggcgaccctggaaaggctgctcacattagcgaggcaattagaggagtgtttcgattcggcagacaacctaatccggcgctttgagtcgccgcaagaggtccatgacaggaactccatactcctggagtttgaggatgtgctgcgaaggtgcgaggaccactacaatgagtataacaaatcctgtgaccagagctgcatggtggaaacccgtcaaaggatcgatggattgaaggctacgtaccacaagttgaccagtgcggacataatcaagcggctcaccgagatgaagaccaccctgcagaacctggacaacatttcattggagactttaaggtacaaatcaagcttaagtatttaacattaaaaacaagattttttaaattaatctttagctaaaggaatttatcagtctgaatcccaaattcagtaattcttattaagttttaacaattgagttaggcgattctgggtgtgtggtgaggaagcttaatgctacattaacttaattaagccttctcatgttcaggatgctgtaaacccctaatctacttcttcacctagtaattgtaatcttttgcagggcaatggagcacgacctgaaggagataaatgtgccctcgaatccggaaattgagaaattgcagcagcaagtaattgcaattgtcgtggtgagtcggagcaagcaaaccaatcctcttaattacgcaaaagcttcctttccgccttccacaatgtccttgccacctgtacataatatatggtccatcctttcctctttctgtgcttgttatcgggtttcagttctttgcttacattcgtatttttttttttgtctttatttgcttacctcacatttcgcttttacatcggagtcgcctcacactttccattccattgaggctgattctactcggacaccttttgacccggctcgaagcaaatggaattgggtttcaattttcctttacttttactccttctgtttcacatcatcgattctacatcatttgatttatcagaatgtacagcttgatttaatgtgggatgatttaaaacgtaaatcgtactcaacagcaggatgaattgggactggagatagatttcttgaaataaagatatatgtttctctacttcaattttgaaccataaaatcaaaattaataaaattatttttaaattctaattgacaacaaactaatccattttatattaataccaatcagaaatcaagaaactcgtgagtttagatatgccaaaaccaattgcttctgcttaataatacgcttctaccatacttaatttactcaacccattattctatttattttgccagtttcataaaccattaaataatctttccaccaaaagctaatccagaaccaacaacatttacccgtaatggtaaatgccaaaccatcaaatctaccacatcaccccagctagagataataaaccattattataaatattgaataaaaccagaaatcaccgtatcactagaactctacggggtctaactttggtgtcattttcacgcttcaaattttaatgtgtagagttttacaattgattcccctctaattgttgttgtggcgttcgattggttgtggctgcgtcaaatgtccaaaccatcccaaaaacaacataaaaaaaagtaatccttccaatccaccgctcaccaccaccaccaccaaaaaacaaaaaaatatatatatataaatccaccaattaccaccgctcaccaccaaccaacgctaataaataaatggccactgcttttttaatggagaatatgtacctaaatgtaaaaaaaaaaatacctatataccaggcttcatgggctttcagaaatgcatttgtttagttttgagagtctacagagctttgtaatttacaccaaactatgcatttgttgtgcaggatgtgctgaaaacccgtttcaatgaagccacaacgcttgccgctcgaaatacgagctctcccgacaatgacgacacggaaatagttgtggtcagcgatacagtgcgtcaacgacgtgccaggacaccccaatcgggggaatcgccgtcatccgcccacaccagttcctcggagtcgccaacgaagggtgtggagaatagtccgggagcggttggcgaccaagtcatgccggatctccttccaccacaaacattccggctggccgagtccagtactctgttctcgcagatttcccttaatccccaaaaagtaaccaacactccaccacccaaaccggcgaaaactaagcgaaaggccccaagttctcccgcccaagttgtggagatcagggtgaagaacatccaaaacgataaaatgtctgtgcagaatatcgatctggaaccacagcagggtgaaatcgtagacaccgtcaatatcctggagagtgtggaaccatttgtacccgaatatgtggagaccgtacagattgtagatctctccgaggactcagattcatcggtcagagttgatagtcagggcaaggagatgcgacgatcgaagagcaagcattctttgaacgagactccactgcccaaggtttcggataacgatgaagactcggcggaacaggaggaggacctcctgcgtccctcggcagaaaatacaagcactccgttcctgagggtggaaaaacgccgcatttccttcgatgagaaacgcaagcgagtagctaatgagcgcgatatcctgcgcgattccgaagaggaggaacccaaaacaccggatactccacgggcagcgcaagtctccaagccaaaacgctggcgccaactccagccagaaatggatgctctggaacccgaatcacccggtcgcgatagtttctatagtcccgacaaagaatccggtttcgatgctgagcctctcgtattttccgacgatgaggatataccgcgtttctcgctggaaatgacatcaaccattgactccgatagtgatacggtaatttggttgaaaggcctggcaaatctttttcccacagtgttgtaaagaatcaatcctaactcgagaaatattattcttaattatccacacagagtcgcattatgacgccttctaccaaaaatcccaatcctttcctgagcaaggtcctggaatcattgtcttctccggtggatgactcaaatgtaacgctcaaaagcccgatcagcgaagagcagccccagaatctggatgatcgtgtccgagagttcgacaagcaggccaagcagatgatctacaagttgaagcttacgaaggccaagattgaacagtgtcacgaaagcgaagcgtaagatttattatgtcttatttgccatagaagattgattttatgaatcaatttaagatttgaaatttagggaaagtcttttaaataagctattaaaaagccatttaaattttacgcatgttcacttttgttttaaaataccaaataatataataattttggtaagctggccactctgaaatttacaaatgtatttacttattttacaatgtacgttgtagcaacttgctctagattttattaatattacgaatagctaattatcatgaagatgagaaatgacaaaaatgtacatatgatatcttaaacaagtgatattcgaatcaattattacagagaggacctgcggctcctaatagcacctgatgcagccaccttgatatcccaaggcgactcattggttctggaaactcatggaagacagggcagcatatcccgcctggtgatgcgcacacaaataatattgagggaacaattccgagaagtgcagcaagcaaggtatgtcagcattcaaagacatctgtagttttcatttactcattaagctcaatttccatagatccaagacctcgggaagcggggcaccagctcctccactggacagcgtaaacatcgaggagctggtcaccaaaggactgcgtcgcatcaacgttctcatagaaaagaccgtcgatctaaagtctagcactgatcttgagaagcgcatggaggatatcaacgtaagtttacatggccaccatgccaatttaaactgtaaattacctgtgcaaactacaattaaatcactttcatttaatcgccgcaattagtcatgcacgtggacatttcgaagacagcgtcacatctttcggcgatagatgctcgtctcttgccgcaagttaattgccctcttgagaatttcgatgcacacatctataaatctataggcagtggccaccatagctaaatgggtccattagaagccccaaaaataaacacgactgacacagttacacatctgcatgcagttgggcggtggaggagatttgtagtatttagtgggtcagaagagagatcgtggagtaagagaaatttaaagagtttttttcctgtgctgctgctcattttgttgaggatgctgtctgttctgaaaggttgcaagatatgatggttgtcatgttctattaaattatcaacatgttccctttaaacgttatgatgtatttaaacatgaaatgttctaatgacaagtgtcattttgtatagcacttgaatgcattttgttttcaaaattttaaacacctgaatagtagtgaagataaataacttgcttaagaaaaatgtactctaggtttaaaggcaactttttgagtaggacccatttcgaatacgtgccattcataacattcataaaaaagagaaagaaataaaactttttgctagcagctacgcagcttataataaatgtaacattttcaacaagttccatccctaggcaacagagtcattaatcactgcaatcatttgttgtttatttttatatgtattatttattcagttttttgtttgattttatggcaccagcgagcatggcgacaaacgccagcgtttcaaaaaaaaaaaaagcgaaaaatgaaatcaaaaatagaaaagattttgtattttcagagaggggaagagatagacagagcgaagcgttttggggccggaaaaaagattgaaaatgggaaaaatttacttcgaagaggcgcaaacatgtaaattcgtctctttgccggcgagatgaggtcttttgtttttatttttccccatttttttttttcgtttgcgcctcttcagtagcgaaccatctcgtttgggaagcggttgcagcagagctttaaaatcttttcaaattttccgatgtgtttgcgggcgtttctttgttgacccagtgattgattgtaaattttgcggaaatttcagtttggcgcgaaggga

SEQ ID NO: 16160 - DNA, 6511 bp, DROSOPHILA
atggcctacaatctggcactgaagccggccgacttggctcgagatgaaagacagcacatacagaagaaaacattcacaaaatggatcaattcacatcttatcgatacccagtgtacaccagtgaaggatttgttcttggacctgcgggacggacatcgattgcttgccctgctgagcacgctgactcaaaccaacctgaaacccgaaaaaggccgaatgcgagtgcaccacataaacaatctgaacaaggtgattaccgagatccagcagcatggtgtcaagttggtgaacatctccagcgatgacatagtgggtggcaatgccaagttgaccctaggcctcatatggctgatagcgctggagttcaatggccagcatctagtcaagagtcattcgagcaacggggtggagaagtccctattggcctgggcacgtcagtatacggaacctcatggcctgcagctaaatgatttctccagttcgtggtccgacggaagagccttcctcatgatcctggatgctcacgtggaggagctgaatctgcaggcggctttgcagcaacatgcactgaaaagattgcatttggctttcgatttggcacataggcactttaagattgaaaagctattggatgccgaggatgtgcacacccacaagccagataacaagtcaatacagatgtatgtgatgtgcctttaccacgccatggaatccatgaggacaaggcagcaggagcaggagcaggatgagggacaggatcaggatccagggagagtgccctgcaccagcatcacagacttggatgaggtgccactggacaatgatcaaaccagtttggggctttatacttcagacagtgctggcagcatggagcagcgatcttcgggggagctaaagacccactccatgcgtccgttgagtacggccaccaatgcgagtgtggagatcagtggctatcagtcagctctcgaggcagtactcaccctcctattggaagatgaacagctgctctcgcagaatttgccggatccccaggattttcaaactgccaagctgcagtttcacgaaaacgaaagcttcatgctgaagctgaccgaacatcaggagtatgtgggagaagctctggaggagggtagcaacctcatcaacgaatcccagaaggcaggagctggtttgagtcaggaggatcaaaacgaagtgaggcaacaaatggtgttgctcaacgaacgttgggaaaccttgagattgcgagctttagatgttcaagccaaaattctaatgagattggccgagtttcagaagcaaaaactcgaacagcttcgtcagtttttgaccagtgtcgaagatcgtatatcccatatgagtgatataggaccaaccctagaagaagcggaaaaacaacttttggaagctcaaaaactcaaagcagatctaagtgaacagcaggaattggtggatagtctgagcagcatggtcgtcattgtaaacgatacctctggcaactttaatgatctagaagatcgcttgagtgccttgggggagagatggtcgcatgtgatggctggatgcacgcgagcaggatctgaagctcatggagagtcgggatgtcacagatgtgggcggcattacacagcgcatcaatgagctaaactattgtgccaaggatctgttggaactgcagagatatctgatagatttgcgacaaatggtggctgccactttacaggatggtgatgacaagggcgaaagggtgctcatccaattagagagttacgaagatcgtttagatgccttgaagcagattgttgaagtgcaaactgtgcgaatcgaaacgaagggctttaactttggacgagatcgtgctagctatgatgacagcagggtagtgcgtccagaaggatgggtggactaccagatgatcatacgtttcggtgaagatgattctcaagaagacgatgacgagcatgacttggccagcaagaagcgaaagcttagaaacgctgacaatttcaatgccctcgagaatcacatcatggagcacttcggctatgtccaggaagtggagcaaaagctacagcagttgcagaggcaaagtcttcggcaacagtgtgaattactcaaggaacttcaggcggaaaatagtcgacgctgcggtactttacccgaacttaagaaactctacgaagtctgtgagctggaggatccgtcgaggaaccttctcctggaggaaacacacatcaagcagctggagcaacgatatgcgaacttgtctcaaaaactatcgagccaacagagcgaaagccatacgctgttggccaaagaaaagtattacaatagtctgacaggatttaaattagttttagctgattccagagattggtataaacaacacgctggctcagccagtggcaacgagctagaacagcgtttgagccacatggaatccctggcatcggagatttccgaggccaagacagccaccgaagagctggatgataatctaatagaatggaagcaggactttggtctgttctacgacagttggcatgacatgaagcaggctctgcaggctctaattcaacagagaggcggcgaaagtctttccagacagttgaaacaaatccaagattttgttaccaaagtgtccaatcaaaaggttcgcgtttccaatctggaagtcatgcaggagcagcagcattttctaaaccaattgttagacgaaatggagtcccttcggctaacttatgataatataccaaaacacctgattggcgaagaactacaaaccgcttggaaccgacttcccgaacagctaaatgagcgcgtgattaaacaaaccacagctatagaaaacctaaaccactttgctgcggagtataatgccattatagccatgctgcgaagtgcagccgattccaagttgaacggaagtgatggtgctagcagtcaagatcttcgaaaactggagatcgatgtgataagcgctcgaaatttcagcgaaattctgatcaaggaggcggagccagcccaaaaggaatcgctacaatcacagataagggctctcaatacgttgtacgatcaagtggaacaggttcatcgggagaagaaggaacagcagacggttctgcaatcccatattgatcttatccagctaaggctcaaggaaaccgatcagtggttaactgatctggagagtaatacacccaaatcgggaatcagcgatatagtaaactccaacgagttgttccagagcaagagtcgctttcagactcttaaagaaacctgcgaaagggaaaccacacagtttagggatctcaacgaacgtggtggtgagctgctgctccaaatggatgagcttcaggaccaggatagggagtcccgatacggatcgctagcaaagcaattcacacgcatcaatgccagatggacggaggtcaccgagctggtttatgcgaagacagctcttctcgagcatatatcaacgcagctgggggagttcaagaagttcatggttagcgagacgggttacctggacaagttggaaaacaagatacgcaacacaccagagaatgcagccgacgcagaggagatcatggaggagcttgatgtaagtttgtcgacatattcatattccattcaaaatcccattaatgaccccattttccctcaggatctggagaacgttctgcgctcgcactctgaggaatggctggacaagattcaggaaattggcaacgagctaattgacaacgaattcatggccgactccatacgacgcgacattgatgaaaccgttcaacggtggacgcaactccagcagcaggcaaagaagcgaaccgagctcctggagcaaaaggtcagcgaggcggaacagtccgagaagtgcatcgtgcagttcgagaagtggctgacacgtgtggacgacatactcagcgatcatctggataacgatgtgaccattgtagatcagccggaggaattccagcgcttggcacacgagtttgtggccaatgagaaaaactttaaggagatcagcgaacttattgacgagcacacgaggaacggcaaagtgggagctgccaatcggctacaggagcagcttaacctgatggaggtgcggttcaagtactgtcaggcaaagctgagcaagtgcaccgcaatccaacattcctacgaatcgcgtttgaatagggcctatacggatcttcgaaatgtggagcgatccactgaggtagtagatgtcgcatccgccggacccaacacggttcagactcaataccaaaagtgtctgcaaatttatcgcactctatcggagataaagtcggaaatagagagcacgattaaaaccggtcgcagggtttgcgaggacaggtacacaaaatcgccgaagcaacttagtcagcggattgatgcgttgaagcatctgtacaataccctcggagagaatgtgacccagtcaaaggcgaccctggaaaggctgctcacattagcgaggcaattagaggagtgtttcgattcggcagacaacctaatccggcgctttgagtcgccgcaagaggtccatgacaggaactccatactcctggagtttgaggatgtgctgcgaaggtgcgaggaccactacaatgagtataacaaatcctgtgaccagagctgcatggtggaaacccgtcaaaggatcgatggattgaaggctacgtaccacaagttgaccagtgcggacataatcaagcggctcaccgagatgaagaccaccctgcagaacctggacaacatttcattggagactttaagggcaatggagcacgacctgaaggagataaatgtgccctcgaatccggaaattgagaaattgcagcagcaagtaattgcaattgtcgtggatgtgctgaaaacccgtttcaatgaagccacaacgcttgccgctcgaaatacgagctctcccgacaatgacgacacggaaatagttgtggtcagcgatacagtgcgtcaacgacgtgccaggacaccccaatcgggggaatcgccgtcatccgcccacaccagttcctcggagtcgccaacgaagggtgtggagaatagtccgggagcggttggcgaccaagtcatgccggatctccttccaccacaaacattccggctggccgagtccagtactctgttctcgcagatttcccttaatccccaaaaagtaaccaacactccaccacccaaaccggcgaaaactaagcgaaaggccccaagttctcccgcccaagttgtggagatcagggtgaagaacatccaaaacgataaaatgtctgtgcagaatatcgatctggaaccacagcagggtgaaatcgtagacaccgtcaatatcctggagagtgtggaaccatttgtacccgaatatgtggagaccgtacagattgtagatctctccgaggactcagattcatcggtcagagttgatagtcagggcaaggagatgcgacgatcgaagagcaagcattctttgaacgagactccactgcccaaggtttcggataacgatgaagactcggcggaacaggaggaggacctcctgcgtccctcggcagaaaatacaagcactccgttcctgagggtggaaaaacgccgcatttccttcgatgagaaacgcaagcgagtagctaatgagcgcgatatcctgcgcgattccgaagaggaggaacccaaaacaccggatactccacgggcagcgcaagtctccaagccaaaacgctggcgccaactccagccagaaatggatgctctggaacccgaatcacccggtcgcgatagtttctatagtcccgacaaagaatccggtttcgatgctgagcctctcgtattttccgacgatgaggatataccgcgtttctcgctggaaatgacatcaaccattgactccgatagtgatacgagtcgcattatgacgccttctaccaaaaatcccaatcctttcctgagcaaggtcctggaatcattgtcttctccggtggatgactcaaatgtaacgctcaaaagcccgatcagcgaagagcagccccagaatctggatgatcgtgtccgagagttcgacaagcaggccaagcagatgatctacaagttgaagcttacgaaggccaagattgaacagtgtcacgaaagcgaagcagaggacctgcggctcctaatagcacctgatgcagccaccttgatatcccaaggcgactcattggttctggaaactcatggaagacagggcagcatatcccgcctggtgatgcgcacacaaataatattgagggaacaattccgagaagtgcagcaagcaagatccaagacctcgggaagcggggcaccagctcctccactggacagcgtaaacatcgaggagctggtcaccaaaggactgcgtcgcatcaacgttctcatagaaaagaccgtcgatctaaagtctagcactgatcttgagaagcgcatggaggatatcaacgcagtggccaccatagctaaatgggtccattag

SEQ ID NO: 16161 - protein, 547 aa, DROSOPHILA
MAYNLALKPADLARDERQHIQKKTFTKWINSHLIDTQCTPVKDLFLDLRDGHRLLALLSTLTQTNLKPEKGRMRVHHINNLNKVITEIQQHGVKLVNISSDDIVGGNAKLTLGLIWLIALEFNGQHLVKSHSSNGVEKSLLAWARQYTEPHGLQLNDFSSSWSDGRAFLMILDAHVEELNLQAALQQHALKRLHLAFDLAHRHFKIEKLLDAEDVHTHKPDNKSIQMYVMCLYHAMESMRTRQQEQEQDEGQDQDPGRVPCTSITDLDEVPLDNDQTSLGLYTSDSAGSMEQRSSGELKTHSMRPLSTATNASVEISGYQSALEAVLTLLLEDEQLLSQNLPDPQDFQTAKLQFHENESFMLKLTEHQEYVGEALEEGSNLINESQKAGAGLSQEDQNEVRQQMVLLNERWETLRLRALDVQAKILMRLAEFQKQKLEQLRQFLTSVEDRISHMSDIGPTLEEAEKQLLEAQKLKADLSEQQELVDSLSSMVVIVNDTSGNFNDLEDRLSALGERWSHVMAGCTRAGSEAHGESGCHRCGRHYTAHQ

SEQ ID NO: 16162 - DNA, 9226 bp, DROSOPHILA
ataaatacatacttaacttacagttttggttacaatttccatttggtttcgtattgtataattgttgtatatatatttttgtttgtatctttccgctacttggttttccatttataagaataattatattgtatgaccgcatggattttcgcacgcgtcttgatttgttgttagattagtcgacttcgaattgagttagttcaagataaattatagagagtatacgctaacttactacaaggcaactaaatggcttcaatcaggagtgtttatgctatttaacgtacagggataacaaggattcgaatatccaactagctaaattaggtttaataatttgaaaaacttagaatgacagaagcgagggcagttttgtagtcttagtttagaaagttgaagatataaggagagatttcgagttataacacaaatgctaacgattgcataacaaaaggctggatcaacaaaaacaatatacatagtgataagttaagttgctttttggatccttcgtccataatcgttattccacatgaaatatcacttacgtaagagaagttaatatctgtatctggtatcggtattttctagatttatctcctaatctaaaattttgtcttagttttgctcttggtattgttttgataaaccagttaatttgtcatttgtttccacggtttaagtctaaacattgtctttttttcgtttttcatttatttctataaaatttacaaaattacgttcatttctcgtcttattcgtctgtcatcttctatcgatagctttgcccaaaaactgtgtgtatatattgattccggcgaaggaggctccccattcgcctgctttccatataaactcgcttatcacttagcttacaagtagtgttctctctatcgtcaattagattcccaagaagtttgcgagtcctgaaagtccagatcgatcaaagtgttccatagacttgttactccgactttgtcctttcctttgatttcgtttcctatacagtaagcggctcatcgccgtgcagatcacaggatccaatgttctcgccctggtacgtcgagaagtcgctgataatcgctgtgggctcggctccgaactggatatcctgcaggcagcccttgaagggatcgaagaagcgaccctttgtgcgcctgctcaccgagtccgagttgggaaagccgcctgtttgggatgcaaagaatagagcatttgtcaatttgaacttgaatttgaatttgtgctagtgctggacaaggtgtaaaagtggcagttaacagcagtctgttagctgccgcttaacagcatagattcatgtttaataaaagatgaacaattcgctcaagcttttaatgctaaatttcattttgaatttaaatgaaaggtaaggaatttatatattagggtatttaattaagtaataatagtcagtgtatctattaatttatgaacagctgatatggcttaaatacctatcgaaccaacagccgcccaaagcaaacgagttggcagcccagttaaaatcagtgtttattcggatcgcgaatcaaaaacaacttgcgattgaaatcgaagttcgaaaagttagttgtagctaaccagctttggccaaatggtatcaaagagacctggatcgttgtgctccgggttttcccttctcaagaaccgaatcaaccgaaccagctaaagtgaactgaatgtctcttaattgtgcaattgtttgtttaaagtgcatgtgaacaagatacgctaataaaagtcttcggatcggtggtaaactataaaactataaaaccggtaagtcgatcatcattataagtttatgtcataattaatacaacgctgtaatgggcttaggatcacataatatcacataatgggcaagattttgcaagctacacctgtttgataatattataaaggtcataaataaatagactcacccaagtagaagacatcctcgtagctaattgttggctccttgctcgaattcttgcgcctgcccgccagagtgcttctcggcgtggtcgagcccagtgaccgtccgccctcgggcaatcgctccgtgaagatcacctcgccgtccagctgcagctccagcctggaccggtccagcaggacgctggtccagtgccaggctccgtcggctatgaatccgctggccggagcacggaccgtgtcgttggtgctgcccaggaggttgctggccagcttgaggtggcccgcctccaggcccaggccgaggaacttgctcctctcgtgctcgctccacaggagcagtccgtccggttcgatggtggagaagttcagcgagacttggatggcttcgcgggggcggacgtacagggagggtccccgccgcttgtctttcatcggaattcgcggcggcggcaagatcaggtaactgttgccacggaagctcggcgtcgtcggcttgctcatggctagaaaaatccgaaagagtcataagacatacataatactgccgcggggagggaaatggggaagttgaagtcgaatggcgttgcattaaacatattgcatgcggcacataattaaattacagcatcagcttgccgctgcagctgcattgttcctcttcgtcgccgtcttttgtttcactttatgtatctgaatcttaatctgaatcttcatctgcagaccctgatctcgtttatcaaactcaaaccgttttctaatgcactaccaagtacctgttctttgacaagaaaagcgcttttggcccaatccaaagaactcacaacgagttgtatatttaattactaagaaaacaacagaatgatatttatcaaatgttcaatttgatcttttgttgcctttttctagttgcacagtgctcacttctcccatttgtcagcgttttcttcaacttcactcactttccagttttttctgcctatgaatcatcacgttcttcatcaggttctagaactcgaagcacacattaatctttattatcgcgcggttattaattttctatacacttttccctacagtttcttcacccccttttatcattttgtctatcacctgttcgctttccctgagttcttgattttcatggatatagctcaggcttttcctcgtattcctattttctctccattttcccttcaccgacttgcatttcttcaatttcaacttcaacttgcttgtgtggcatgttaattcacaatttgctaataagtgaaaggcagacagctggatgaatctccacataaaacattcgatggataaagaaatagcaaaaacgcatctgccgatttcgtataatcaaaagcttgtttcgcagatggttgattaatgtttcgcttggtgtcattataattttgaataatgttgcagtgtgaggggataataaaagtttgaaattactgattggataattgaaattggcgctgaaagttacaaggagtattttctgtttgagctaataggttagaactttgaactttatttttgcatattatgcatattaaattgaaaaaaaacgagagcattcaactttgaatcatggccagtcttaattatgccccaactctatccccattctgattatagtgctctttattgccatcgttgtgaatcacagagcgctaatttttgtgttactttttttggccaaccaacttcctgaccccgctgtgcactgaaccatccagaatccaaatgctgctgttaatggttattttctgctgccgtcaatctctaattataataataatgttgttctactcggcggctgcgaaacttgtttggcccaaaactccgcagaacaccgctcgcaaattgagatcaaaacgcagaaaataataatacaataaaaacatttaagcttctgtaggaattgcgaaaaccaacttttactcgtgacacattttttgcgaattgaacttgaagccgtgcgaagatttatataacttgtttttctccgcattaacaagatgtattgctattatgtttttggtttttttcgaaaaccaactgaattatgagccgtgcttgtggttattgaacttttggccactcaccaatctcgcagtagaagccaccccatccatttggacacgagcagcgtccacttctcaggcatcttccattgtttttgcacggaatgagcttgcaggtctccgagtactcgcatcgatctcctttcgcgtactccggacagatgcaatgcggctgcagcttctcgtccagccagcaatgtcctccggactcgcaggagtctccgccacaagcggtgccatcacagtctcgaatgttgcgcgattctaatggggttagacgaatcatttagttaatcaagaatggtgtccttaaaggctgttgctcatcatcaacagtacgcacccacaatgttggtttcgttgagcacaatgcgagttccactgaccaccagaccccggacacatcccctgaacggaatcgggaaaccggagatggcgttgtgcggcagcttggacacatccttcagcccgccaatgtagagcagtgagtcgggctcgacgagcacctcagccgaaggagccaaagccgacgaggcgctaccctccacccacagggtcagccatcttccgcgctgcgccatcttgatcttgtgccactcgccgatggccaacatgcgaacgctccgcaccaccgtgacatgattgctgggcccggaaatccggaactccaccactccgccctgcagcgatagcgacacgaatcctatcttcttgtcctgattgttgttcagggtaccgaagtacagaaggaggcctctttccgagagcgggcgcagttggaactcgatgaagaagaactgcactcgatggtgctcctcgaaggacttcgatcccatcaggggaactggcgagaagctgcgctgcttctccacctcattcagcagtttcatcacaaagtggctgctgggcgtggtaatgggcttcgggggcattagtttcttggtgaagttccggtagctgaccatttgggagcgcttagcgcccagtttatccccgccatcgtatagatatggccagcgaaccgccagataggatcgtctgccagtcagggatacgtcgctcagggatcgaattactaaggattgaagggcagtgaagttgtatagctatagtaatgattataacttttttgtggaacctaccctcctcgcagtttttgcctgtgcgtcctacaggacaatcgcattcgtagccattgaccagcggcacacaggtggcgtcctcgtagcatttgttgttgaaggagtcacagggattcgtgggctgggcacacagtggcccataccagccctcctggcagatgcaactaagaagtggagaaatagcgaattatgaacatataatgagggttaaaggtagatagatcaaaggatgcgctcacgtaaaggttgctccatgctgcaggcaggcgccatcgtgctggcaggcatggcgatggcattccctggttccacattgacccacgccccgacctctgaccccgcgcgtctcctggaggggcaccgtgacctgtcccgccttcagctgtacatcgtatatgcatccctggaatcccgaatgcagtggcaaatcgtgtggcagcgtattgaaattggctatctcgtgaccgccgagatacagaataggcaacacatccatccgactgccacttccgggcgatcgacccgtaatattgaactttccatccaccgagagccaggcctgtcttccaatccggcccaccttaatctcgtacggaacccggggagcatccagccggaaatcaatgggtttctgtgtgaatatgcgacggggcccggctcccagattccaggtgagcattatgtagccctggatgaagctcaccgccaggtgatcgctcttctcgtcgtgataacccgactgcccgaagaaggccagcagcgaaatctgagacatggtctgcggcaggattttgaagctcagctcgagcgaatactcgaggggaatcggcaccgtgtaggccacaaacgaggagagtccattgacgctgccggagaaggatggcagggccacttcaagatctaaaaaagagttattaataataaaataatgattcctcaatagttcttctgaatggagtactcactgtgctcgcaatagtggccgtgcttgcccagcggacacaggcagaggtaaccgctgcccggaaattgtacgcaggttccaccgtactggcacgggttgtcctcgcacacggatatctcgcaggtggggcccatgtagccggtggggcacttgcacttccacttctccgccttctcgccattctcgtccagatcgttggtctcgatctttatgcaggcggcgccattgcggcaaggactcgatagacacgccaatgagccgcattccgtaatgccaaagccatcgagggcatcgctacacagaaaaataatcagtatgaatgtttaggaatttcatttaaatggggaaaagggttttgaaagttatagttaaatcatatagttaaacttataaatacaattgatcattagctatgatttttttctcagtgcaaaactgaaatgagttaggtgtcgcagctaatttcatgagcttggctaattcaacatgccaataccgtggacgaagtgtccttttcgccatccttgcgcgccatttgacaaacagcccacagctgtcagcgctttcgacacggatgtgaccaccccccaccgcccacatccctacgccctgcgagcccccttgcgcccatttgtggacccccttttggcctggccctctgcatttgggccatctgtttgtactcgcgcttttatgaacatagcacactgacgaatggcttccgcattcgctgacaggctgtcctcatcccaccttgccatcatcgccagccccacctcctcccgcccagctcctttgagatgtccttttcatcgggttggctgcattttcagtggcaaacttggtaagaggccataatatataagcttttagcaaggctatttcttttatggttaagaagtttccatggcaaaccaacttgaggtctagcatggaattcgtcaagaactcttgtgcatttaagatatttaaagacctgtggaatgacaagcgcttaaaacaaccacttgaagtttagttgataaagtaaacaaaattagggcctaattagcagcatggctctactactttatgtcccacttgcacttttggttattttcgccactcccattggacacaggcgattccatttgttatatatggtattagccatatattccatatgtgccaccttcgcccatttccgcgtttatctccgcacgtaagcagagttaattttttcgtgcaccgaggaaaaaactttttaacacccggtggccgtataatccggccataactgcaactccttcagggctttcgccacctgcaactttgtgtggcggcattttgatggttccattttattcccgcccttactcgcctttggcttttctttctttcgctggaagagtgtaagcggcattaacatttaagagaaacccccgccggagatatatgcctttcccagatatatatgtcccccccccccccaaaatctgccccaaagaagtcgtaattttctgggagctgttcattagccgtggtccagcgatcaaagagcaaattggtgatgggtgtgtgcatcttgggcactgagagaaatatgacctattatttacttatatatgtgatcaatttcatttaacaaataaaatagacttcttatgtttaaggcttagtttaagtgcatatttgggagtgagttagtatgaatgatatgaactcacccgaaaatctcgcgagcctgtccattgatgcgcagcgtatggaggcagccggtgaagccgcttccactttgggccggcggcagttcgataatcaggccaatcggcgcctggggcgctccgcccagatgcagccaggtgttgaggatggcctccggggtgtgaaggcgcggcggtagtagcttcagccaggtgggctgatccccggacatggccaacgtgtcgttcaccagcaacgaggcgttgcagtgtgtgtaattccggctgaagtccaatctggaaaagggacattcgaggcattcctttagcgcttctacctttcaacttttgccattcgcctttcacttttcaatctatttgcaccgtatggtgctgcagtgcatcaaatatttaataccccgcactttccctttggcgcggaggcgacacaccctgcattcccggcttttgggacgacttttaaggagaaattcccaacatgccgatgcgtgaaaatatttatgacaccacaatccaccgccctgacccgcaaattccctcatccacccaagtagggtcctgccagcaatctgttatcctggcctaccttttgccagttgacctttcagcgtaggcaactttcgcaggacccaaatattcatttacagtggtttgatttttgttgaaaaatcttgaaaacatactaacatgatacttcgcaaaaaaagggatagcaaaaaatatatatataataaaattaaagattcaatattattagtatctcacgcgttagaattggtattttaaataatatttttaattgctattaagcctaatcccgcaccactgtttgatggccatgtccttttccgtccgcccagcaattgcctgtaatgtcaatcgactgtcaaatttttgtttcgcctgcccagcgatggtatggaattttttaccggtcctttgatgtgatggaggcaaaggatcggatggggttactggtgcttttttcgcccctcggcgagtgagccgccagtttttattggcccgcttggtcgaatgtcacctgcttttatttgaatgggctttgttgtgaggcctcatccgcagtatttcagattttattccttggcggaggaaggtgggagtgcccctttttggtgggatggacgaactgggattcatatcttcgcgtttattgcatttgaatgtagatattttaatgccaaaaagtcagtgcagcaaatgcctgcagaaggacatatattttattgttattttatgatggctggatgaagctgtaaaaagtttcccatatgctggccagatggaaaaagtttttcctgattgcatttagtttttacaacatgtgtaacatgtatttggcactgattttccttttgtaaa

SEQ ID NO: 16163 - DNA, 3120 bp, DROSOPHILA
atgcactgcagcaccatacgattggacttcagccggaattacacacactgcaacgcctcgttgctggtgaacgacacgttggccatgtccggggatcagcccacctggctgaagctactaccgccgcgccttcacaccccggaggccatcctcaacacctggctgcatctgggcggagcgccccaggcgccgattggcctgattatcgaactgccgccggcccaaagtggaagcggcttcaccggctgcctccatacgctgcgcatcaatggacaggctcgcgagattttcggccaacccgatgaaaaggacatctcaaaggagctgggcgggaggagcgatgccctcgatggctttggcattacggaatgcggctcattggcgtgtctatcgagtccttgccgcaatggcgccgcctgcataaagatcgagaccaacgatctggacgagaatggcgagaaggcggagaagtggaagtgcaagtgccccaccggctacatgggccccacctgcgagatatccgtgtgcgaggacaacccgtgccagtacggtggaacctgcgtacaatttccgggcagcggttacctctgcctgtgtccgctgggcaagcacggccactattgcgagcacaatcttgaagtggccctgccatccttctccggcagcgtcaatggactctcctcgtttgtggcctacacggtgccgattcccctcgagtattcgctcgagctgagcttcaaaatcctgccgcagaccatgtctcagatttcgctgctggccttcttcgggcagtcgggttatcacgacgagaagagcgatcacctggcggtgagcttcatccagggctacataatgctcacctggaatctgggagccgggccccgtcgcatattcacacagaaacccattgatttccggctggatgctccccgggttccgtacgagattaaggtgggccggattggaagacaggcctggctctcggtggatggaaagttcaatattacgggtcgatcgcccggaagtggcagtcggatggatgtgttgcctattctgtatctcggcggtcacgagatagccaatttcaatacgctgccacacgatttgccactgcattcgggattccagggatgcatatacgatgtacagctgaaggcgggacaggtcacggtgcccctccaggagacgcgcggggtcagaggtcggggcgtgggtcaatgtggaaccagggaatgccatcgccatgcctgccagcacgatggcgcctgcctgcagcatggagcaacctttacttgcatctgccaggagggctggtatgggccactgtgtgcccagcccacgaatccctgtgactccttcaacaacaaatgctacgaggacgccacctgtgtgccgctggtcaatggctacgaatgcgattgtcctgtaggacgcacaggcaaaaactgcgaggaggtaattcgatccctgagcgacgtatccctgactggcagacgatcctatctggcggttcgctggccatatctatacgatggcggggataaactgggcgctaagcgctcccaaatggtcagctaccggaacttcaccaagaaactaatgcccccgaagcccattaccacgcccagcagccactttgtgatgaaactgctgaatgaggtggagaagcagcgcagcttctcgccagttcccctgatgggatcgaagtccttcgaggagcaccatcgagtgcagttcttcttcatcgagttccaactgcgcccgctctcggaaagaggcctccttctgtacttcggtaccctgaacaacaatcaggacaagaagataggattcgtgtcgctatcgctgcagggcggagtggtggagttccggatttccgggcccagcaatcatgtcacggtggtgcggagcgttcgcatgttggccatcggcgagtggcacaagatcaagatggcgcagcgcggaagatggctgaccctgtgggtggagggtagcgcctcgtcggctttggctccttcggctgaggtgctcgtcgagcccgactcactgctctacattggcgggctgaaggatgtgtccaagctgccgcacaacgccatctccggtttcccgattccgttcaggggatgtgtccggggtctggtggtcagtggaactcgcattgtgctcaacgaaaccaacattgtggaatcgcgcaacattcgagactgtgatggcaccgcttgtggcggagactcctgcgagtccggaggacattgctggctggacgagaagctgcagccgcattgcatctgtccggagtacgcgaaaggagatcgatgcgagtactcggagacctgcaagctcattccgtgcaaaaacaatggaagatgcctgagaagtggacgctgctcgtgtccaaatggatggggtggcttctactgcgagattgccatgagcaagccgacgacgccgagcttccgtggcaacagttacctgatcttgccgccgccgcgaattccgatgaaagacaagcggcggggaccctccctgtacgtccgcccccgcgaagccatccaagtctcgctgaacttctccaccatcgaaccggacggactgctcctgtggagcgagcacgagaggagcaagttcctcggcctgggcctggaggcgggccacctcaagctggccagcaacctcctgggcagcaccaacgacacggtccgtgctccggccagcggattcatagccgacggagcctggcactggaccagcgtcctgctggaccggtccaggctggagctgcagctggacggcgaggtgatcttcacggagcgattgcccgagggcggacggtcactgggctcgaccacgccgagaagcactctggcgggcaggcgcaagaattcgagcaaggagccaacaattagctacgaggatgtcttctacttgggcggctttcccaactcggactcggtgagcaggcgcacaaagggtcgcttcttcgatcccttcaagggctgcctgcaggatatccagttcggagccgagcccacagcgattatcagcgacttctcgacgtaccagggcgagaacattggatcctgtgatctgcacggcgatgagccgcttactgtatag

SEQ ID NO: 16164 - protein, 1039 aa, DROSOPHILA
MHCSTIRLDFSRNYTHCNASLLVNDTLAMSGDQPTWLKLLPPRLHTPEAILNTWLHLGGAPQAPIGLIIELPPAQSGSGFTGCLHTLRINGQAREIFGQPDEKDISKELGGRSDALDGFGITECGSLACLSSPCRNGAACIKIETNDLDENGEKAEKWKCKCPTGYMGPTCEISVCEDNPCQYGGTCVQFPGSGYLCLCPLGKHGHYCEHNLEVALPSFSGSVNGLSSFVAYTVPIPLEYSLELSFKILPQTMSQISLLAFFGQSGYHDEKSDHLAVSFIQGYIMLTWNLGAGPRRIFTQKPIDFRLDAPRVPYEIKVGRIGRQAWLSVDGKFNITGRSPGSGSRMDVLPILYLGGHEIANFNTLPHDLPLHSGFQGCIYDVQLKAGQVTVPLQETRGVRGRGVGQCGTRECHRHACQHDGACLQHGATFTCICQEGWYGPLCAQPTNPCDSFNNKCYEDATCVPLVNGYECDCPVGRTGKNCEEVIRSLSDVSLTGRRSYLAVRWPYLYDGGDKLGAKRSQMVSYRNFTKKLMPPKPITTPSSHFVMKLLNEVEKQRSFSPVPLMGSKSFEEHHRVQFFFIEFQLRPLSERGLLLYFGTLNNNQDKKIGFVSLSLQGGVVEFRISGPSNHVTVVRSVRMLAIGEWHKIKMAQRGRWLTLWVEGSASSALAPSAEVLVEPDSLLYIGGLKDVSKLPHNAISGFPIPFRGCVRGLVVSGTRIVLNETNIVESRNIRDCDGTACGGDSCESGGHCWLDEKLQPHCICPEYAKGDRCEYSETCKLIPCKNNGRCLRSGRCSCPNGWGGFYCEIAMSKPTTPSFRGNSYLILPPPRIPMKDKRRGPSLYVRPREAIQVSLNFSTIEPDGLLLWSEHERSKFLGLGLEAGHLKLASNLLGSTNDTVRAPASGFIADGAWHWTSVLLDRSRLELQLDGEVIFTERLPEGGRSLGSTTPRSTLAGRRKNSSKEPTISYEDVFYLGGFPNSDSVSRRTKGRFFDPFKGCLQDIQFGAEPTAIISDFSTYQGENIGSCDLHGDEPLTV

SEQ ID NO: 16165 - DNA, 4139 bp, DROSOPHILA
gatattgtcgacagtaattgtgaagttgtttcttccggccatcggaaattaaaagccatttaattttttttttgtggcgaacaggacagtgatataaagtgaattaagtccttcgaccatttttaatacttactcaatagttattgggtgagtagggatcagttattattgatacgacatatttgtgtcgatatgaaccatttagttagcacatcatagacccttcaattcgaccactgtttcaaaatgtttcaatatttctgagtgccgactactcgctccttatccctgattcatttattgattagtgctgctcattatgccggcactgagtcttctgcttgcccacaactaatcaccgaaatgcccaaaatgttgagactgtccactgctggcacttgtcacagtttctccatccgcacgagtgtctcttgattgtgtgggcagctctggtcataaatttaatatgacacctgcaggacgcaggagtacacaccccaccccacactccccactccccactcaccactccgcccctgccaaatgcattattcacacatattttgctaattagcaaaatattgtaaatgtttggatttatgcaggcaactcacacacactcaaatgcatcggttgggggctgttggcctgtgggctgtgtgctgctggccatcggagaagtgcatcaaactggaccgcaatggcttttggtcggctcacatggctggccagctccccatgccatcctcctccgactcctccttctccgcctcctcccccagctccaccacctgtgtcgcctgtgttgatttaatgcccatggtgtcggattctgggataactgagcagtagccttgggtggcgaacgggatgggggtctttgcggctgccataaattttggtttggctttcaatcgagcgattggagcgggtgagtttaattgaatattctgctgacggaacggcaggctgcgttgtttattcccgcatcgaatcgtgtttacattaggcgcgactcgactggatcgacttgcaatcggacgccgtcgctgggcaggagtatcaaattcctcttggtcaccttcagctgagttggcgatccgggcggcaggctgaagcggaagcggcggagcagcgtgatcaggcccaccttcacctgcatccgtccaaaccgcaggccaatgcagttgcgcggtccgtcgccgaagcccaggaaggcagtgggatgacgctcccggcaggcatccggtgcaaatcgctccggccggaactcgtggggctccgggtacacttcggggtcgtagtggatggccagcaccggaatgtgcacactggtgcccttctccaggacgacggggtcgccgccatcgggcgaggggatctcatagtcctcggaggcgagacgtgtaagtgaactaagagccgggtacttgcgcagagtttctggaatgaaaatggagtttggtgagtacaaatatcaaaatcagcagccttatatatatttaatataaaattatatatttaaacataatctatactatagctgccattgaaaagagggtgtaaaattttccaatgtgtattatctttcatttatttgcagtcaactcatttatttcgatttcgttctgttacttgagcagttttaatgctatcagatgaaaccttgggaattgtgtttatgttttttctgatcaaggtacatttttttcccgaatccgctgttatagaacccatgggctcgaattgtatacatgagtattatttatccagatatttgattcgcttacagcgcgttcatttgaaaagaaaagatttcgaagaaaaccttttccacccgataagctttatgtatttatttacaaattttcctataccttggtactcaagtaatcgtgtcactttcacactactggtgtccatgggacgacgttgttcagtgtcaaatcatttctggaatggcttatctctagtagataagacagcttcagacttgctatctccaaatgaaagaaacccaccatatatacatacctgtgatggtctggtccaagtagggcatctccatcatggcctcgtaggttagtttcccgtgcttgcctatcgaatcgtttatctccatacgcagcttctgctgcacatcttggtttttggccaactcgaatagggcgtagctcatgttgctggaactggtttcgaatccggccacgaagaatacaaaggcctgggcggccatctgctccatggtgagtccttttccgcctgagatccagcagcagatccatgaagtcattccgacgtatgttctcgcgctccctcaactccaccgtttcgcggactatgcggttgaagaacttggtgatatccgggtgaaggatacgcaccggaaggccgagcttggccagcgagctgaggtaggtcatcttaaagatgcgccaacggatacttctgttgctgttccggaagatccgacgccccacctggcggaactccgcctgcggttccctcaggctgctgcactcggttccaaaggcgcagcttccaatcacgtcggtggtgtagcgggccatcagatcatggagctccagaacagcgccctaatatcgcgatgatttcaatttatagggaaatatatacgagtcatttactgtacctgtgaccccaccagttcgtcgaaggtaccgcccagctgctgggccaccgtggatacagttccaaacatgtacttcattttcccactagtgaaagtgggcgacaacttggtacgcaggttacgccactcctcgccctgcaggttgaacaagttggcggtgaggggatcgccgtgaaagcttcgccggtccacgaagttgttaaaatcccggatgagcaccgccttgaccaggtccagatccaaaacgacggccattggtcgcaggaagacgtaggtgcccgccaccttagcactgcccctgaaggcatcgtaggtctcctggagcagctcgctgtagtgcaccgactgcagcctgaagaagtgaccaaagaggaagtgcggccgcagctgtggaatcccccgcagttcccagtaggtgaagcggtagcgcagataacccagcagaaagctgagcagcgaggtcagcagcagcagtgtgaagtccatcggaacagcagtactcaactgggcgttctgctgatcttcgagttgcttataagcaactatctatctatctggggagtatagaacgaaactatctgttcttattttacatacacccatgtacattacaataggtgtatggatatcgcgatgggtttctctctagttattattacccaacagcaacgtggcattctgcagaccttcgagtagctcataagcaattctctactaatacaatttttattttattttaaaataatctataacctagtgacatgtccatgactttacataagtttttgggcttccattacaggaaacggtcgaataaactggtttttattttgcaatgcaatgcagtttgtgcagacagcttaagaccttgttaaaaagtcttaagatttctgttttaaagaacattagtacatgtaaattccagtccaactctacgcggttcgagttcgaaaaagctctaatggttactgacttcgatgacgaaaagcttttggtggttgttgcctcggctatgaaaacccctaatttcttttcaaaaataatggtttctaaagcgcgaaaacaggtcctgttaagtaaattaatattactacatattatttgatttgttactaatttttggctccgacagtcactagaaattatgtcgtcttgaaaattactgacaaaaagtccatctagctggcaaaaaagatggttagaggagggaaaaagtgcactgcatacgaaagaaggcaggacaaaaagcataccatatcaaagcgaaaaaaaagaaagccagtatccacaatggaagcggttggctaagtgaaacaaaaactggctcaatgctttttgttaaaggtcagagttggctttaaccttagtccgatgaaagtgcagccgcaaagtgtatgcactgttctcatttaaaatgttgtcaaatattaatgttgaacatttattgcggctttacatcattaagccgatcaatgtcgtacgtgcg

SEQ ID NO: 16166 - DNA, 1455 bp, DROSOPHILA
atggacttcacactgctgctgctgacctcgctgctcagctttctgctgggttatctgcgctaccgcttcacctactgggaactgcgggggattccacagctgcggccgcacttcctctttggtcacttcttcaggctgcagtcggtgcactacagcgagctgctccaggagacctacgatgccttcaggggcagtgctaaggtggcgggcacctacgtcttcctgcgaccaatggccgtcgttttggatctggacctggtcaaggcggtgctcatccgggattttaacaacttcgtggaccggcgaagctttcacggcgatcccctcaccgccaacttgttcaacctgcagggcgaggagtggcgtaacctgcgtaccaagttgtcgcccactttcactagtgggaaaatgaagtacatgtttggaactgtatccacggtggcccagcagctgggcggtaccttcgacgaactggtggggtcacagggcgctgttctggagctccatgatctgatggcccgctacaccaccgacgtgattggaagctgcgcctttggaaccgagtgcagcagcctgagggaaccgcaggcggagttccgccaggtggggcgtcggatcttccggaacagcaacagaagtatccgttggcgcatctttaagatgacctacctcagctcgctggccaagctcggccttccggtgcgtatccttcacccggatatcaccaagttcttcaaccgcatagtccgcgaaacggtggagttgagggagcgcgagaacatacgcggaaaaggactcaccatggagcagatggccgcccaggcctttgtattcttcgtggccggattcgaaaccagttccagcaacatgagctacgccctattcgagttggccaaaaaccaagatgtgcagcagaagctgcgtatggagataaacgattcgataggcaagcacgggaaactaacctacgaggccatgatggagatgccctacttggaccagaccatcacagaaactctgcgcaagtacccggctcttagttcacttacacgtctcgcctccgaggactatgagatcccctcgcccgatggcggcgaccccgtcgtcctggagaagggcaccagtgtgcacattccggtgctggccatccactacgaccccgaagtgtacccggagccccacgagttccggccggagcgatttgcaccggatgcctgccgggagcgtcatcccactgccttcctgggcttcggcgacggaccgcgcaactgcattggcctgcggtttggacggatgcaggtgaaggtgggcctgatcacgctgctccgccgcttccgcttcagcctgccgcccggatcgccaactcagctgaaggtgaccaagaggaatttgatactcctgcccagcgacggcgtccgattgcaagtcgatccagtcgagtcgcgcctaatgtaa

SEQ ID NO: 16167 - protein, 484 aa, DROSOPHILA
MDFTLLLLTSLLSFLLGYLRYRFTYWELRGIPQLRPHFLFGHFFRLQSVHYSELLQETYDAFRGSAKVAGTYVFLRPMAVVLDLDLVKAVLIRDFNNFVDRRSFHGDPLTANLFNLQGEEWRNLRTKLSPTFTSGKMKYMFGTVSTVAQQLGGTFDELVGSQGAVLELHDLMARYTTDVIGSCAFGTECSSLREPQAEFRQVGRRIFRNSNRSIRWRIFKMTYLSSLAKLGLPVRILHPDITKFFNRIVRETVELRERENIRGKGLTMEQMAAQAFVFFVAGFETSSSNMSYALFELAKNQDVQQKLRMEINDSIGKHGKLTYEAMMEMPYLDQTITETLRKYPALSSLTRLASEDYEIPSPDGGDPVVLEKGTSVHIPVLAIHYDPEVYPEPHEFRPERFAPDACRERHPTAFLGFGDGPRNCIGLRFGRMQVKVGLITLLRRFRFSLPPGSPTQLKVTKRNLILLPSDGVRLQVDPVESRLM

SEQ ID NO: 16168 - DNA, 4081 bp, DROSOPHILA
ccgcagctgccacaaactcaatttgattttaataaccatattcatatatatacagttagccaaatgaatataataataaatgttacaaatcaaaattgaaaacttcaagtttttagtgactattcaagtgccttgagatttgaagtttactcataataataatatattgtttttaataaataatatgcaatttttcaatgtgtctatcaatattcttatgacacagcaatttaattacttttttaaacaaaatcaacttcaaatcgctgttgcaacattaaaaagttttaatgagcaatttaattgtctgtattttggatgatcaactaactaatactgtgttgttaacaaggtgtctccttcggatctagtttaaatacaattactcaccagctcgatgatcttcagcaagaggcgattgttgaactccatgacgctcggttgagatttcgctttcgttggcttttatggaatggaactggattgggtcgactggatgcgcttgattttgctggtgcgtgttgatgccacggcgtacgcaagtgaactggccaactgctctgccgccactcgctttcaaagctccagtggcgtcgacgtcggcagcgctgtcggcggcggcagcggcgtcaggcaggcaaagttaatgcccatgtttttgtttaccttcggaaaacgcaattagctcggatttatgagcacatccgtcgacggaagaggttaaaggatattctcgtatagcattactcataatttaaccgcttttgaaaaggacatttcaacaataggatggttaaatgagaacttttccatatgactgtactttgaattcacacacctgcatattgccaaagtaaaaatcagatttcataaattatcttataagctgtatattcacaagtccttattttagaatcgaatcactatagacagtccgaaagatcgacttagaaattaagttaatgaaaaaaacagaagcacaaataaactatttagccaactatatcgatgcgcccacataggccagtgcccgttccgcctcaaacgcggcgacatattgaggctctagggtgctgagagcccgctgggtgagcagggagatgttcttcgcctcgccgtgatctcgctcgaaggcgagatactccacccaaacgcgcggctgtgtcttgccgaaatagcaggccataaagtcgtagcacatgcgccagtatttcaggctggcctggtcctgcaacagataaagtaaattagttgcgcctcgcaattatatgccaaagtagcaaagataacaaaacatacacaagctgccgcactggactccagctgaaccatttggcggtgcagcgccaacgacatgggcggtagaatggccagcttggcgtactccttgcgtgcttcctcgacagaccgctcctgccacagatagcgcaaataatcggagcgcagctcaccaaattccggccacgcagccttgcaggcgagaccgtagatctcatccagccggcgtgcgcccaagctatcctgccgagtgcgataatacagaatgacactgcgccacagcggcaacgcctcactgcccatgctcttctggatcttgttgaatagctcatagatcaagggctcactgtcgctttgaatgtgcgtggccagaagaagctcgtgcatctccaccgatgaatcgtttttcagggcttccgtgagtatggtgacagctgcctcccttccactcggagcagtgcagagcatctttcttaatgtggcatagtgtttcacgcccatcaactgagagcgatggcccgcctgcaaggcatccgctaggcactgttgctttagtatacgctccgtctttccatcgctattgagtgccagcatggcatccaaatacatattccacatttctgtcgtttgcagctcctccaccgccgatttgtatacagtaacgcagagttgaatgcgtcgcttgagagagcggccatttacggaacgagatttcttgctggccggctcttcgtcactggtatccaagtcctcctcctccaggtcgcccagatgaaagccgcgcaactctcgctgggcaagcaaatcccacaggcccggctcccgggggaacttctcttgcatatcatcgattatcattcgctgcagcttgcccgtcagctcctgatgatcctcacagctttctagaagcttaacaaagtagtccaattgggtaatattggccatgctgttgcggtagaccgcctccacgcgttccaatttgatgtcctgttccgagagcgtattctcggctaaattgcgttcgttgctggccagggcagcctctttcagcataatgtcaaagaagcacttgttaagtgcctcggaatccggatgtctctgcaagccacgcagcaggatgtccttgactcgatcgatgttgagccgattgaactcgtacagccataaggcggcgtccacccaaagatccggcgagtcgccatggtactgcaaaagaataacaacaatggataagtaatcaatggaagtgagcaggctggcaaatactaaccagcagcatcttctcgtatatgcccgccacctcgacaggatttgacttcctgctgaacttgatccagttgctccacagccgtctgtcgtggttaaacttagccaaggcctctctgtacaggcgcatgatccgcgtggctatggaggcctttagaccggtgagtttaacgtgcatcttcttttccttgtccacgatggtcatgtgcatgtgcttctcgtacagtatgaagtccaggtagtcggtgatgctctggtggctcttgttgatcttaaggaacaagcgttcccgcctgctaacgatttctctgcaagaatatggatgaaatgggggcacagactccaaattcgtttggatttctcacctgacctgatccgctgtgaatacgctgtagttcttcatctgctcgtattccggcagcaggcgctcctgcatctcagctatgaactcggccatatttgcttagttttctccttaatcgtacttagtaatattgtttatttctttaaaaactagcgcacgtgcaacgcaacggccgtttatcgattgtccaatttctggagagttatcgctgacagggatggtagaaagggtaatttaaaaaaaatatatatatatgtcaaaatttaaaaatggtcaagagataatgataaaattacaattgtaaagtttttaaagtttcagctttttaattaaaatgcgtttactggccaagagagcgatagttgccgatggcgagaccatggagttgccatcttgatttcttcttcttcttcaatctctttaatcgcacgtataaataagttttggacgccaagaaaataacaaaattcgcagttggaataacacaattagcgtaaaagcacaatggccgaattctcagtggaacgcgtcgaggacaagcgaacggtgaacggacgaacggaatactatctaaagtggaagggctatccgcgcagcgaaaacacctgggagccggtggagaatctcgactgtccagacctgatagccaacttcgaggagtcgctgaagaacaacaagaaggagacaaagaaacgcctgtccacctcctccacacccgaatccatacgcagcaagcgcaagagcttcctggaggacgataccgaggagcagaagaagctgatcggctttgagcgcggtctggaggcatcaaaaatactgggcgccaccgactcatccgggcacctaatgttcctcatgaagtggaagggcagcgatcacgccgaccttgtgcccgccaagctggccaacactcgatgcccccaggtggtcatacagttctatgaggagcgcctcacctggcacacgggcagcggcaatggtaatgggaatacgaattccgtcaatttgggatcatccggtggcctgggctccgtcggcggcagtggggccggcgatgatactgctcccggcagcgttggcaccaccggtggcggcagcaatatagatggcggtgacgaggaggatcccgaaccggccagccccattggcagcatcaatcaagacgagaatatc

SEQ ID NO: 16169 - DNA, 1889 bp, DROSOPHILA
gccgttgcgttgcacgtgcgctagtttttaaagaaataaacaatattactaagtacgattaaggagaaaactaagcaaatatggccgagttcatagctgagatgcaggagcgcctgctgccggaatacgagcagatgaagaactacagcgtattcacagcggatcaggtcagagaaatcgttagcaggcgggaacgcttgttccttaagatcaacaagagccaccagagcatcaccgactacctggacttcatactgtacgagaagcacatgcacatgaccatcgtggacaaggaaaagaagatgcacgttaaactcaccggtctaaaggcctccatagccacgcggatcatgcgcctgtacagagaggccttggctaagtttaaccacgacagacggctgtggagcaactggatcaagttcagcaggaagtcaaatcctgtcgaggtggcgggcatatacgagaagatgctgctgtaccatggcgactcgccggatctttgggtggacgccgccttatggctgtacgagttcaatcggctcaacatcgatcgagtcaaggacatcctgctgcgtggcttgcagagacatccggattccgaggcacttaacaagtgcttctttgacattatgctgaaagaggctgccctggccagcaacgaacgcaatttagccgagaatacgctctcggaacaggacatcaaattggaacgcgtggaggcggtctaccgcaacagcatggccaatattacccaattggactactttgttaagcttctagaaagctgtgaggatcatcaggagctgacgggcaagctgcagcgaatgataatcgatgatatgcaagagaagttcccccgggagccgggcctgtgggatttgcttgcccagcgagagttgcgcggctttcatctgggcgacctggaggaggaggacttggataccagtgacgaagagccggccagcaagaaatctcgttccgtaaatggccgctctctcaagcgacgcattcaactctgcgttactgtatacaaatcggcggtggaggagctgcaaacgacagaaatgtggaatatgtatttggatgccatgctggcactcaatagcgatggaaagacggagcgtatactaaagcaacagtgcctagcggatgccttgcaggcgggccatcgctctcagttgatgggcgtgaaacactatgccacattaagaaagatgctctgcactgctccgagtggaagggaggcagctgtcaccatactcacggaagccctgaaaaacgattcatcggtggagatgcacgagcttcttctggccacgcacattcaaagcgacagtgagcccttgatctatgagctattcaacaagatccagaagagcatgggcagtgaggcgttgccgctgtggcgcagtgtcattctgtattatcgcactcggcaggatagcttgggcgcacgccggctggatgagatctacggtctcgcctgcaaggctgcgtggccggaatttggtgagctgcgctccgattatttgcgctatctgtggcaggagcggtctgtcgaggaagcacgcaaggagtacgccaagctggccattctaccgcccatgtcgttggcgctgcaccgccaaatggttcagctggagtccagtgcggcagcttgtgaccaggccagcctgaaatactggcgcatgtgctacgactttatggcctgctatttcggcaagacacagccgcgcgtttgggtggagtatctcgccttcgagcgagatcacggcgaggcgaagaacatctccctgctcacccagcgggctctcagcaccctagagcctcaatatgtcgccgcgtttgaggcggaacgggcactggcctatgtgggcgcatcgatatag

SEQ ID NO: 16170 - protein, 602 aa, DROSOPHILA
MAEFIAEMQERLLPEYEQMKNYSVFTADQVREIVSRRERLFLKINKSHQSITDYLDFILYEKHMHMTIVDKEKKMHVKLTGLKASIATRIMRLYREALAKFNHDRRLWSNWIKFSRKSNPVEVAGIYEKMLLYHGDSPDLWVDAALWLYEFNRLNIDRVKDILLRGLQRHPDSEALNKCFFDIMLKEAALASNERNLAENTLSEQDIKLERVEAVYRNSMANITQLDYFVKLLESCEDHQELTGKLQRMIIDDMQEKFPREPGLWDLLAQRELRGFHLGDLEEEDLDTSDEEPASKKSRSVNGRSLKRRIQLCVTVYKSAVEELQTTEMWNMYLDAMLALNSDGKTERILKQQCLADALQAGHRSQLMGVKHYATLRKMLCTAPSGREAAVTILTEALKNDSSVEMHELLLATHIQSDSEPLIYELFNKIQKSMGSEALPLWRSVILYYRTRQDSLGARRLDEIYGLACKAAWPEFGELRSDYLRYLWQERSVEEARKEYAKLAILPPMSLALHRQMVQLESSAAACDQASLKYWRMCYDFMACYFGKTQPRVWVEYLAFERDHGEAKNISLLTQRALSTLEPQYVAAFEAERALAYVGASI

SEQ ID NO: 16171 - DNA, 6580 bp, DROSOPHILA
gagcgtcactgctgttatttaaatgaaaaaatacgaagccattaagcccaaaactgcattgcgttttattcatatttcccgatcggcatttcgtaatgcagcttaattgttatcaacggcagcttcatcggtcggtcggctcatcattatcgcattgccagggctgagtgttcagatacacatatatatatatataaatatacatatatataaaaaatatatatttatatatatatatatacgcgattggtcgtgagagaggggatatgatttactataattttattttcaattgttgagtgtcagctattaatattattattacgcgtatatactttcgatgtgtatgtgagttttcatcgcagttattattatgactttttattgtttgcagcatttttcacgcgttctgtgggtggaaaaaaaattgctcagcttctgttccttttgcatgtttaccatggcattgtttgatgtttatcgtacaatttccttacatgctaattaattttcctgtctatctgatggtttcgaagggagtggcgggttgagaggctggggaaagtggtaaatgattgggattctttcatcggtttgtttctcatacatttatttttgttcaacatggtttttcttatatttgtgatagctatgaaatattaaataaattaaagatttctataatatatataaatatgtacaggcccttacataaaaaccgtttgtgtcttttttacaatggttgtttaattattgaaatcccattttaaggtatagtatttcgttttctcctctggctctatttacagggtaataaattttaatttatttaaagaactaaaagtatcagtctgtgtgaaccatcccaaaaagtatgctaactgcctgccactcttcacatcttttttaacttcatagtttttgtttagtttagagttttcgtttaatctttataaattcactggttgcgcagtttgtctcctgctgttttttttttttctatctctctctgcttaacctctagatttaaccccgttacgcccacaggttcttctgctgatcgtgatcctcgtcttcgtcgtcgttcaggctcaagttggactcgtagtgggtgagttccggctgtcggctgttgttgctgctgctgctcatggtcacgctgctctgggtgccactctcgaggagattgaccccaatgccgccacctccgccacagctgcagagcagctcatcgtctccaatgcaactgcaggatttcttgcagttgtacgaggcaccaccgggtggcacaaagttcgagctaaagctggatggcaatcccgaggcgggattttttccagcagccctcttggccgtgcccaggttaacacactcgcagttggcattgttccggatctgctgcttggcgtagtccacactgtcgtaggccggagcagcactgggcagatagctgggcaccgcgtactcgtgctggctcctgcgattcgcttggtggttgtggtggtgctgatgctccagggtcttggccataccggccacactgagatcccgttgctgcttcttggacagctggttcatggtgttaaatttacaagctgctgccgccgccgaggctgaagtgggtatgggcttgtacccacgacctcctccagctgcagcacactcgttgatggtcgcgtaattgttgctgccacagtccgcgtagcgggcactgggtggcggtatcaccccaccattgccggcctgatactcatgacttgtggcgtacatattcacggagggagtgcgtcccgataggcagccggataccactcgcttgttgttgttgccacgaccatttggcaggggcaaggccaggcgcagcttttgccaaaacttcttgtcgtcccactcgatgcaggtgctggtacgcagatagtgccgcatgtccatgtcaatgtcgcgctggggcagatctccatacaggatgaagaccacccgcttcctgcgcttcaccagctcgtggagagcactcttgtactcgaagcgactccactcgttgtacaggaagttcttggacagcacgagcacaaactgtttggcactttcggcggcttcgatgagggcatccgtgatgtaggcattgatgtttacatcgcggtagtgcaggcacagtcgatagccgatgtcgttttccagcgtctgggccaggatctggttgacgaagtgctcgtcctgcaggctgtaggcgaagtaggcatcattgggacgctctttgtccagctggtcaacgaatcggggtgacttgtagcagaagttcattagacagttggtggagtgggcccatatcttcagctcatggcgatagcagaagagtccgaaaatcagaccgaaaaaggccacaaaggcacaggtggccaccaggagcaggggcagcagtccctcgatctcgttggtgtgcatatagtgggctacaccatctcgcaaagtgcacttggtaccgttcttctccctcagaacactcgtagcattgttgtagatgcagctcaccctggaggcatctatgatcttctccgagctctgacccaggtagtttctgaacctggccaggtaaccacactcacagctccactggttgtcggccaagctgatctccaccaggtagggattggcacttagttgccacacctcgaagtgcatcaatcgattgccatccaatcgcaggacctccagtttcctcagcatctggaaactcccattggcgatgctggctattttgtttgattgcagatatagctccctcaggttctccagattgtggaactcgttgccctccagactgattatatgattatcctccaagtgcaggatcaacaggcgtttaaggccactgaaagtggtgttgtatatgtgggccacgttcgagttgttcgcatagagaacagccaagttcttgcgaccaaggaacgaatgtcccgccaattcaacaaagttgttgccatcgatatacaactcagaggtatccatgggcacacgtctcggcatctcagaataagctgcgcccgagcactccacaatatttgtggaccaggtttggtcatggaagcacgtgcaattcgtggggcaggtcatctcgcaatcacaagcatcgaactcacagcaatggcaaacggcgaagcaatgggtcttgtaggtgcacaaaaagtgcttgggttcagcttcgatcaggggaatataggccctctccctgttgttcagcaacttgcagtatatggtctccagatccataatccttggatattgcctcgatgttatatggttaatcttctgcagccaatcaatgttacaatcgcaggtgaagggatttccaccaatatagaactctggcagagctcgatgttcccaaactggcagaatcctcaaggacttgatgtccagcgttgtgatttggttcgcatagagatccacccgggtcagattggttttgtgcataaaggtatctggatcaacggtggttatcaggttgtcgttcaggaacagcagttcgatagagtttggtatggaactgggtccaatgcgctgaagttgattaaagctcacatcgagagtttgtagttttagctcactatccaaaccaaaacgatttgataaggaactcaaccgattcttatggaggtccagccactgcagggtggatggcacatgtccataatcaaaggattccaaacgattatcggatatattcagccacagaagggagggcatgttgctgaagaggccattgatgtcattcagctcattgccatccaaacgcacagcttgaatgctcgaggtcatctcaaaggcccccggttccacaactgctatgcggtttctggcgagattcaggatttgcaaattaggcagatccctgaaggtgtgcatcgtaatattctccaggtagttgccaatcaagcggagaccatagagatttcccagacctttaaacgcactatcctccataacggtaatcatgttctcgcccagatccacggttctcaaatggcgcatattcctcagggccagcggaactgtcttcagctgattgccattcaagttgaggtcctgcagggcactgcagttccggaaggcatccggatgcacgccaatcagcgcattattgtccagcgagagcagcgacagtacatacaatccgttcagagcatatgcatccagatacttcagtttgttgtgcgacagcagcagcgtgtgcagattattcatcggggcaaaagtgtcggctgcgatgttctccagctgattgtgacgcagattaagaatctgcagggtgtacaagtcgctgaagatctctggctccagtttggtcaacttgttgtgcgacaaattaagcagaaccagacgaatcagacccacaaaggtgttcttatcgatccaggtggaggttatctggttcatggacaggtccagggcctgcagctggtccagattcgagaagagctgcggattcagcacacttatggaattattctgcaggtacacctcttggataatcttggcttgctcagcgaagagttctgtgggcaaggccacgattttgttggagctcaggttcaggatctgcaggttcttcagtccactgagagccttgtccgcaatcatggagatgccattgttgttgaccgaaaggactcgcagcctcctcagagtgccaaatccatttgctggcagcacgacgaaatcattgtggctcacatccaggtactccaggtccagcgaacaactggtgcttgagctactgctctttttggccgattcggtggtggaggtggattcggtggaaccattggttggctccttgctgcgatccctgaagcccagctcgttgacgtcctgcaggcgattctcgctcatgttcagggcagacaactcggacagggtgcagaatatgttatccggcagggaccagatgttgttcgaactgaggtccagtctctccaacctccgagtgaccgagaaggcatccgcttctatctcgaaattcagcgctggccacaggatgttgtgcgtccggagcgtcaggttcctcagctgctccagaccatccagaacctggcgacccagtcgccccagcttgcaatactggatggacagctgctggagcctaaccagatgggcgaaagattgcgcctccaggcgactcttggccatgatttcgtcattgcacagtatgtgcagggcaatcgtgtgctcggcgggtataacactgaaattggttgtgtcaaactcgctgttcaccgtgcgcaggttgcacgttaaggctatttccggctgatccagacccgctgctggcatgaagtgacagtcgtcgggggcgtcatacagcgaagggtcaccacccgcgcccgcggtcaagggtcgcagggttcgcgccggagtcgagggctgcattagctgcgagttggagaccccagcctcacccattatcgcattcgagtgcgacagctgctgctgctggtggtgcttggtggacagcgattccgtggtgtgctgctgatcctgggccaggaccacgggcagtatgagtagcatatagtagatcattttggcgattcacggtttagctgcgtggaggcaccggaaaatgggtttgcggaggggggaaagacggtacaagcgggggtcttggggagaaacgaaaagaaaatcaattccactggctggccaaagaaaagtctgcgcacatattttcggcttctgtgctccctctactccaagccagattttctttattttcccccgattctttagttaattatgctctccgtgttttcttctctcttacacccggcacattttctagcacttggccttttctatcctctttatatttaaatttttcttttttattcgtttcggcgctttgaattactcgcttcgaagtttttgtttattacacgtcgcgttataggaacctttgatgaatttcaatttagctgcgggctcgacttctattatcactttttcatttggctgaactgaacccactttttctgggacttgagcggtgcagcagcgtcgatattttccggttcgtaatgtaacgcgcacgttggctgattttcgactgactgccgcaacgtgcgcaacttctcttttaaatggagagtcgtccacgaactcgaaaccccgaaaatccgaaaagccgaacgcgagccgaagggggctggaaaacagacgaagagcagccgacaggctctgcacgggcgggaaatgctgagagttttcggagagtatgactaaagggaaattcgctctggctcgacggatgctggaaaatgtttttctttctctccatctaatcgcatcgaacagctggcgttcgttcgtgttttccttttgattttctctgtcttttttcgtcgtatttcgtatatcctttatttttttgccgccgaatcggagatagagctccgcaccccccgccgccaaccggcgacttctctgctgtctctgttttgataatgaaaatatatgatgtgcatgggccagcgccaatcttcatacaaacgtaatttatttttatgccatgtgcatgtgtgtg

SEQ ID NO: 16172 - DNA, 4580 bp, DROSOPHILA
atgatctactatatgctactcatactgcccgtggtcctggcccaggatcagcagcacaccacggaatcgctgtccaccaagcaccaccagcagcagcagctgtcgcactcgaatgcgataatgggtgaggctggggtctccaactcgcagctaatgcagccctcgactccggcgcgaaccctgcgacccttgaccgcgggcgcgggtggtgacccttcgctgtatgacgcccccgacgactgtcacttcatgccagcagcgggtctggatcagccggaaatagccttaacgtgcaacctgcgcacggtgaacagcgagtttgacacaaccaatttcagtgttatacccgccgagcacacgattgccctgcacatactgtgcaatgacgaaatcatggccaagagtcgcctggaggcgcaatctttcgcccatctggttaggctccagcagctgtccatccagtattgcaagctggggcgactgggtcgccaggttctggatggtctggagcagctgaggaacctgacgctccggacgcacaacatcctgtggccagcgctgaatttcgagatagaagcggatgccttctcggtcactcggaggttggagagactggacctcagttcgaacaacatctggtccctgccggataacatattctgcaccctgtccgagttgtctgccctgaacatgagcgagaatcgcctgcaggacgtcaacgagctgggcttcagggatcgcagcaaggagccaaccaatggttccaccgaatccacctccaccaccgaatcggccaaaaagagcagtagctcaagcaccagttgttcgctggacctggagtacctggatgtgagccacaatgatttcgtcgtgctgccagcaaatggatttggcactctgaggaggctgcgagtcctttcggtcaacaacaatggcatctccatgattgcggacaaggctctcagtggactgaagaacctgcagatcctgaacctgagctccaacaaaatcgtggccttgcccacagaactcttcgctgagcaagccaagattatccaagaggtgtacctgcagaataattccataagtgtgctgaatccgcagctcttctcgaatctggaccagctgcaggccctggacctgtccatgaaccagataacctccacctggatcgataagaacacctttgtgggtctgattcgtctggttctgcttaatttgtcgcacaacaagttgaccaaactggagccagagatcttcagcgacttgtacaccctgcagattcttaatctgcgtcacaatcagctggagaacatcgcagccgacacttttgccccgatgaataatctgcacacgctgctgctgtcgcacaacaaactgaagtatctggatgcatatgctctgaacggattgtatgtactgtcgctgctctcgctggacaataatgcgctgattggcgtgcatccggatgccttccggaactgcagtgccctgcaggacctcaacttgaatggcaatcagctgaagacagttccgctggccctgaggaatatgcgccatttgagaaccgtggatctgggcgagaacatgattaccgttatggaggatagtgcgtttaaaggtctgggaaatctctatggtctccgcttgattggcaactacctggagaatattacgatgcacaccttcagggatctgcctaatttgcaaatcctgaatctcgccagaaaccgcatagcagttgtggaaccgggggcctttgagatgacctcgagcattcaagctgtgcgtttggatggcaatgagctgaatgacatcaatggcctcttcagcaacatgccctcccttctgtggctgaatatatccgataatcgtttggaatcctttgattatggacatgtgccatccaccctgcagtggctggacctccataagaatcggttgagttccttatcaaatcgttttggtttggatagtgagctaaaactacaaactctcgatgtgagctttaatcaacttcagcgcattggacccagttccataccaaactctatcgaactgctgttcctgaacgacaacctgataaccaccgttgatccagatacctttatgcacaaaaccaatctgacccgggtggatctctatgcgaaccaaatcacaacgctggacatcaagtccttgaggattctgccagtttgggaacatcgagctctgccagagttctatattggtggaaatcccttcacctgcgattgtaacattgattggctgcagaagattaaccatataacatcgaggcaatatccaaggattatggatctggagaccatatactgcaagttgctgaacaacagggagagggcctatattcccctgatcgaagctgaacccaagcactttttgtgcacctacaagacccattgcttcgccgtttgccattgctgtgagttcgatgcttgtgattgcgagatgacctgccccacgaattgcacgtgcttccatgaccaaacctggtccacaaatattgtggagtgctcgggcgcagcttattctgagatgccgagacgtgtgcccatggatacctctgagttgtatatcgatggcaacaactttgttgaattggcgggacattcgttccttggtcgcaagaacttggctgttctctatgcgaacaactcgaacgtggcccacatatacaacaccactttcagtggccttaaacgcctgttgatcctgcacttggaggataatcatataatcagtctggagggcaacgagttccacaatctggagaacctgagggagctatatctgcaatcaaacaaaatagccagcatcgccaatgggagtttccagatgctgaggaaactggaggtcctgcgattggatggcaatcgattgatgcacttcgaggtgtggcaactaagtgccaatccctacctggtggagatcagcttggccgacaaccagtggagctgtgagtgtggttacctggccaggttcagaaactacctgggtcagagctcggagaagatcatagatgcctccagggtgagctgcatctacaacaatgctacgagtgttctgagggagaagaacggtaccaagtgcactttgcgagatggtgtagcccactatatgcacaccaacgagatcgagggactgctgcccctgctcctggtggccacctgtgcctttgtggcctttttcggtctgattttcggactcttctgctatcgccatgagctgaagatatgggcccactccaccaactgtctaatgaacttctgctacaagtcaccccgattcgttgaccagctggacaaagagcgtcccaatgatgcctacttcgcctacagcctgcaggacgagcacttcgtcaaccagatcctggcccagacgctggaaaacgacatcggctatcgactgtgcctgcactaccgcgatgtaaacatcaatgcctacatcacggatgccctcatcgaagccgccgaaagtgccaaacagtttgtgctcgtgctgtccaagaacttcctgtacaacgagtggagtcgcttcgagtacaagagtgctctccacgagctggtgaagcgcaggaagcgggtggtcttcatcctgtatggagatctgccccagcgcgacattgacatggacatgcggcactatctgcgtaccagcacctgcatcgagtgggacgacaagaagttttggcaaaagctgcgcctggccttgcccctgccaaatggtcgtggcaacaacaacaagcgagtggtatccggctgcctatcgggacgcactccctccgtgaatatgtacgccacaagtcatgagtatcaggccggcaatggtggggtgataccgccacccagtgcccgctacgcggactgtggcagcaacaattacgcgaccatcaacgagtgtgctgcagctggaggaggtcgtgggtacaagcccatacccacttcagcctcggcggcggcagcagcttgtaaatttaacaccatgaaccagctgtccaagaagcagcaacgggatctcagtgtggccggtatggccaagaccctggagcatcagcaccaccacaaccaccaagcgaatcgcaggagccagcacgagtacgcggtgcccagctatctgcccagtgctgctccggcctacgacagtgtggactacgccaagcagcagatccggaacaatgccaactgcgagtgtgttaacctgggcacggccaagagggctgctggaaaaaatcccgcctcgggattgccatccagctttagctcgaactttgtgccacccggtggtgcctcgtacaactgcaagaaatcctgcagttgcattggagacgatgagctgctctgcagctgtggcggaggtggcggcattggggtcaatctcctcgagagtggcacccagagcagcgtgaccatgagcagcagcagcaacaacagccgacagccggaactcacccactacgagtccaacttgagcctgaacgacgacgaagacgaggatcacgatcagcagaagaacctgtgggcgtaacggggttaaatctagaggttaagcagagagagata

SEQ ID NO: 16173 - protein, 1514 aa, DROSOPHILA
MIYYMLLILPVVLAQDQQHTTESLSTKHHQQQQLSHSNAIMGEAGVSNSQLMQPSTPARTLRPLTAGAGGDPSLYDAPDDCHFMPAAGLDQPEIALTCNLRTVNSEFDTTNFSVIPAEHTIALHILCNDEIMAKSRLEAQSFAHLVRLQQLSIQYCKLGRLGRQVLDGLEQLRNLTLRTHNILWPALNFEIEADAFSVTRRLERLDLSSNNIWSLPDNIFCTLSELSALNMSENRLQDVNELGFRDRSKEPTNGSTESTSTTESAKKSSSSSTSCSLDLEYLDVSHNDFVVLPANGFGTLRRLRVLSVNNNGISMIADKALSGLKNLQILNLSSNKIVALPTELFAEQAKIIQEVYLQNNSISVLNPQLFSNLDQLQALDLSMNQITSTWIDKNTFVGLIRLVLLNLSHNKLTKLEPEIFSDLYTLQILNLRHNQLENIAADTFAPMNNLHTLLLSHNKLKYLDAYALNGLYVLSLLSLDNNALIGVHPDAFRNCSALQDLNLNGNQLKTVPLALRNMRHLRTVDLGENMITVMEDSAFKGLGNLYGLRLIGNYLENITMHTFRDLPNLQILNLARNRIAVVEPGAFEMTSSIQAVRLDGNELNDINGLFSNMPSLLWLNISDNRLESFDYGHVPSTLQWLDLHKNRLSSLSNRFGLDSELKLQTLDVSFNQLQRIGPSSIPNSIELLFLNDNLITTVDPDTFMHKTNLTRVDLYANQITTLDIKSLRILPVWEHRALPEFYIGGNPFTCDCNIDWLQKINHITSRQYPRIMDLETIYCKLLNNRERAYIPLIEAEPKHFLCTYKTHCFAVCHCCEFDACDCEMTCPTNCTCFHDQTWSTNIVECSGAAYSEMPRRVPMDTSELYIDGNNFVELAGHSFLGRKNLAVLYANNSNVAHIYNTTFSGLKRLLILHLEDNHIISLEGNEFHNLENLRELYLQSNKIASIANGSFQMLRKLEVLRLDGNRLMHFEVWQLSANPYLVEISLADNQWSCECGYLARFRNYLGQSSEKIIDASRVSCIYNNATSVLREKNGTKCTLRDGVAHYMHTNEIEGLLPLLLVATCAFVAFFGLIFGLFCYRHELKIWAHSTNCLMNFCYKSPRFVDQLDKERPNDAYFAYSLQDEHFVNQILAQTLENDIGYRLCLHYRDVNINAYITDALIEAAESAKQFVLVLSKNFLYNEWSRFEYKSALHELVKRRKRVVFILYGDLPQRDIDMDMRHYLRTSTCIEWDDKKFWQKLRLALPLPNGRGNNNKRVVSGCLSGRTPSVNMYATSHEYQAGNGGVIPPPSARYADCGSNNYATINECAAAGGGRGYKPIPTSASAAAAACKFNTMNQLSKKQQRDLSVAGMAKTLEHQHHHNHQANRRSQHEYAVPSYLPSAAPAYDSVDYAKQQIRNNANCECVNLGTAKRAAGKNPASGLPSSFSSNFVPPGGASYNCKKSCSCIGDDELLCSCGGGGGIGVNLLESGTQSSVTMSSSSNNSRQPELTHYESNLSLNDDEDEDHDQQKNLWA

SEQ ID NO: 16174 - DNA, 4478 bp, DROSOPHILA
taacaagacacattcaattttgaactcttaaggcattgaaaagtttatttttttttgcagtgcggcaaggatctgttgttatctacctaggtttgttggctttcattgcaattgtcgattgccaggaaaacaataatctcgtggtaaatgtgccgatcggttaaccagtataatgtctaggaaaataattttttacatttctagtccatagtaaccgaccactctatacaatgcccaccatttgacgatcccaaccataatgtgatgttgccatatcccaatgactgtagcaagtattacgtatgccaaaaaggacgagcctatgagcaacagtgtcctctgaatttgttctggagccagatgacctaccgctgtgactacaaggagtactccaactgcaatacgtatattccaagtcccaaccatgatgttgaggtcatatttagtgcatatcccggagattgcaggcgattctacgagacacgtatccttcgctgtgagcaaaacctccagtggagttcagtataccagagatgcgttgtcccacagtatggcgattgtcagaactctcctgtgaccgtgccacccgtagtcccctttaccccactgcctacctatccacccgttccaaccgttcccgcaaccgtgataccttatgatcccatgcccaccgctggtactccaccgcctataactcccatggaatctttacctctgccaattgacgtccaatcattgtgcaataacagtcctcccaatgcgtacattccttatccgggcagttgtaagaagtttatacattgcggaccaacagcaaccattctttcatgcgcaggctcctcgaattggaatcctgcccagcatgcctgcaccacttacagcaatgggtgccaggcttctttaaattgaaaccagagctttacccaatcaaacagaagacatgaagttacaacattttaataattacttttacaaaagcattcaataaaagatattgtgattacaattctgtaacaaaacttgcaatcgtttttaaggactgccataaagaaaaccctaaatcatctgattcggttttcggtgaaatgtgcaaagcacttggattgcagccagccaggtgaggatccgtacaggtaagaatgatgggattaaattcttctccctccgggcacgcataacccaccggaatggggtcttcacaagcaatgtacttgctacagttcccaggatagggcaccagtgatccctctgccttatctgcacaaattccattcggtgaaggcttctctgtggttgttgtggtagtaggaatagttacgggtgggattgttgtagctggaatagaacagtttgcaaaccaaggagccatacacctttccaaggcggcactaaattcctgaccctcgcgacagtcataaacgataggatcgggttgaatacattgtataaacttggagcagtcatccggatagggaactagttttccctcaggagctccatcacatggatctggttctgagcccggagtacttggtgttattaccgtggttggaccttctgtgctatctgtaactgtgggggatgtagtttggatttcacgacatgcctcgggtgaaacaccaaaaccacatttcccagtccacggatcgaaatattcctcactgccacatatacccatcatatacgaattctcgtctgtgcaataaatataccattggcagttttcttggtaaggcaaattgaggccagtgctgttggaacagatttgagtatcagggctaggagttgtaaatcccggcgatgatgttgtggtctctccattggaacaatcgctagattcccactccacacatctctggagagcctcgttgaaaaacaagctctctggacagtaaaatgcaatgggaacaggactagcacacaatatgtatttgttgcatacctcgggatacgtggcatagtatccatcactctctcccgaacaaatgcccacaatatccggaggatttgtagttgtttcctcggtatttgcagtaggcaaagtcgaccatgtgggcgatggtgttgtgagcggagaggtggcttgacttgtggtggtgggggacgcggtggtaactccggattccttacacgcagtcggagacacatcgggaccacaatttccagtttgcggatcgaaccaggagttataaatgcaattcgcaacggtggactctccgtttcccatacagagaatatattgctgacaatttgtgacaagtggataggatgttccaagttcttgatcggcacaaggatccttcggcgcttgtgttgttacagcagtcgtggtagtttcgaaggattctagacaagcggtgggtgatacatttggaccgcaatcaccagtctttggatcgaaccacgcattcgatgggcattttgcagtcgttgattcaccattattcaggcatagaaggtacgactgacagtcggattttattggaaagctagcacccagttcttgatctgcacatggattaccaacactatcttccgtcgatgttggggcaacagttgttgatgatgaagtatcaatagttggtgtcgatgttggcgtggtttctcggcaagcatctggtgctatatcgggaccgcagttgccgctgatcgggttaaaccaattgtcaacggggcatggtaaaattgtgtatgatttgttgccccagcagtagtagtattgctgacagttttcagggtctggaaagaatgttcctttctcttgatcctcgcacttcgtgaaggactcctcagcaggcgttgtggtatccaacggatctggagtagtacggtcaccatagcaccacacattatccttatcatcgcaaatattcaaatccggattgaaaagcatctcaccaggacaccgataaactttactttggtcattcacgcacaagtagaactcattacaattttccgcggagggtagcaaagtgttgtttcttgtgcccaaacaaggattttccggtggagattctgtgggtgaaggtgttggatatggcaacggttcgcagtcgacggcccctggtgtatcgcaaatttgcaaaggactgttgaaaagttttccatcgggacagtactccaaatcggcacaagaatcataacacgttatatatgcgctgcagttgtaaggatattcataaaatccattcgataatgattcacagtacgtggaattttgttgcgaggacactacgcactcatgtgagttgcgtttcgaaaatgataatatgacattttggttgacattattccatccaacactagaaggtcctttgattgaaagcacatctacaccaggtgttccccaaagccaaagaataaacgggaaaaccagacacactgcaaagaaaattatacttattcgtcagtaaaaaattatgtaatttgtataatttttggtttgacagtgaactgtattttactcacctttcattgtgtgttctatgtgattaaagactttacttttgctattaagactttaattttctacgaatgatcacggaaaagtaatccactgttaagtttaaaagttaaatatattttctttgtggttaagtttgtgtgtgaatgtcacaaagtcttggaattaactgaaatgggatcgcatttttggcactttcaacaaaaacatttttcagctgataatgactaatagtatagataacattctattggtcaaggaagtagacaattggttattaataatgtacgatgataaacatcttttcacttttgttttcgttataattaatttcggtgagatatgacaacaattaagttccccgaaagcattccaatctctatattaaacagatattgcaagtaggcacccaatgttttacattcttataaagaacggggtttattgttcgttacgtgttacctacttttaggcatcattagataatggtaatcagaagataatgataataataaatattgaagaaatattttaaggcaaattggtctagcttacccgctaaagaaggcaggtaaaagatttgcaactagatagatctaaaagtggtcgattggatgtcttagaaatatgatacttttcattcactaaagtatgaaagattttatgatagaacgtcaacccaaaacaaaaatggtcttgaacctgggcacacgttcatatgtaggaatgccacctttgatcagacgttacatatgttttatatgaactcttatcaattctgagtaagaaaataaagatagtactcatattcgagtaactctatcatatgaacagtacaatcagattctagcatttaacatactagcaaatcatgcaaattacttataaatgctactctataaaaacgcagttcaatgaatggaaagtttcagttcgataaaacactcgatagcatcacacaaaatgaagctatttggactgctctgcgtaatgttagtacttcaagaaagta

SEQ ID NO: 16175 - DNA, 2391 bp, DROSOPHILA
atgaaagtgtgtctggttttcccgtttattctttggctttggggaacacctggtgtagatgtgctttcaatcaaaggaccttctagtgttggatggaataatgtcaaccaaaatgtcatattatcattttcgaaacgcaactcacatgagtgcgtagtgtcctcgcaacaaaattccacgtactgtgaatcattatcgaatggattttatgaatatccttacaactgcagcgcatatataacgtgttatgattcttgtgccgatttggagtactgtcccgatggaaaacttttcaacagtcctttgcaaatttgcgatacaccaggggccgtcgactgcgaaccgttgccatatccaacaccttcacccacagaatctccaccggaaaatccttgtttgggcacaagaaacaacactttgctaccctccgcggaaaattgtaatgagttctacttgtgcgtgaatgaccaaagtaaagtttatcggtgtcctggtgagatgcttttcaatccggatttgaatatttgcgatgataaggataatgtgtggtgctatggtgaccgtactactccagatccgttggataccacaacgcctgctgaggagtccttcacgaagtgcgaggatcaagagaaaggaacattctttccagaccctgaaaactgtcagcaatactactactgctggggcaacaaatcatacacaattttaccatgccccgttgacaattggtttaacccgatcagcggcaactgcggtcccgatatagcaccagatgcttgccgagaaaccacgccaacatcgacaccaactattgatacttcatcatcaacaactgttgccccaacatcgacggaagatagtgttggtaatccatgtgcagatcaagaactgggtgctagctttccaataaaatccgactgtcagtcgtaccttctatgcctgaataatggtgaatcaacgactgcaaaatgcccatcgaatgcgtggttcgatccaaagactggtgattgcggtccaaatgtatcacccaccgcttgtctagaatccttcgaaactaccacgactgctgtaacaacacaagcgccgaaggatccttgtgccgatcaagaacttggaacatcctatccacttgtcacaaattgtcagcaatatattctctgtatgggaaacggagagtccaccgttgcgaattgcatttataactcctggttcgatccgcaaactggaaattgtggtcccgatgtgtctccgactgcgtgtaaggaatccggagttaccaccgcgtcccccaccaccacaagtcaagccacctctccgctcacaacaccatcgcccacatggtcgactttgcctactgcaaataccgaggaaacaactacaaatcctccggatattgtgggcatttgttcgggagagagtgatggatactatgccacgtatcccgaggtatgcaacaaatacatattgtgtgctagtcctgttcccattgcattttactgtccagagagcttgtttttcaacgaggctctccagagatgtgtggagtgggaatctagcgattgttccaatggagagaccacaacatcatcgccgggatttacaactcctagccctgatactcaaatctgttccaacagcactggcctcaatttgccttaccaagaaaactgccaatggtatatttattgcacagacgagaattcgtatatgatgggtatatgtggcagtgaggaatatttcgatccgtggactgggaaatgtggttttggtgtttcacccgaggcatgtcgtgaaatccaaactacatcccccacagttacagatagcacagaaggtccaaccacggtaataacaccaagtactccgggctcagaaccagatccatgtgatggagctcctgagggaaaactagttccctatccggatgactgctccaagtttatacaatgtattcaacccgatcctatcgtttatgactgtcgcgagggtcaggaatttagtgccgccttggaaaggtgtatggctccttggtttgcaaactgttctattccagctacaacaatcccacccgtaactattcctactaccacaacaaccacagagaagccttcaccgaatggaatttgtgcagataaggcagagggatcactggtgccctatcctgggaactgtagcaagtacattgcttgtgaagaccccattccggtgggttatgcgtgcccggagggagaagaatttaatcccatcattcttacctgtacggatcctcacctggctggctgcaatccaagtgctttgcacatttcaccgaaaaccgaatcagatgatttagggttttctttatggcagtccttaaaaacgattgcaagttttgttacagaattgtaa

SEQ ID NO: 16176 - protein, 796 aa, DROSOPHILA
MKVCLVFPFILWLWGTPGVDVLSIKGPSSVGWNNVNQNVILSFSKRNSHECVVSSQQNSTYCESLSNGFYEYPYNCSAYITCYDSCADLEYCPDGKLFNSPLQICDTPGAVDCEPLPYPTPSPTESPPENPCLGTRNNTLLPSAENCNEFYLCVNDQSKVYRCPGEMLFNPDLNICDDKDNVWCYGDRTTPDPLDTTTPAEESFTKCEDQEKGTFFPDPENCQQYYYCWGNKSYTILPCPVDNWFNPISGNCGPDIAPDACRETTPTSTPTIDTSSSTTVAPTSTEDSVGNPCADQELGASFPIKSDCQSYLLCLNNGESTTAKCPSNAWFDPKTGDCGPNVSPTACLESFETTTTAVTTQAPKDPCADQELGTSYPLVTNCQQYILCMGNGESTVANCIYNSWFDPQTGNCGPDVSPTACKESGVTTASPTTTSQATSPLTTPSPTWSTLPTANTEETTTNPPDIVGICSGESDGYYATYPEVCNKYILCASPVPIAFYCPESLFFNEALQRCVEWESSDCSNGETTTSSPGFTTPSPDTQICSNSTGLNLPYQENCQWYIYCTDENSYMMGICGSEEYFDPWTGKCGFGVSPEACREIQTTSPTVTDSTEGPTTVITPSTPGSEPDPCDGAPEGKLVPYPDDCSKFIQCIQPDPIVYDCREGQEFSAALERCMAPWFANCSIPATTIPPVTIPTTTTTTEKPSPNGICADKAEGSLVPYPGNCSKYIACEDPIPVGYACPEGEEFNPIILTCTDPHLAGCNPSALHISPKTESDDLGFSLWQSLKTIASFVTEL

SEQ ID NO: 16177 - DNA, 3257 bp, DROSOPHILA
attatcttttacgtgtaatctaagtgaatatgcagcctttagtccactgatttatatagttttagctttaacttgcaactgattgaaatcggaacatatgttccacgcctggttgacggagactttaacatacttgtgccattacttcaatcacagtgcactttctctgcctgtgtgtgcggagtcatgcgtgtgtgaactggaaaccaaaccaacgttgacctcatcaaaaggatttccaacgtctttttggtctttttgtttgcccggaccggctggcctttgactttgctgcaggggggagcttggagcaagccgagtgctgtggaaactgtgcaaatgaactttaggcctttggctttgtttgtttgcatttcggtttcccactcccaaaagccagttgaccgactccccccatgttttccacttgatgttacctaaaacatgctttattttattttggaacaatataattttgtaacttttcagacgcacaggatcagccacatcgggaaatctaatgaaaatgggcagaacttttacaccatttgctcggcatcgtccgcagctccagctctagtatcctgccccccaaaatgtatcttgtccaacaacaattgaaatcttattgagtgtcctgtcctttgcagtagaggattcgatttttgcgcacctcctttcctttgtgtttttcttgcaaattgttatttgccatcgtaagtgcccctccgcagctgcccttgcccttcttttcgtattggtttacaaaattggttaaactgtgtattggtgcaattgtacgaattgacttttgaattgcttgaaaatagtgtttggccattctacttggaaggcaaagattataactacaagccattaggtaccttgcaaaatatataacttctaacgattatcatttcaatctgcatacatatgtatacatacataaatcccctaatcaaacatctgaaattatgctggaattctaagaaagcgttttagtttctaaaccctgtcggtgtatattttaacatcactgtttttatatctaaataatttctgtacatttggagtcgccaaaaaagttttgctttgacatcttaaatctgaacggagaggactacatttgcgtctgtttaactggacccatccatggagtgggattcacatagagttgagatatggtgcctcgcagtgagtccatgccctgattgaggggcaccggcttgggcttggcgtccacattgctcatccacttcgaccaggcatcctgggccagttgccggcgctgttcctctttcaaggccttggacaacatggcgcgtcgcttctcctcgcgctgcgcctgctgctgactctgcttttttagccaccagtcctcaacgaccctgcgaatctcgtccttggacaccttgcgaatgcgtctgggtgccgtcgatgagctcggcccggatcccagcgatcccagtccggataaggacgatacgacgggattcttgcgcagtgactccaacggattcttgcgcagagctatgctggccttcatggccgcgtcttggatgtggctctccagctgcaagtttgccgcctggcgggccttgtcctttagccactgctcgtagcacatcctggccagctgcttgcgctcctccgtccgctgctgcttgaactcctgctcctccttgattcgccgctgcttctctagtaattgctgctgcttggctgagtaccagttctgataggcggcctctggttggcggtccacctgcgaaatgtgggaaataaattataattttatgtaataaaacaactcacatcctaccttaattcccttgcagtggctgagatagttgagggagctttcctgcgagctgagacacagcgagggcaccaagttgctctggatctccgatcgcttgagtccgccgagcgaccagttgtccgtagattggggcgaaggatttccaccgtcgtccttgaagaagtatgtgcgtgtggtgttctgggcgagcgagctcggcgaagacatggagtttagtgagcctccggatgacggggagcgcgcaatgcaagtcctgctgctgaagatctcatcccgcaggactatttgtccagaggaagtaacgtggccgcaaaatgccattctcttaacctttttatttttagaggaacgcgtatgaacgaggaagctgtatagacactgttaaacgaaataattttttggcttttctttttttcaaaccgattgtctaggctcgaaagtgtgttactgaaagggttttgacttgtttttcacccactccctgttgtttctcatccactctcacccaacacaatctcttgtcaattcgagccgtgaaaagtttgtcgctgcccaccaccgacgagcaattaaacctgcaggccggccaattgcgctttcatatgcagcggaaaattgtaattacaatgccggctactgcaacaacaacaactagctggttgcataaaggatatatagtacgcgtgccttggcgatgacgtcgcggctgacggtgtaaacctcagttgccgacacatcagtaaatggcggcggcccattgacatttccgctgattactttatggccgaacacatgtacacggaccttcgcagccgcagtgcataacggtccgacgcctgtcgcaacatgacatgacatttcgacgccccaccacccactgcccgaatgccccatcgcccactgccctctggtggcatcaacgtggccctcatttagcgaagggtataattactttgtaatgatactcgtattactttccgccggagtaaatgtaatataaaaggctccatcacttttgtttacttggccaacaacgtcgcgctgagcagattggcatttttaaggctctataaaaagtaaagcgatcgaaatatcaggcacactgtatgcaacatggcttaagttgagttttttttttaaatccatggcttaaataaggtacatgcttaggatccttagcttaacaataaacaaaatacattgtgatgcattttaatataaatctattacgatgtcaatggcactacacagagtaattgatcacttagccaaaagttgaccattttcggcggtcatcatttttggtggacgagacgcactgtcgtcaaattgaagcgcaaggacacacatactcacatgcacaattgaaccggttgacacattcgaaaacaaacaaacaggcgatgcgccgaacagcgaaaatctcaaaatgtaa

SEQ ID NO: 16178 - DNA, 1200 bp, DROSOPHILA
gagcctagacaatcggtttgaaaaaaagaaaagccaaaaaattatttcgtttaacagtgtctatacagcttcctcgttcatacgcgttcctctaaaaataaaaaggttaagagaatggcattttgcggccacgttacttcctctggacaaatagtcctgcgggatgagatcttcagcagcaggacttgcattgcgcgctccccgtcatccggaggctcactaaactccatgtcttcgccgagctcgctcgcccagaacaccacacgcacatacttcttcaaggacgacggtggaaatccttcgccccaatctacggacaactggtcgctcggcggactcaagcgatcggagatccagagcaacttggtgccctcgctgtgtctcagctcgcaggaaagctccctcaactatctcagccactgcaagggaattaaggtggaccgccaaccagaggccgcctatcagaactggtactcagccaagcagcagcaattactagagaagcagcggcgaatcaaggaggagcaggagttcaagcagcagcggacggaggagcgcaagcagctggccaggatgtgctacgagcagtggctaaaggacaaggcccgccaggcggcaaacttgcagctggagagccacatccaagacgcggccatgaaggccagcatagctctgcgcaagaatccgttggagtcactgcgcaagaatcccgtcgtatcgtccttatccggactgggatcgctgggatccgggccgagctcatcgacggcacccagacgcattcgcaaggtgtccaaggacgagattcgcagggtcgttgaggactggtggctaaaaaagcagagtcagcagcaggcgcagcgcgaggagaagcgacgcgccatgttgtccaaggccttgaaagaggaacagcgccggcaactggcccaggatgcctggtcgaagtggatgagcaatgtggacgccaagcccaagccggtgcccctcaatcagggcatggactcactgcgaggcaccatatctcaactctatgtgaatcccactccatggatgggtccagttaaacagacgcaaatgtagtcctctccgttcagatttaagatgtcaaagcaaaacttttttggcgactccaaatgtacagaaattatttagatataaaaacagtgatgttaaaatatacaccgacagggtttagaaact

SEQ ID NO: 16179 - protein, 321 aa, DROSOPHILA
MAFCGHVTSSGQIVLRDEIFSSRTCIARSPSSGGSLNSMSSPSSLAQNTTRTYFFKDDGGNPSPQSTDNWSLGGLKRSEIQSNLVPSLCLSSQESSLNYLSHCKGIKVDRQPEAAYQNWYSAKQQQLLEKQRRIKEEQEFKQQRTEERKQLARMCYEQWLKDKARQAANLQLESHIQDAAMKASIALRKNPLESLRKNPVVSSLSGLGSLGSGPSSSTAPRRIRKVSKDEIRRVVEDWWLKKQSQQQAQREEKRRAMLSKALKEEQRRQLAQDAWSKWMSNVDAKPKPVPLNQGMDSLRGTISQLYVNPTPWMGPVKQTQM

SEQ ID NO: 16180 - DNA, 3563 bp, DROSOPHILA
cactatgattccgtccacgcactctaaatagccggcacagtcatctggattcggtgtaatttctccatccacacaggttggaggtctgcattgaccatcatccacgacacagatatttaactccgaattccaataggatccgcttgcacacgacttggatacaaattcgccgtgacagcagatcagatacttggtacaatcatccgcatccacttttgtgtcgccctccgagcagcacacagcacttgacgatcccataaagagggaaattattaggcacagggccactcctgggtaaaaaccgcggatcaacaatcatcctcccaattatcattgctccgtccttaccatagtgtttagttctggattgggccatctttgcactctgcgtatcgaatgctcactgatgaatcttcgctcgaagatatcgccttttatatttaccggcaattaaaataattgaatgtctcttcctgcatcagagcatgtggcggtgataatgtcgaaacatccgtgatactatcagcatatatatacagtagtaatacaagcaatcgatattgtcactatttataaaactcagcggttcattgtgaatccgcgaaatcaaagagtccaaaagaaattattcttcagttgctataagatgctcatatatgagaagtcttaacgatcgattgaaattgaaatttcaatgcgccatagtgcatatatgtataaagaagaacaactactgataggtacttacctatgtgaactaactattttgaagctttatattgtgatagcagtggttggaccagctacaaattcctacaggaaacataccccttctttattaaaaaaaaaaaaatgggtatttatgttcgataagctcttgccaatctcattgagtgccgacacctgttggcatattcccgccacaaaactgattaaaatgatttactgatccaatgtttcattaataaatgggcagattaggctacatcctagtagtagtagttgctttgataatcactttctttatttgccaatcggtcatttaaagagtgcaggtcacttggttcttataattgcaggtctgcaagctttcgtcccaatacaagccatcggcgcactccatctcgacctcgcattcacactggcagacgacgtaattgctacaatttgtggtggactttaagtaggtaccctcacgttgtcccatgcaacggccattactctcgcaggcgattcccgaaggtcctgcattgggaccagagggtggggtatactcccacgggcaaacatagtcctgggggtattcacattcttcggtatttgggttgtagaccaagttgttcggacaatattgctcgacggcgcagttgaagttacacttgtagaacatgttgcacttgccttccaccggaaagagttctccctccggctggttttggcacacggtgctggtggtattgcactccaccttgggcacatagttttcaggatagtcgcactggtctaaggtggcgttgtagacgaggtcaccgtaacattgaaccgccgaggaaccaattgcggatttagtgtccttaatccaatcacacacttgggccgtctcgttgaacttcagaccctcggaacagggcatcgcaatggggcactggcattggcagacgaagaatccattcgaattggggtccgcaatcatgtagccatccctcttaccagcgcattcgccctgactggagcaggtggtgcccgatggtccctcgatctcagtggagccatcggcggtgggggtacagtccacattccaccagtaatcgcaatcgtctatcgccgtgttgaagtacagaccggagggacactggaattcctcggcacaaccattgttgcattggatgaacctcacgcagatcccgggcatatctatataggtgccagttttctgattaacgcaatccgtgcgggaacttttgcaatacgagggcaccacacttggactcgaaggcgtggtgttggaggagttgttggggtcatcgaaatccgttgtagcatccgtcggctccgtggaatcggagggttccgtggctgaagtggtggtatccggatcgcagtcctcggtgaccgccgtggtagtttcatcgatatcgtcaatgggatcctggcactcctcagcacagcaatcgcaggtacactgatcatccacttcggcaaaggccgagagtcccaagcaattagctcgccactggaagtcgcactccctcagctcccgattgaaatggagtccacgagggcagctaccgataatggaaacctctcccttcagacaaacgacaaatcgggaacagtgggtggccaacggaagtctagtgccatcttcctgattttggcacacattcgtcaactgggctaccacagtttgaagacctccgataagcagcagaacggtccagagacctaggatacggacccgaaataagttactagccttgggtagccaactcttcaccagcttacccccaaaatcgattggtcgcattcttccgagatcacctttaaagtagtccgaatttcgcgaacgactaagtggcaaaccaggccgtgtagcaccatttaactgccatgagtgcgccaaatcagtagtcaatcttctgataataccaatcaccatacgaatctctcgattaattcggcaatgatttgttttgcgccagaacgctatcgcaggtgtaattaggtgtgtgtgtctgaagctcggcactgggattcgggccgggctgccttatcaagacctgaacttcagtgcctccaacctggagagaaaccaaatattttggcataggtctacggattctcgactgctgaatgggtaccgccccggcgtctgcctaatttacgttctgtcgcacactcctagataaccacataacgtatacctaatcactcgattcactttattgacacttgaaattaaatgacgtttattgtcgctcaaaatgaagtgccagatacagcataaaagtttatgaaccaaccactaaattcgatttggctatactttgtactttaatcttggtttttcactactttcattcaagatttggctgttattggcagggaaaaattaaattatataattgaaaaattagtacattttaattgcttattttcgggatagataatcgggattatcttcttaacttataattaatttaaacacatgataagttcctcgtcaattgttaggaccttctataaccgaatacacttattgaattcctggaattgaatgcaatctcaacggttcgggtatgtcgataacaaaatcattgagtactcaaaaatagcattctacttgtcgtttcaccgggagatgggtatttagctgggatgccaattttaatgacgaaaattacttttccctgtcatttcactcgggttactcgagcgttccaatcgccggggggtctggccatggaagtctatttgccatagcaacgcaatcggttcatgacaagtactgttatgggcttagaagaaccggcgacgcatcgccggagaagaagactgcggtg

SEQ ID NO: 16181 - DNA, 1503 bp, DROSOPHILA
cgaaattcggactactttaaaggtgatctcggaagaatgcgaccaatcgattttgggggtctctggaccgttctgctgcttatcggaggtcttcaaactgtggtagcccagttgacgaatgtgtgccaaaatcaggaagatggcactagacttccgttggccacccactgttcccgatttgtcgtttgtctgaagggagaggtttccattatcggtagctgccctcgtggactccatttcaatcgggagctgagggagtgcgacttccagtggcgagctaattgcttgggactctcggcctttgccgaagtggatgatcagtgtacctgcgattgctgtgctgaggagtgccaggatcccattgacgatatcgatgaaactaccacggcggtcaccgaggactgcgatccggataccaccacttcagccacggaaccctccgattccacggagccgacggatgctacaacggatttcgatgaccccaacaactcctccaacaccacgccttcgagtccaagtgtggtgccctcgtattgcaaaagttcccgcacggattgcgttaatcagaaaactggcacctatatagatatgcccgggatctgcgtgaggttcatccaatgcaacaatggttgtgccgaggaattccagtgtccctccggtctgtacttcaacacggcgatagacgattgcgattactggtggaatgtggactgtacccccaccgccgatggctccactgagatcgagggaccatcgggcaccacctgctccagtcagggcgaatgcgctggtaagagggatggctacatgattgcggaccccaattcgaatggattcttcgtctgccaatgccagtgccccattgcgatgccctgttccgagggtctgaagttcaacgagacggcccaagtgtgtgattggattaaggacactaaatccgcaattggttcctcggcggttcaatgttacggtgacctcgtctacaacgccaccttagaccagtgcgactatcctgaaaactatgtgcccaaggtggagtgcaataccaccagcaccgtgtgccaaaaccagccggagggagaactctttccggtggaaggcaagtgcaacatgttctacaagtgtaacttcaactgcgccgtcgagcaatattgtccgaacaacttggtctacaacccaaataccgaagaatgtgaatacccccaggactatgtttgcccgtgggagtataccccaccctctggtcccaatgcaggaccttcgggaatcgcctgcgagagtaatggccgttgcatgggacaacgtgagggtacctacttaaagtccaccacaaattgtagcaattacgtcgtctgccagtgtgaatgcgaggtcgagatggagtgcgccgatggcttgtattgggacgaaagcttgcagacctgcaattataagaaccaagtgacctgcactctttaaatgaccgattggcaaataaagaaagtgattatcaaagcaact

SEQ ID NO: 16182 - protein, 474 aa, DROSOPHILA
MRPIDFGGLWTVLLLIGGLQTVVAQLTNVCQNQEDGTRLPLATHCSRFVVCLKGEVSIIGSCPRGLHFNRELRECDFQWRANCLGLSAFAEVDDQCTCDCCAEECQDPIDDIDETTTAVTEDCDPDTTTSATEPSDSTEPTDATTDFDDPNNSSNTTPSSPSVVPSYCKSSRTDCVNQKTGTYIDMPGICVRFIQCNNGCAEEFQCPSGLYFNTAIDDCDYWWNVDCTPTADGSTEIEGPSGTTCSSQGECAGKRDGYMIADPNSNGFFVCQCQCPIAMPCSEGLKFNETAQVCDWIKDTKSAIGSSAVQCYGDLVYNATLDQCDYPENYVPKVECNTTSTVCQNQPEGELFPVEGKCNMFYKCNFNCAVEQYCPNNLVYNPNTEECEYPQDYVCPWEYTPPSGPNAGPSGIACESNGRCMGQREGTYLKSTTNCSNYVVCQCECEVEMECADGLYWDESLQTCNYKNQVTCTL

SEQ ID NO: 16183 - DNA, 6910 bp, DROSOPHILA
caaggccactgggaattaaacgacaatgaacgatccccattcattgggttattaatatacaatagcacactctacgtatctgcaagatcatcggggaatcgattccggaagcggctgcagttgccgtccacatttctttcttcccattcttgcctttcttctcgggcccattcaggtaaactcatttgacttttattaattacaactagatttttatttataaccagcaaatagtttacaatttatcaaattggcttagtgatgcaaccgtgtacgcgcatatgtacacctttatagatacataattatcaacatttcgatgttttcccgttcagagacgatcgctgtatttgagcttctgccatccggccctttgtcgcttcatttctctgtagctgttgggcagtccgtagaaaaagtatatggaaagtcctatgcgagtggagaagtgattagtttacggatttggggtatcttaggcatgaacttcgttttgacacttataatacctctttgtttaatacttttacgactagtttgagttagcttggcatgcgggctagtttatgtgacactgtgagggactaggtctaagtcttggatttagtttataatatattgcatattttgacgatttttcactaaggattatatagatttactttaacacctaatttcctttaaattgtatgtatttatttaactttaagatgtcaaattatatttttcaaatctatattttttaaaatctttaaaggacctccaaagttaccctcacagtccaccgtgcacttattatctaagattctaactaccgactagtaactacagctatgctaaatatgtacaggaccagttacgtttgcattccgattcacatgctggacctaactacttttaactgggggtaaaatggcaccctctttggtttcaccaggggctattgggtttggatgggtggcatgggggagcgtaatgtacaggtacgaatggcaccccctcagctctcgacctcctccatttctatgtaggtagactgcggacgttggcgacgcaccaggtccggatgttgctgggttcggtgtgagggaccccgctgcaatatggcctccaatttggctttgaatggcaacggctccggctccggttgctcgccaggatccggacgcgtctccgtctgcgattccggtcgcaaaagcgccgggttcttggcatccacgatatgctggcgattcaaactgggtcgctgtttgcgtagactaatgctgttgatggtcttgtacagaaccggatcgaatttaggtggacgcggtatgttgctaccacccgccgctgcaactggagctgcaataggacctgcaccgggaactgggtcctttgaggggtttcctgtggtggtggacacttcggcggggacctcatcagcattaccagtctcattacggtcgattttcagctcgctgatggccttgagcattaagcgacgcacatcggtttcgcttttcgattgctttagcagcggccttgttttgggctcctcatccggcacaggctccagctccacctcgccatccacgtcctcggatctcttggccactaccttcacttggtgggcattggcattcataatgatgtggcttaatcggtctttaaacttggtcgaatgcagcggatcctcaatggtagaggcctgggatatgatggaagtctgtgagcccaaacgctggaacagaaacacaggcttggaagcctcgtcgtcatttacagattcagcttccccctccaatttatcccctttcaccaaaggaacctctttggccttaactttctccaactgttcatagaaagcctcgctattgaacatctcctccagcatttgatgggcgaccagcttgcattcatcgtatctactcaacttaagagtaatcccactttggacttcatcatcatcgctgctactgtgaacggtggccacaatcacggtttctataacacttggatacatttcagagtccaggctgaaatgcctctcgaaaatcatctgttgttgcaggtccaagtcctgttggccttgctgtgtatcctgggcattcaggacatcgtccaacattgcgattaccgactgttcgtcctcacgcgatggagattctgggttggagcccaaggtggcagtggaattctcactcttgttatcctccacataaaaaacctttccattggcgttctttatttcgaccaactcgtcgccgacatcactaagattctgaatacgattcaggctactgctcggactcttcttcagctgcgtttctagggtcaaaacactctccttggatatgcaatgatactcctgctctcgactttcttgtaagccttttagcgccttgtagaagtcccatctctcggggtttctcttcgccggatttttgcaatcgtataaataccagcatgcaagaaatacgggtatacctaggacatttaagttagtacaacggtgcaacatgcattacattctaccacatgcaaaaggactttaatgtggactgcgactcacccacaatcatccagactccaaatcgtatccacgtccaggtatccagttgaagcattagatatatattgatgaagatactgatagcaggaacaatcggtacaaagggaactctaaataatctacgacgagcttctctgggctgaaggcaaatcagacagatcaccagcaacatcagcacgactaacacaatcaggagggtcaaggcccatacttctttggaggcgattaaaagatgagcctgcataattagcactcctatgcccaaggaaattaggcctaaataacacagaaagagtcattataaactgaaataattacatttaatctaatatatacaatactcacaaaacaatgttgaaagcactcccacaattcttgacgatattgcattgggctcctggactcgatgaacattaaacagttgtgtgcatactgaaccgaacgtgaatcgctcggaactcgaagttaaagaagtggtttccgatgctctgacttccctctgccctggattctcgtcaacctcacaatagtccatatatcgcaaaagcattatggatatggccacaacgctgtaggccaataaagtgccgattgagagcaggctgaccagttgggacaaatcgaagagtccggcaattgcggccgtgaaaagagctgccacaatagatccggtgactggaactcggaatctcggactcactttgcccagaaatttaaacaaaagaccatcctgggccatcgagtacataaccctgggcagtgggaacagtgctccaaagagactggccagcagacccaccaaaccacctacggtgacaatccacatggccactggccaacccacatactcgaaggcatatggcagtggtgcgttaacatcctggatatagtatggcagcatcaatgtcagtacagtggacactccgaaatagcacaaaaagataatcagcagtgagagcagaatcgatttcgggatatttttccgaggatttcggacctcttcccctgtggtggcgatgcaatcgaatcccacaaagccaaagaagcaggtggctgctccacgaagagtgccttcaaatccaaaggggaaaaacccaccagatccgatagtagaattcgcactcacagtactcggatccaccgtccagttggaatagtcagctggggagataacaaacaaacagagaacattaattaattaaaaaaacagaattgggaatcagagaatatgattaatctattatgattttggaacttttgcttttttcatggtgctattttgagagatactaatggttttccaattaggtgagcccatttgaaaaatgcagcactttatgcatgaatgcattcaacaaaccactcacaattttatatttacttaaggtttattaagaagtgagtaattgaaactatatttaccttttaaagcgccagcgattatgacaaatcccaaaataaatatatttaggcacgtcacaaaattatttgccatagtcgatgtctccacgccaaaggccagtgcaactgaaacatttaacgcattttaaatttattttctatttaaattatttgaatttattagtgctcttaccgccaaacacaaccactaggccaaaggccaaaaagtcaaagtagctgcccaagaaactgacattcataggagcaacctcggcgaatgtgtatttcagggtatcatttagtagggagtccaggtacaggctgatacccctacaaacactagccgttccaataacgtattccaatatgagattccatccaatgacaaaagctacgaattccccgatacagacataactatatacatacgccgatccagccttgggaactcgagcgccaaattccgcatagcaaactcctgtaagaaaacatgaaagataaaaaaaaaatatatatagagtcagttatatagtttgttaaccttgccataactatatgcaaaaacaaaacttctgaaatattgtatctcaggggtttttattatatgggttttactttagtccaaatcgaactcacctgccagcaaagatgccagtgccgcgatggcaaacgatatcatcaccgatggacccgcctgatccttggctatctgtccggccagcacgtagaccccagctcccaaggtcgatccgacacccagggccgtgaggtcccatagacccagaactcgattcagcttcgtttccccctcgctgccatccgcttggagattcttgcgccgggtgagaactttccatggcgagatctggcgaaccattgttcagtatctatctccctcgattggtggaaagttcagtaaactctagaattttggaacgaacaaaattcaccaagtgtctttcagaggtttagacaaaatcataatgcacttcgatccgcgtattgtcttatcttgtaacgccgtttgattgtataatgcaaataatggaactcaaaatgtaatcgtaaatggcggggctattgtgagtctgaactcgattgttccacttagaattcattataggtgatgatatatacatatgttgggtgtgctatgtacgaaggttttagaggtgtagaagtttgaatggaaaagttttcgaaaccgcctttcacaaagaaagtttgataagaaaacggtggtggtcttaaaataatggaaataattaaatttggctattaatttcatacattagtagggtcttgaaaaaaatagctacacaaataataataaaggtagaatagaatagcatgatttgcaatcaaatttctatgaacttaaaaggatcatgatttcgttattttaaatacaatttttaccgacaggtgtgcaaacaaaactcgtatgttttttgagaattaacttaagtatgcactgcatccgctgtaaatcattcattattatattttttctaagaggtgactaaccaaagcacccacaccttttccacactttgataagaatcagatgctcaagtttttacgtagaatatcttgtgcagctttgtttgcctttctattattaacgttataattcgtcgtttgctctgccctaaacgaagataattaagtgggtctaggtgagtttgccggacttgtcgaatgcgaagttatgctaagtttatataattatggtaaacttgattctgcactcaccgactttgagacactgccgtccgtcctcacttacatatattcgattccaagtgcagttgttgctccaatgcactctaagttaatattgtcgctccgcctttgtctgtttcttattaatgaattggaagtctattattaattttctctcactcaaaacaatagaaaacggaaaacaagactgtgaccgacatacttggcgatcagggagcgtctgtctgcagcctgttggtgtcgtcttacagccgcgaattcttcgcacactcctcctaagataagaccaccaccaggccggcgagccgaactcgaatctcctccgccacccgacgagattgactgcttgccatggacgaggagagcggggtacacggcgagaaaaatgtatcttcaattataggggtaaaaataaatctttagtactaaacaacttttattaatagataacgtgacaaaacaattggtcaaaaattataatttgaaatccattagaaagttatatcgaacattaattttaaactttctgtaaacaataatttgtagcttaaatatagatcaaaatttattttaaaaatttaatttaaaaatttaaaaacttttcttaaaaaaatttcttttataacgaaatcagattctatgcaatccatatgaaaataatatttttttttgttttttatccttaaaaacaaatattgtataacaatttaaaaacgaaacacaaacatattaaatgtcgatcatgaaataaaaaccatttttcacaaattgatatgtaggtccgaaatattaataaactgcaagcagcttactcttttaaatagacgtggaaaatcgatgtctaaaataggcgtattttctctcagtgcacatccgaagcaaaactgataagagacgaaggcgacttcaattcgtcgggatttagtggtgataaggcgctactcgggggatcgcagggttttcgagatgatctgggttgtaattagagcgaatacaaaaaaattagcaggtgtgcgagcgggaggggcgttggtgcgagggagaggatctgaatcacactgtgtgacgtcgcattttgttggttttggttttgatgttgctgctgtgatatgactgctgctgtgtttgcctctgttgttgttttccgactttcggttttatgatcttgcgatagcgaaacaacagatttttgttctgtgcttgttgttc

SEQ ID NO: 16184 - DNA, 2896 bp, DROSOPHILA
tcgccaagtatgtcggtcacagtcttgttttccgttttctattgttttgagtgagagaaaattaataatagacttccaattcattaataagaaacagacaaaggcggagcgacaatattaacttagagtgcattggagcaacaactgcacttggaatcgaatatatgtaagtgaggacggacggcagtgtctcaaagtcgaattctagagtttactgaactttccaccaatcgagggagatagatactgaacaatggttcgccagatctcgccatggaaagttctcacccggcgcaagaatctccaagcggatggcagcgagggggaaacgaagctgaatcgagttctgggtctatgggacctcacggccctgggtgtcggatcgaccttgggagctggggtctacgtgctggccggacagataggagtttgctatgcggaatttggcgctcgagttcccaaggctggatcggcgtatgtatatagttatgtctgtatcggggaattcgtagcttttgtcattggatggaatctcatattggaatacgttattggaacggctagtgtttgtaggggtatcagcctgtacctggactccctactaaatgataccctgaaatacacattcgccgaggttgctcctatgaatgtcagtttcttgggcagctactttgactttttggcctttggcctagtggttgtgtttggcgttgcactggcctttggcgtggagacatcgactatggcaaataattttgtgacgtgcctaaatatatttattttgggatttgtcataatcgctggcgctttaaaagctgactattccaactggacggtggatccgagtactgtgagtgcgaattctactatcggatctggtgggtttttcccctttggatttgaaggcactcttcgtggagcagccacctgcttctttggctttgtgggattcgattgcatcgccaccacaggggaagaggtccgaaatcctcggaaaaatatcccgaaatcgattctgctctcactgctgattatctttttgtgctatttcggagtgtccactgtactgacattgatgctgccatactatatccaggatgttaacgcaccactgccatatgccttcgagtatgtgggttggccagtggccatgtggattgtcaccgtaggtggtttggtgggtctgctggccagtctctttggagcactgttcccactgcccagggttatgtactcgatggcccaggatggtcttttgtttaaatttctgggcaaagtgagtccgagattccgagttccagtcaccggatctattgtggcagctcttttcacggccgcaattgccggactcttcgatttgtcccaactggtcagcctgctctcaatcggcactttattggcctacagcgttgtggccatatccataatgcttttgcgatatatggactattgtgaggttgacgagaatccagggcagagggaaagaaaccccgagagatgggacttctacaaggcgctaaaaggcttacaagaaagtcgagagcaggagtatcattgcatatccaaggagagtgttttgaccctagaaacgcagctgaagaagagtccgagcagtagcctgaatcgtattcagaatcttagtgatgtcggcgacgagttggtcgaaataaagaacgccaatggaaaggttttttatgtggaggataacaagagtgagaattccactgccaccttgggctccaacccagaatctccatcgcgtgaggacgaacagtcggtaatcgcaatgttggacgatgtcctgaatgcccaggatacacagcaaggccaacaggacttggacctgcaacaacagatgattttcgagaggcatttcagcctggactctgaaatgtatccaagtgttatagaaaccgtgattgtggccaccgttcacagtagcagcgatgatgatgaagtccaaagtgggattactcttaagttgagtagatacgatgaatgcaagctggtcgcccatcaaatgctggaggagatgttcaatagcgaggctttctatgaacagttggagaaagttaaggccaaagaggttcctttggtgaaaggggataaattggagggggaagctgaatctgtaaatgacgacgaggcttccaagcctgtgtttctgttccagcgtttgggctcacagacttccatcatatcccaggcctctaccattgaggatccgctgcattcgaccaagtttaaagaccgattaagccacatcattatgaatgccaatgcccaccaagtgaaggtagtggccaagagatccgaggacgtggatggcgaggtggagctggagcctgtgccggatgaggagcccaaaacaaggccgctgctaaagcaatcgaaaagcgaaaccgatgtgcgtcgcttaatgctcaaggccatcagcgagctgaaaatcgaccgtaatgagactggtaatgctgatgaggtccccgccgaagtgtccaccaccacaggaaacccctcaaaggacccagttcccggtgcaggtcctattgcagctccagttgcagcggcgggtggtagcaacataccgcgtccacctaaattcgatccggttctgtacaagaccatcaacagcattagtctacgcaaacagcgacccagtttgaatcgccagcatatcgtggatgccaagaacccggcgcttttgcgaccggaatcgcagacggagacgcgtccggatcctggcgagcaaccggagccggagccgttgccattcaaagccaaattggaggccatattgcagcggggtccctcacaccgaacccagcaacatccggacctggtgcgtcgccaacgtccgcagtctacctacatagaaatggaggaggtcgagagctga

SEQ ID NO: 16185 - protein, 880 aa, DROSOPHILA
MVRQISPWKVLTRRKNLQADGSEGETKLNRVLGLWDLTALGVGSTLGAGVYVLAGQIGVCYAEFGARVPKAGSAYVYSYVCIGEFVAFVIGWNLILEYVIGTASVCRGISLYLDSLLNDTLKYTFAEVAPMNVSFLGSYFDFLAFGLVVVFGVALAFGVETSTMANNFVTCLNIFILGFVIIAGALKADYSNWTVDPSTVSANSTIGSGGFFPFGFEGTLRGAATCFFGFVGFDCIATTGEEVRNPRKNIPKSILLSLLIIFLCYFGVSTVLTLMLPYYIQDVNAPLPYAFEYVGWPVAMWIVTVGGLVGLLASLFGALFPLPRVMYSMAQDGLLFKFLGKVSPRFRVPVTGSIVAALFTAAIAGLFDLSQLVSLLSIGTLLAYSVVAISIMLLRYMDYCEVDENPGQRERNPERWDFYKALKGLQESREQEYHCISKESVLTLETQLKKSPSSSLNRIQNLSDVGDELVEIKNANGKVFYVEDNKSENSTATLGSNPESPSREDEQSVIAMLDDVLNAQDTQQGQQDLDLQQQMIFERHFSLDSEMYPSVIETVIVATVHSSSDDDEVQSGITLKLSRYDECKLVAHQMLEEMFNSEAFYEQLEKVKAKEVPLVKGDKLEGEAESVNDDEASKPVFLFQRLGSQTSIISQASTIEDPLHSTKFKDRLSHIIMNANAHQVKVVAKRSEDVDGEVELEPVPDEEPKTRPLLKQSKSETDVRRLMLKAISELKIDRNETGNADEVPAEVSTTTGNPSKDPVPGAGPIAAPVAAAGGSNIPRPPKFDPVLYKTINSISLRKQRPSLNRQHIVDAKNPALLRPESQTETRPDPGEQPEPEPLPFKAKLEAILQRGPSHRTQQHPDLVRRQRPQSTYIEMEEVES

SEQ ID NO: 16186 - DNA, 8193 bp, DROSOPHILA
cgacgagtccaacagcaacgaacataaacgccggcgcgaaggtgagagaatagtcatttatcggatagtcaagacattcaaaagccaacgatttacaggacaaaacggtgaagaagagctgcgggatagagagcggcatagggtgagtgatatatcccaatagtcgacaacattcccaagttctggaattgcgtactggaattacaactaatgtggttgccaatccataggagaagtcaccgcgggagcgatcacatgaaaagttcgatagagaaagaggaggagccagcggttcgcgggccgaggagcggcagtacatcagcaagtccgctcggtcctccagagtcaactattgattgcactccgggcttttgcttgcccgttccgtgcattgtgaagcgcattttgtttaacttttaaagaatttggaatggcctttccatccattgtagcaaagaacgaaactacttttgaaatgtttacaagttttagtgactattttaaaacagagatccaaacaattacattgtaaaaatgactacatttttgtgttgtttactaaacgggaactgtaatagccataatatttgtataaaaagttcattccccaaatagatgttcagattgtctttaaaacaaataataaattgttcatttgcaatgagattaagatgtaaacccttcgtgttatttatttatcacccaagcgacagtgaaacaccagctttctatttcgaatcaaattttattcaatttaaattatttttacatttaacagttgaacttgaggtttaatctcgatttaaaacacgcatatcagatatctaaacaagcttgccactaacgttttttacaactctttccattattttaaatagacttttcttttactttgaaagtgttcctgaggtctttttaggtaggtaccgttgttgattcgattcgattcgattccacagtgatgagagaactaggcgaattgtttatcttgatttttattaaataaaatattaacaattcggtgctgtggcccgtgttcacttcatttgttttagttgttgcttttggcgcctaaacttgaactttgactttagcaaaagtaaagcacataaataataaaataatatcaaaaattgatttagttctgtggctgatcctccggcgctggcagcttctcccaggtgggctccactccccaaatctcgcgggcgtactcggcgatggtgcgatccgacgagaatttgccgctggacgcaatgttgttgatggacatctccagccacttggcttggttctgcaaattaggcaaaagtatcgtggtttaaataatgatctttgctacttatttttctaatacatagttaagctatcgaatctcacctggtaggtcttggagaccagatcctgggccttgatgtacgcatcgtagtcggccagcaagtagtagtggtcgtacttaagcagaatgtcggcaatgttcttgaactcgttgggattgccggggctgaagaatccgccctggatttggtcaatcacctgcttgacctcggggttggcgttgtagtagtcgtaggcattgtagcccttcttcttgagcgcctccacctcgtcgacggtcatgccgaagataaagatgttgtccagacccatctcctcggccatctcaacgttggcaccgtccagggtgccgatggtgagggcgccgttaagctggaacttcatgttgccggtaccagaggcctctgtgccggcggtcgagatctgctcggacagatcggcggcgggcataatcttctcggccagggtgacacggtagttctccaggaagataaccttgagcttatcgcccacaatgggatcgttgttcacaacgttgcccacggcgcagatgagcttgatgatctgcttggccacatagtagcccggagcagccttgcctccgatcatgattgtcctcggggtgaagttggctgtgggatccttcttgatcctgttgtacagggtgatgatgtgcaggcagttcagcagctggcgcttgtactcgtgaatacgtttcacctgaatgtcgaacatggaagaggggttgatcttaacgccgtagtccttctccagaatggcggccagcttcagcttgttctcctgcttgacgcgggctacattgcgctggaagttggggtcctttgcccacttcttcagagcaaccagttggtccagatgcactggccactcgtcgccgatcttctcggcgatcaggtcggagagtccgggattgcagagcagcaaccaacgacgcggggtaataccgttcgtcttgttctggaacttctggggctccatttcgtagaagtcatggaacagcgagtcctttaggatctgcgagtggatggcggccacaccgttgacggcgtgggagccgacgatggacagatgagccatgttgatgcgcttctcgccatcctcctccaccatcgacatgcggcgcatgcggtccaaatcgtcggggaacttcttcttcacattctccatgtgcaggaagttgatgtgatagatgatttgcagatggcggggcaggatcgactccagcagggagacgggccagcgctccagggcctctgggagcacggtgtggttggtgtacgcgcaactcctgacggtgatgtcccatgccttctcccaggtcagatgctcctcatcgaccaggatgcgcatcagctcagggatggccagcgatggatgggtatcgttcagctgaatggccaccttgtcggggaagtgatcgaaggtgttgcggaccgcctcccgggatccgaacttcgaggccttgtagcggcggatgatatcctgcagcgtggcggcgcacatgaagtattcctgcttcagacgcagctccttgccctcgaagaagttgtcgttggggtacaggacacgtgagatgttctcagccagattgcggtccagcacggcctggatgtagtcaccatcgttgactggataggtgaagatagccataggttagttcttgccttatcaaggggacctctccttatagatacttacagaacttgaggttgaagtcgatgggcgacttggcggaccacagacgcagcgtgtttacgtggttgttgttgtatccgggaatggggttgtcgtagggcatggcaaacaccctttgggtgtccacccacttcttgccctcgggcgtgtcgatcacacggccgtagaagttgaccggcagcatgaactccggacgagccttctcccagggattgccataacgcagccaatcatcgggctcctccacctgctcgccgttcttgatcttctgggcgaagataccgtactcataacggatgccatagccataggcggccagacccagagtggccatcgagtcgaggaaacaggcggccaaacgacccagaccaccattgcccagaccggcgtcctcctccatctcctccaggttctcgatatccagacccaactggtacatggcctcctcgcactcgctctggattcccaggttgatcatggtgttggtcagtgagcgacccatgtagtactccagcgacagatagtagacgcgctaaaaaaatacaggggtcgttattagatctattgtatccatgattaattagcaactatattggaagatcgaaatgtcataagattatttcatgagttggattcagatttcgtgcatttccgcagtgcatgggtcactcacaccaggttcagctgtacagtgcatacaataactataatacaacgaaagcctgataagaggggcgccgactgcggctgaaagacctagttatgtttggccagaaggtcaaccagtttccaacttttacggttcccaacggaatactcgcttatcagcgaaaaatcgcacggtaatttcagggcaacccaactggaaactataaatagaggaaggcattcactatcaccggttcgattcagtgcgaatctatcgatcgatgttacgagggcattaattgggtttatagcaacgctatcaagcgattgcaggctgcactttgcatgctgggcaaacatcatggctaagcatgaatctatacagcttggaatggcgattattatcaccagccaatgctgggctaatcatggatcgatcacggatcagcaatcaccaatcagcattgacgacaacatcgcccacagtgtcgccagtcagtagctaatggctcccagggtatgctaatcctatcccttatcagtcaacctacctatgtaatctatgccctaaaacgcatacctatcgcacatgatgctttcagatgtctgatgctatgcgatccgggaaaaaaactatagctaattagttcggaatgtttggagagcttgtttttgtgtgcatatttgtaggtgaaaggggttaaggcgcctatatagaatcggggactttcgattaggaatattttgcagtccatttagcagataagatatacagaattaggtgaacatggagtatgaactgattcgggcaatatgtgctgggcaatggaaatgctgtgataaaacacattattgtttatatctatataggtataccaaaatatgaactataaaagtaggtattttcttagttatgaaatatgaggtgcactcagtaaatactgagttggaaaaaatccaaatattaaaaccaattctaagcatgatcttctttgctgcagaaaaaaaaagaagctaataacctatttagcttatctaatcgaagataagagcttcacaacaaaacgtgagtaatcttccagatccataaaaagcttttggagtcattcaactgccggcgctaatgttttccacagcagtttgttgtgtagggtctttgatattcgttctggccagttctacagacgaattagatgccagacatatgttttttgcggttttgataaagagcgcctcaccaacaaacgaccagtgtttgtttgcctttgtttattggttttttttccctatatgcaataaataaatgacagatgtgcataggaagttggaaatgcaataggtagtggcgccctggcattgaatttttacatgatcggtgatagctaaacgcttttaatttggtgataagtggaacagtattttcgaactgcttgtggaaaactacagggaaataaactcttttgtgtgactattcaccccgctgaactttcttcaatttgcataaattggtttagagaccgatggacgccaagttgtcttcaattaactctaagtaccaatccacgcacaacaacagctgtttaagtatccataagatacaatcgtcgtcagttcatatatttctatttagatggttgcgtgagctaattgcatgtggggggacaactaaacaaaatcgggcctataaaagttccacaacctgaaagaacttatatatacatacgtacatatatatatatttgagaacgaacaaaaaccgaaatggtagccaaaataaaaatgagagaggaaaaatgggggaaattttccttgatatttttgtcagttggttgttgttaataacctttgattgaccttgaaaaaatgtgtgccgacgccgtgacggtatccacaatttagttgaattgaaaatatttatcacccaaaagtgtatatagctcgaacttctagtcgccaaaattgctcgagtcaatggaaaattaatagatacattttggtgggcttgaaattgaaagtgatttaagctgacattcagcaaggacaaaaatgtttagcagccgatgctgacaaatttgcaaatggaaagctcacgctttgggcacgtgtttggatacatgtacatatgtatgtatatacatatattgtgtatctgatggatgtggctaaaagggggcacttattatgcacccttgccctacttaaactgcatcgccatggccccaggaaaacttattactaaaaactcatcaatatgtttggatagagctacttctatagtagctcggcgacagctgctaaatgcagagctatttttaagcttttgttgcttcgtcagctggcggggaaaattgtcaagtgggcgcgtaaaaagggggtggctgataaattcgccggctttttgcagcacctctgcaatttgttgcagtgaaagtgtcacacctttttttggcgctacttctttggcattgatcccattgcagtctttgctttttggcaatttcgcgaataattaaatgaaacgaaacaattatgtagtagcaaaacaacgaaagcgtgggaaatgcagtaaaagccgaaatttcaaataaacagtgagcattcggaaatttttagaattttagaaaataaggattaaaataggattatgaaatgttgcatggaatattcatttataataataaaagacatagtggaaatacttgggataaaagcaaaactgcttcagttatttatgaatacgtttatcgtttcccatttaatttttagttttttttttggctgagtgttcactgtaaattcgttggccaaagcgcatcggggaataaatcagcagcgaataaaagagaatggagcaggccgaaaaaaatgtcgtaatagccaaagaaatttaggaaaaaatatttcaaaggaaattatttcaaaagttttggttgccgcaggaagggataatcaggcctaagaactccagagcccggataaagttaggttaggtggtccgaccacttctttttggaaaattccacggactaaatcaataagtgggtggcctggatgggcgcggaactcaccttgggatccttctcgtagtagtgctgctgcgtgcgaatccagcggcccaccatgttgtccttgacggtgttggccagggcgaagtagtagtccctcagggtggacacattgcgatccttgaccagggtgtagtgcaggtggcgattgaagttcttcttcacttcggtgacattgcccacctcggcgatcccgcgcaccgagatctgtttgcgccgatcggcgtcggattggggcttcgacatggtgtcctagttatgtatgtcccttctctgtggcggctctatatagttctctgattccgttgcgtgggtgcgcgtgtgtgtgtggcgtagacccgtttgcgtgtgcgacagcgaagaggagacggagactatagacacaacccagacctgaacctgaacagacgaccgttcgcagcaaaatccggagcgattctcactttatactttcggcatactttcggagatagcttttgcgccagagcttttctctcagcgtgctgctccccttgtaaacaactcccagcgcacagtgggtgcgctgggtatcaactgctacgaattatcatctaggggatataatacaacaatataggttgttttttaactatacaactaaatattaaattttcgatttttatattaatcatttaagaatgaaaattttgtatatttcaataacagataataacttttatcagtatattttgaccatatcgcccactgtgcgttgctgatgcagcggttcttatctcgccggtgcattttgctgtctctctcgcactttagctatgctgtattcctgcactgctccctgtgctctcgctcgctcactgcctctctctcactggcgctctctttttgccccagtcaccttgtgcgaaggtcatacatgcgtatttgttgtttattttctgtttttgtttcatcttgaggcatttgtatgctttggaatagaacgggtggcgcccccatgaatcgggtttgagctttttgaaccgacggctgtcaaattgaagcttttaaccatctgttgagtgcggagaatcgtggcgggctggatattggagatgccaacttgctaggaattcaaactttaccaatcttatggatacttttgtatctaagagatacttttaaaatctgatgcttttgtatcttacagatattttgtgttttatatatctctttgggtacattcgtatcttgagctttaagatttacgtactgatattctaaaacaagcgttttcaaaaatgttgtcacagaattgatctatttagaaagcgcactgaatatatgtgctctgctgtgcctcactcgacttgtgcaacaaatgctaatcacaggacaaagggcatctgcaattctatccgaacaattcagttattccatttcttgtttattacttcccataatggca

SEQ ID NO: 16187 - DNA, 2853 bp, DROSOPHILA
ttttgctgcgaacggtcgtctgttcaggttcaggtctgggttgtgtctatagtctccgtctcctcttcgctgtcgcacacgcaaacgggtctacgccacacacacacgcgcacccacgcaacggaatcagagaactatatagagccgccacagagaagggacatacataactaggacaccatgtcgaagccccaatccgacgccgatcggcgcaaacagatctcggtgcgcgggatcgccgaggtgggcaatgtcaccgaagtgaagaagaacttcaatcgccacctgcactacaccctggtcaaggatcgcaatgtgtccaccctgagggactactacttcgccctggccaacaccgtcaaggacaacatggtgggccgctggattcgcacgcagcagcactactacgagaaggatcccaagcgcgtctactatctgtcgctggagtactacatgggtcgctcactgaccaacaccatgatcaacctgggaatccagagcgagtgcgaggaggccatgtaccagttgggtctggatatcgagaacctggaggagatggaggaggacgccggtctgggcaatggtggtctgggtcgtttggccgcctgtttcctcgactcgatggccactctgggtctggccgcctatggctatggcatccgttatgagtacggtatcttcgcccagaagatcaagaacggcgagcaggtggaggagcccgatgattggctgcgttatggcaatccctgggagaaggctcgtccggagttcatgctgccggtcaacttctacggccgtgtgatcgacacgcccgagggcaagaagtgggtggacacccaaagggtgtttgccatgccctacgacaaccccattcccggatacaacaacaaccacgtaaacacgctgcgtctgtggtccgccaagtcgcccatcgacttcaacctcaagttcttcaacgatggtgactacatccaggccgtgctggaccgcaatctggctgagaacatctcacgtgtcctgtaccccaacgacaacttcttcgagggcaaggagctgcgtctgaagcaggaatacttcatgtgcgccgccacgctgcaggatatcatccgccgctacaaggcctcgaagttcggatcccgggaggcggtccgcaacaccttcgatcacttccccgacaaggtggccattcagctgaacgatacccatccatcgctggccatccctgagctgatgcgcatcctggtcgatgaggagcatctgacctgggagaaggcatgggacatcaccgtcaggagttgcgcgtacaccaaccacaccgtgctcccagaggccctggagcgctggcccgtctccctgctggagtcgatcctgccccgccatctgcaaatcatctatcacatcaacttcctgcacatggagaatgtgaagaagaagttccccgacgatttggaccgcatgcgccgcatgtcgatggtggaggaggatggcgagaagcgcatcaacatggctcatctgtccatcgtcggctcccacgccgtcaacggtgtggccgccatccactcgcagatcctaaaggactcgctgttccatgacttctacgaaatggagccccagaagttccagaacaagacgaacggtattaccccgcgtcgttggttgctgctctgcaatcccggactctccgacctgatcgccgagaagatcggcgacgagtggccagtgcatctggaccaactggttgctctgaagaagtgggcaaaggaccccaacttccagcgcaatgtagcccgcgtcaagcaggagaacaagctgaagctggccgccattctggagaaggactacggcgttaagatcaacccctcttccatgttcgacattcaggtgaaacgtattcacgagtacaagcgccagctgctgaactgcctgcacatcatcaccctgtacaacaggatcaagaaggatcccacagccaacttcaccccgaggacaatcatgatcggaggcaaggctgctccgggctactatgtggccaagcagatcatcaagctcatctgcgccgtgggcaacgttgtgaacaacgatcccattgtgggcgataagctcaaggttatcttcctggagaactaccgtgtcaccctggccgagaagattatgcccgccgccgatctgtccgagcagatctcgaccgccggcacagaggcctctggtaccggcaacatgaagttccagcttaacggcgccctcaccatcggcaccctggacggtgccaacgttgagatggccgaggagatgggtctggacaacatctttatcttcggcatgaccgtcgacgaggtggaggcgctcaagaagaagggctacaatgcctacgactactacaacgccaaccccgaggtcaagcaggtgattgaccaaatccagggcggattcttcagccccggcaatcccaacgagttcaagaacattgccgacattctgcttaagtacgaccactactacttgctggccgactacgatgcgtacatcaaggcccaggatctggtctccaagacctaccagaaccaagccaagtggctggagatgtccatcaacaacattgcgtccagcggcaaattctcgtcggatcgcaccatcgccgagtacgcccgcgagatttggggagtggagcccacctgggagaagctgccagcgccggaggatcagccacagaactaaatcaatttttgatattattttattatttatgtgctttacttttgctaaagtcaaagttcaagtttaggcgccaaaagcaacaactaaaacaaatgaagtgaacacgggccacagcaccgaattgttaatattttattt

SEQ ID NO: 16188 - protein, 844 aa, DROSOPHILA
MSKPQSDADRRKQISVRGIAEVGNVTEVKKNFNRHLHYTLVKDRNVSTLRDYYFALANTVKDNMVGRWIRTQQHYYEKDPKRVYYLSLEYYMGRSLTNTMINLGIQSECEEAMYQLGLDIENLEEMEEDAGLGNGGLGRLAACFLDSMATLGLAAYGYGIRYEYGIFAQKIKNGEQVEEPDDWLRYGNPWEKARPEFMLPVNFYGRVIDTPEGKKWVDTQRVFAMPYDNPIPGYNNNHVNTLRLWSAKSPIDFNLKFFNDGDYIQAVLDRNLAENISRVLYPNDNFFEGKELRLKQEYFMCAATLQDIIRRYKASKFGSREAVRNTFDHFPDKVAIQLNDTHPSLAIPELMRILVDEEHLTWEKAWDITVRSCAYTNHTVLPEALERWPVSLLESILPRHLQIIYHINFLHMENVKKKFPDDLDRMRRMSMVEEDGEKRINMAHLSIVGSHAVNGVAAIHSQILKDSLFHDFYEMEPQKFQNKTNGITPRRWLLLCNPGLSDLIAEKIGDEWPVHLDQLVALKKWAKDPNFQRNVARVKQENKLKLAAILEKDYGVKINPSSMFDIQVKRIHEYKRQLLNCLHIITLYNRIKKDPTANFTPRTIMIGGKAAPGYYVAKQIIKLICAVGNVVNNDPIVGDKLKVIFLENYRVTLAEKIMPAADLSEQISTAGTEASGTGNMKFQLNGALTIGTLDGANVEMAEEMGLDNIFIFGMTVDEVEALKKKGYNAYDYYNANPEVKQVIDQIQGGFFSPGNPNEFKNIADILLKYDHYYLLADYDAYIKAQDLVSKTYQNQAKWLEMSINNIASSGKFSSDRTIAEYAREIWGVEPTWEKLPAPEDQPQN

SEQ ID NO: 16189 - DNA, 4794 bp, DROSOPHILA
actgggcttgtacagacccagtgccggatagaaggcggtgtttaggattcgcactggtcgcggcgtggtcagtggcacatcgtttgggtgctccgctggcggcggaggcggcttcttcgacttgtaccacggcaccggggcagtgtagaatatgtgcactgcactgatcaccacatccaaagtggtacgcgactgaacaaagtgtacatttttaagatttaaggactaagattggccaccttcttggactgaactggaaacttacagactgctccgcctcgtggtcccgctgctgctgctgcttcatcagatcgattttgctctgaatgatgcgctccttgatcttctgctcgtcatacttctcgggcacaatcactccgttctcccgctgcggctggagcagcgcgacggccaccggcggcggcttctccgccacttggggctgatccccgggcctgtaggcgcgtgcgatgaatcgctcgtccagcagcagttcgatggccgcattgcgtccgctggagcccagcactatgatggtgatgaccagcagggcgacgatggccagcaggagtagaatcttcagcttacgccgcgttttcacatacttttttagcagcattttcgcaagcgtgcattttctctcattgtttggacgtcctcgttgtttttcgtccccagtttttcgtacctccaccccacaaccccttctcttcctgtcgcaatgcagctgccggaagttcctggccattgcgcatgtcctgaaacggacacactaaactatgcccagcgagttcccaattaccatttcaccattaaagcatatgcgagtttgttattttttttggacattttattgtgagttgatttataatattgtacacattaatattgctaagttatttaagggaatatgccccagaaattttcacaaataaaatagtttaaacggaaatgtgaaacaagtgggttttagaatccattcccaaaataaatacattacttataattccgtttttgtttgtcaacacattgtctgaatagtttttatttagttataaagtagagttttaaaaaaggttttaggtttgtatctattcgaagtgcatagtcttgttccgattaacatgcaccttcgagctctagcgtccctcaactggaaaagaaaatcaagttagcactgctggtggctggggattactcatcattgcaacttactgtatgtagagagatcgatttcctcgggcagctcactgatgttcacatcgaaacgatcctgtacttcgttaagtatcttggcgtcgttctcgtccgaaacgaatgtgattgccagtcccttggtgccgaagcgaccggcacgggccacgcgatgcaagtaggtgtcggaatcctcgggcatgtcgtagttgaacacgatgttcacacgctcgatgtccatgccgcggccaaagagattggtggccaccagaatgcgcttctggaagtccttgaactgctggtagcgattcagacgctcctcctgggtcatcccacgatggatgccgatggcggggaagttctgctccgtcagcagctgcgacagagccacgcaacgttgcacagacttcacaaagatgaccacctatgacagggataatcaagtaagtggtaaatataagttaagaccaccgaatgacctacctgattgaactcgagcacgtcgagcagttcgaacagtttcttgttcttctcgttctccttcagattgacgtagtgctgctgcagtccgtgcagcgtcagcttggcctcatcgtcgacgtagacctccatgggctggatttgggaaatagaatgtggcgcattttaaaggacacaattaggaggggtacagagaaatcgaacttagactaggctcgcctcggaacatacaacaatatgcatagaatattctacatacggccacgctaccaccacatctcatcaactagtctctgaactgctcccgaggatcgatgatcgctctgagaagtgtgcggattacagatgagcgggcctatcgcatcgcattcgctctggattgattcaactcgtctcatcggccagtcggcgggatctttgctgtttgcttgtagttttatttaggtattggtttttgctagcgttggtattgttaaatcttttgcgatttcaattgattcattcagcggttactgcttgtttatgcttttgcaacggttgccaatttccacgattaaccatttagaaaatggtgtccgatagtcattaactaagtttttcgatacgagttatgctcacagagcgctggacgtttggttgtacgcgtttaaccatttgcaagatggtggttggcttatacggaggggatcaagatcgaatgttcgatatcgcgtggcattaacaaaataataactaattgtcgtgatagcggtggatgcgaggtggagaagtacgagcattttggttatgaacacgttgatatttacatcttgcatgaactttttgcaaacgggacgaatgtccttgctcaatgtggcagagaacatcatcacttgtttgccgtgcggcgtgctacggaaaatctcttgaacgtcacgacgcatatctaaaagaatggtttggttattagtaaaacgtccgtcatttggtgattattagtcaacttacccagctgctccagcatcttgtcgcactcgtcgagcacaaagtgcttcaaaagcttcagattaagtttcttgttgcgaatgagggcgagaattcggccaggggtgcccaccacaatatgcggggtgccgctcttgagggtctcctcgtccttttgaatagccattccgccaaagaagacagccacctaaatagaaaacatatcgaattaatatatagtaactatatagtcgaaccaaactttttgttgaattatatacaatggattaaaacgtagactcaccttgactgtgggcatgtacttggagaatcgctcatactccttgctgatctggaaggccagctcgcgggtgtggcacatgaccaggacgtggcaggtgttgttgtccgacggctccagctgctgcagcgtggccagaacgaagacggcggtcttacccatgccggacttggcctgacagaggatgtccatgcccagtacggcctgcggaatgcactcgtgctgaactgcaagcggagagcatcgttagtgactgtacctttcgtcactccaggtggagtgcaagtactcaccctccgagggatgctcgaagccgcagtccacgatggcgcgcaggatctccggtttcaggaggaaatcgcggaagccggaactgtgaatggacacataggtgcccttgacatccttcttgggggcctcctggttttcgaccgcagtggtctcggtctgctcctcatcctcgtagtccaaaagatcgtcattgtcggccatttctgcggctttcttacctttaactagttatcggctataaattcgcaactaaatgctgggaaataaaatgggtgcgactagataagttacatgtgtttgttaaagaaaatgccgcttttttttgcggaaccggtgccggcgttccctccgccattttgttttttcaccgcaccgcattacatgtatttcgaaataaaacgaaatacccattacaagcgacgattttatttagtgcagtgtgattttcagtgtcaaactcaccttttgtgcacgtttatcactttaaaatacagcttttaaagtgaaattaactattttaaaatctttaacgtgatgcggaggaaaaaacagcgcagagcagtgtgaccgaagtacgtttaagaactcatgcgagctgagccgggtgatatcgttaagttatcgatagttgtgcacaacaaatccatttgtaagcttcaactaaaaagtttttataaaatatatgccttctaacgctttaaattaaaatggcttgttgagcttaaatttaattttttttttatcattttggggtcaagcggttcttagtcttttatctagcgcggcgtttggtcacaccaggcatgccggaaagttatcgattagtctctgaaaccatcgcaacaaattcgattacacgttccagcgtcggccgcgttttcctgctgcaagatacttcattttcaaatttgtgcattttccgttcgttataaaaagtcaggtgagttgcgctgctatctacgagcattaggaaaacttgtagaaaaagttgaaataactgattaagtgccgaacaatagaggcggcactgtttcactcaaaatcgaaataacccccctgcctgtattagtgtaaagtcgctgtaaatattgaattaaaatcgccatattgtgcaatttttggctccttatcaaatcgtttaaagtgcgtcgactggattagctaagcgttgcgattgattaaactagtattagccgcgccatttgcctccacgcccataaacaaacgccgacaaactcacttcgttttcctcgtccgctttagtacagtcgcttgagtggaaagcgatgtgcgtgtgtgtgagtgagacgtagaggagactgcgagagagagagagagcgcgttagagaaactcgtttagcttctgtttttgagcgttttgtgcgtttcccctctttcgtgttcggttctgtttggaattttatcagggcgcaaaaataacataccctacaccgaacgaaaaagttcaaatataagtattgcatataaaacgcgtttagaaggcacgcaattgtgttattcaacttttcttcaagtgttgtgtcctaaagaggtcagtcacaaaa

SEQ ID NO: 16190 - DNA, 1572 bp, DROSOPHILA
acactgctctgcgctgttttttcctccgcatcacgttaaagattttaaaatagttaatttcactttaaaagctgtattttaaagtgataaacgtgcacaaaagcatttagttgcgaatttatagccgataactagttaaaggtaagaaagccgcagaaatggccgacaatgacgatcttttggactacgaggatgaggagcagaccgagaccactgcggtcgaaaaccaggaggcccccaagaaggatgtcaagggcacctatgtgtccattcacagttccggcttccgcgatttcctcctgaaaccggagatcctgcgcgccatcgtggactgcggcttcgagcatccctcggaggttcagcacgagtgcattccgcaggccgtactgggcatggacatcctctgtcaggccaagtccggcatgggtaagaccgccgtcttcgttctggccacgctgcagcagctggagccgtcggacaacaacacctgccacgtcctggtcatgtgccacacccgcgagctggccttccagatcagcaaggagtatgagcgattctccaagtacatgcccacagtcaaggtggctgtcttctttggcggaatggctattcaaaaggacgaggagaccctcaagagcggcaccccgcatattgtggtgggcacccctggccgaattctcgccctcattcgcaacaagaaacttaatctgaagcttttgaagcactttgtgctcgacgagtgcgacaagatgctggagcagctggatatgcgtcgtgacgttcaagagattttccgtagcacgccgcacggcaaacaagtgatgatgttctctgccacattgagcaaggacattcgtcccgtttgcaaaaagttcatgcaagatcccatggaggtctacgtcgacgatgaggccaagctgacgctgcacggactgcagcagcactacgtcaatctgaaggagaacgagaagaacaagaaactgttcgaactgctcgacgtgctcgagttcaatcaggtggtcatctttgtgaagtctgtgcaacgttgcgtggctctgtcgcagctgctgacggagcagaacttccccgccatcggcatccatcgtgggatgacccaggaggagcgtctgaatcgctaccagcagttcaaggacttccagaagcgcattctggtggccaccaatctctttggccgcggcatggacatcgagcgtgtgaacatcgtgttcaactacgacatgcccgaggattccgacacctacttgcatcgcgtggcccgtgccggtcgcttcggcaccaagggactggcaatcacattcgtttcggacgagaacgacgccaagatacttaacgaagtacaggatcgtttcgatgtgaacatcagtgagctgcccgaggaaatcgatctctctacatacattgagggacgctagagctcgaaggtgcatgttaatcggaacaagactatgcacttcgaatagatacaaacctaaaaccttttttaaaactctactttataactaaataaaaactattcagacaatgtgttgacaaacaaaaacggaattataa

SEQ ID NO: 16191 - protein, 424 aa, DROSOPHILA
MADNDDLLDYEDEEQTETTAVENQEAPKKDVKGTYVSIHSSGFRDFLLKPEILRAIVDCGFEHPSEVQHECIPQAVLGMDILCQAKSGMGKTAVFVLATLQQLEPSDNNTCHVLVMCHTRELAFQISKEYERFSKYMPTVKVAVFFGGMAIQKDEETLKSGTPHIVVGTPGRILALIRNKKLNLKLLKHFVLDECDKMLEQLDMRRDVQEIFRSTPHGKQVMMFSATLSKDIRPVCKKFMQDPMEVYVDDEAKLTLHGLQQHYVNLKENEKNKKLFELLDVLEFNQVVIFVKSVQRCVALSQLLTEQNFPAIGIHRGMTQEERLNRYQQFKDFQKRILVATNLFGRGMDIERVNIVFNYDMPEDSDTYLHRVARAGRFGTKGLAITFVSDENDAKILNEVQDRFDVNISELPEEIDLSTYIEGR

SEQ ID NO: 16192 - DNA, 3319 bp, DROSOPHILA
ggcaaaggaacatgcaacctgggaatgtacttcgatcaagtaagcaagagttgcgtttattcggaggacacagtttgtgccgccaaatatgagatctgcgacgttgcgcccgtaggcacaccattccgcgatgatgccaactgccacaagtactatacctgcagcagtaagagcctggtggaaaatacatgcgaaaatggactgtattacaacgtggccaccggaacttgtgtgaggaaaaaggacgttatctgcgagaaccatccgttgccagatgaggtgtgtggcaacaagaagctggcggtgcgcaacaaattcgtttcagatatggccacatgtcgcggatattactactgccgcgatttgggatccggtatccccgataccgatcccatataccagcagtgtgacgagaacaacttcttcaaccaggagcgacaggcgtgcatgccgcgcgagagccagaaatgcgattacgatagatgtgatgggcgcaaggatggcttcgaagtggccgaaatcgatggatgccaccactacatcgaatgcgtcgatggccgggaaacgactcccataagctgtgaggataagtatttcgacgttgtcacgcaaaactgcagctcaactcacttagtttacggagcttgttcctcttaactgctaggcatttgccagctgttcgtaaagtattaattaattgcaaataaaaaaccaatatcagtgtacatacatgaaattttgaactttcggatatccattaatcagaaattacagagaccatagcgttcgtttgcctagtgtttctggtcaggaacatatattactttattgggttcgaaacgcatccctctaatatcaaaatttgaatcttttcatcaattaggattaagttagaaaattatatatctttaatcatcataatattcttttttagggtgttaaggttaaatgtatgtgccaatatatacagttgttaacacctattggcctcctgagctttctatataggcttgtagtccagacgagactccagcttcttattgtccgctattttgcggacggccttcatgaaatcttcttgaatgacaaactccctatcgcagcggagggcaaaaagcccggcttccgtgcaaatgttccgtagatcggcaccattgaacaaatcggagagcttaaccaccgcctcatagtcgatttcgccgcgtttgttcagtggttcggcgtgaatcttaagaatgtccatacgcgccacttcgttgggcagcggaatttccaatttgcgatcaagtcgtccaggacgcagcagcgccggatccagtgtatccggacgattggtggccatgatcattttcacctggccaagagcatcgaatccatccatctggttaagcagttccatcagcgtgcgctggatctctcggtcggcggatgttccctccgagaagcggcgaccaccgattgcgtcgatctcgtccatgaatatgatacatggctgatgatcacgggcgtatgcaaacatctcccggatcagtcgggcactctcgccaatgtacttgtccacaattgcagaggaaacgaccttcgggtgagttttttagaaacaaatttaaatatttatttataatatctattgcagatgtgaaacactgaccttcaagaaattggcgtccatctgggaggcgatggcgcgggccaggagagtttttccggtgccaggcggtccgtagagcaggcatcccttgggcggacttatgccaacgcgtaggaaaatatctggatttagtagcggcagttcaatgacctcgcgaagctcgcggatttgctgaccaagtccaccgatttcagcgtagtttacgtttccgggatcttcatgggtcatgttgtacaccaggggatccacttcccgcggcaaatagcgcatgatggtgagagtggtcacatccagggcgacacgtgtgccgggctttagcttctccttgttaatctgccggcgacatccgaccacgtagcgcggtccgttcgaggccttcacgatgaagttgtccggtgtgagctgcttcaggatttccccgaccatctgacccacactctggagagccttcagatcgtcctcggacttttcgtactcggcattcacgaccttgtacttgtctcgcaaagctttcaatttggattcgatctcgcggtgctccagaagcttggtacggtaattggtcagcgccctcacacgctcgtcgtctgttgggggatttgcaagtggagcagacattctcgaattttatttcttcctaactacaccgagtgactttaaaattgtgcacacgtgaagattttgacgtctgtcaatttgaacgatggagcacttcgatgaaccggttcataagaaaacgacaacgaacatcgctctaaaagttctattaacagtacagtggaacgtgagagagaaatattaatttaaaacaacagaaaaattatttaatgactaaaataatatattaagtaaaatatatttattgcgagcaactgatgcttacaacaatgtagatacctataaaacgccagtaaatattcgccaagatttcgatattaaattttaagacatattgtaatacatatttgtataactatattacaaaaaataaggtaagatgacgaattacttaaatttgtttttaaaactatttcattgttttacaatcaaagccatttatccaaaggttgaaagctttgaaagctttcgctcaaagaagatggcgccactttgtgcagaaaaaattctgaaatgagaaaaacaaattataaagtaaggagcgttaaaaaagattgaaatattttttaattttggcattttatatttatatttatggattttaagacttttacaagtttagtttaagatggtattattcttgtttatagtcttggcctaaagtcacctattacaaggatattaagagctgcattttgtgtccacaaacttaaacagaaatcgacaattgtacagagccagtgatttcgactttagtagtccgctggcacgtgaatgccatcgaatgcgtcggaaggtgctggccgggaaccaaatgtcagcacggcatccggggccataaatcaggccattttgtagcactccgtgttgcgggtccagctggttcgagtggtttggttaccacgaccaaaatatccagatatccactgggacaactgcatccacgggtcgaaatgccccgcatttgggacacatgacaaatatgcagtttgcaaatgtctaatgaatttgaacacgccttgcagcgccaattggtgccaagtattttgc

SEQ ID NO: 16193 - DNA, 1247 bp, DROSOPHILA
gcacaattttaaagtcactcggtgtagttaggaagaaataaaattcgagaatgtctgctccacttgcaaatcccccaacagacgacgagcgtgtgagggcgctgaccaattaccgtaccaagcttctggagcaccgcgagatcgaatccaaattgaaagctttgcgagacaagtacaaggtcgtgaatgccgagtacgaaaagtccgaggacgatctgaaggctctccagagtgtgggtcagatggtcggggaaatcctgaagcagctcacaccggacaacttcatcgtgaaggcctcgaacggaccgcgctacgtggtcggatgtcgccggcagattaacaaggagaagctaaagcccggcacacgtgtcgccctggatgtgaccactctcaccatcatgcgctatttgccgcgggaagtggatcccctggtgtacaacatgacccatgaagatcccggaaacgtaaactacgctgaaatcggtggacttggtcagcaaatccgcgagcttcgcgaggtcattgaactgccgctactaaatccagatattttcctacgcgttggcataagtccgcccaagggatgcctgctctacggaccgcctggcaccggaaaaactctcctggcccgcgccatcgcctcccagatggacgccaatttcttgaaggtcgtttcctctgcaattgtggacaagtacattggcgagagtgcccgactgatccgggagatgtttgcatacgcccgtgatcatcagccatgtatcatattcatggacgagatcgacgcaatcggtggtcgccgcttctcggagggaacatccgccgaccgagagatccagcgcacgctgatggaactgcttaaccagatggatggattcgatgctcttggccaggtgaaaatgatcatggccaccaatcgtccggatacactggatccggcgctgctgcgtcctggacgacttgatcgcaaattggaaattccgctgcccaacgaagtggcgcgtatggacattcttaagattcacgccgaaccactgaacaaacgcggcgaaatcgactatgaggcggtggttaagctctccgatttgttcaatggtgccgatctacggaacatttgcacggaagccgggctttttgccctccgctgcgatagggagtttgtcattcaagaagatttcatgaaggccgtccgcaaaatagcggacaataagaagctggagtctcgtctggactacaagcctatatag

SEQ ID NO: 16194 - protein, 398 aa, DROSOPHILA
MSAPLANPPTDDERVRALTNYRTKLLEHREIESKLKALRDKYKVVNAEYEKSEDDLKALQSVGQMVGEILKQLTPDNFIVKASNGPRYVVGCRRQINKEKLKPGTRVALDVTTLTIMRYLPREVDPLVYNMTHEDPGNVNYAEIGGLGQQIRELREVIELPLLNPDIFLRVGISPPKGCLLYGPPGTGKTLLARAIASQMDANFLKVVSSAIVDKYIGESARLIREMFAYARDHQPCIIFMDEIDAIGGRRFSEGTSADREIQRTLMELLNQMDGFDALGQVKMIMATNRPDTLDPALLRPGRLDRKLEIPLPNEVARMDILKIHAEPLNKRGEIDYEAVVKLSDLFNGADLRNICTEAGLFALRCDREFVIQEDFMKAVRKIADNKKLESRLDYKPI

SEQ ID NO: 16195 - DNA, 3592 bp, DROSOPHILA
acaggttagtttatgactctattctaagcgatatattacgatagattattctcaggtcgtcaccctggccgtctactcgtactttgtggcctcgatatttggtcaccagtggatcgatcgggatattaagcactacaataatattgttagttactactttccgttgttcagcactctggagtttttcttcttcatgggctggcttaaggtggccgagacattgatttgtccttttggcgatgacgacgatgactttgaactgaactggctgatcgatcgcaacttgcaagtgagttacttgatcgttgatgaaatgcacaatgatcatccgcagttggtgagggatcagtattgggatgaggtgtttcccgctgagttgccatatgccgtggagtccgatagggccgaacatccggaggcatcaaccgctcgattgggcataccaaaagttgtccccgtgaccatgacgaaaagcgaagtcagtttggaaaacgattttacagagttcgacgatgaggatgaatacaacccggaagtaactatacgatttgcccgccgggagttcagttggagcaaaagttcagtatcggtatcgtactcctatgacaaccagagtattgatacccttgacgagaaggttgatgaagagaacgagggagatacaaggactctagattccagaaacaaggacgactttgaccgtctaaaggagaagcgggacagggagcgtgtgaaccggcagatgcaacaagccgccctcgccatggagttgattaaaggggatctggcttcgaatggaggatcagctcgatcaagtcgtactaatgtcccgcaaaaaaattctgatgtccagaccgacagaagctacttaagtcagaaaaagagaaaggaggaggacacggacaatgataaggacagtgacgaatctaagaaataacgaatgaatccttaaaatgtacagaaacaaattgtgattttaatatttttatttcgttttcgtctaatcctgcttttccgtcttatttggagggggttccttgctgcccgatggatcctgttgagctctgtcccccgcttcctgactctcggacagagtttcatcggatgggggacgaagaactgtgatcgtataaggagcaccggaggtatcatgtcgcagatgggtactttgcatatccaaaaatcggtgtcgaatgcgttccctgcgttcgcgacgacgctgctcaattagatcgttaaagtcaactgaaaagatataagagcaaaaaattaagagcgaataaagttagataatacaaagcctacttgtggattgcgacggcttgtgtgagctgttcgcttcatcatgtggcaaatcaaattgattctcactgaaggtcactcgcgacggcccatcttccatttggatggagtctgagtagctaccagtggcagatggtcttcccaggaagttttgtcggaagttgtttcgcgaacgggtactaagagttgacattgcagattcatggcgtttctggagctaaaaatccggatattagcttattcattaatgagaatacaaaaaataaactttacttttgattgtgattccatataggccgtggaagctgctggaggattttgacgcatttttggctgagcgtatggaatttcattagggaagacctcttcccaatactgatccttaacaagttccggatgctcctggtgcatctcatccacaatgcaataagaaacggtaagattcctatcgattatccagttgagctgcagtaaaataaagcattagactatatgtataagtaggaaaactatgttataccaattggatgtaatagttaatcgaacttaagcactcacctcgaagtcgtcatcatcctctccgaaaggatttatcagcgtctcggctaccttgagccaacccatgtaaaagaaaaactggagaacggtcaggatcggaaaccatctcctgatcctagtaccatcctcgtcggaatgactttcattccactgctgtccgaggacactgaacaggaagaaggagtacgtggccacggtgaccacttgggtgtagaccagtggaacacttatccaatcgtaatagagcaaaaatccacaattcccgcgtaactggttcaattcatcgatgatggtcttaacagcgtagtcatcccggattttattctccctccgcgctctcatcacaatactagctgcccaaacgatgggcatccagtgctttggataacttgggaaggcctgatccatggcctcaatgattttcttttcattttccagcagaaagccagcctcaataatttgagtgtaggtggggaatcggcgcttgacacgcggtgatatcatggtgaatactatcacctggcacaggcacacatatcttaggatagttcgcctcattaccctggctctatcatcggagccatggatactggtgcttatcaaaatggcaattccatctggccaaggaatggtggtatattggtcccaccatcggttcatcacgattctcacgaaaaatcccaaaacgaacgataacggaatgagggagccatttttctcgcaatacgacataatggcctcaaaaaacctgtgacaaagcttgttattttaaagaggaatacaaataaacgcttaccttttgccctcttcgtttaccaacagacgatatgtaattgccagtaaacagtacaatccgaaaaatacaataaggtccaaccatattaacttgtaaatactgccgcgccatctttgaaataggtgttccttttaaagcttaaaaatggaaaaatatatatatatttgaagtaccaacctgaccagcagccccaagaaattactgagaacactcgaggtactcacacgtgaggtataggtcacagtcatgacgagaaattcgtattgaataattttcaaatgggcaagatattttccattagcaatgacagtgaaagcaaagctttacttaaaataataattattctttacattgtgtgaaaaaccagcacagttgtatttattttccctcttcacaaatgtttgagctgtattattcaatattattattatgttctggagtgaaatgtaataaagacaaaaaacctgtcgcaaaataattcaaaagacatgattaaaaaggtgatagcacaacatcagtgacatgtatttacttttcacacacaaaatattccctggccttaaagtattccatgagcaattttatttattctgaaaaccatttccgttatattttcttttataccgcgagttaccacatctacatctacttccccaccccctaaacctccacgccagaaccattagttcgttggcccacatctgaccacatcagcagtccacgccactacttccccacccccctaaacctccacgctgagccgctagttcgttgtcccctcatgttgcaacagtgtaggcggaaacagcgcagcaaaacggaggcattccccaaatccgctgggtcagcagattcgcgacaacacagagccatacataatacttgattctcctttgtaataagtcagtcttaagctacactcgatgagagtgagat

SEQ ID NO: 16196 - DNA, 1345 bp, DROSOPHILA
atgtcgtattgcgagaaaaatggctccctcattccgttatcgttcgttttgggatttttcgtgagaatcgtgatgaaccgatggtgggaccaatataccaccattccttggccagatggaattgccattttgataagcaccagtatccatggctccgatgatagagccagggtaatgaggcgaactatcctaagatatgtgtgcctgtgccaggtgatagtattcaccatgatatcaccgcgtgtcaagcgccgattccccacctacactcaaattattgaggctggctttctgctggaaaatgaaaagaaaatcattgaggccatggatcaggccttcccaagttatccaaagcactggatgcccatcgtttgggcagctagtattgtgatgagagcgcggagggagaataaaatccgggatgactacgctgttaagaccatcatcgatgaattgaaccagttacgcgggaattgtggatttttgctctattacgattggataagtgttccactggtctacacccaagtggtcaccgtggccacgtactccttcttcctgttcagtgtcctcggacagcagtggaatgaaagtcattccgacgaggatggtactaggatcaggagatggtttccgatcctgaccgttctccagtttttcttttacatgggttggctcaaggtagccgagacgctgataaatcctttcggagaggatgatgacgacttcgagctcaactggataatcgataggaatcttaccgtttcttattgcattgtggatgagatgcaccaggagcatccggaacttgttaaggatcagtattgggaagaggtcttccctaatgaaattccatacgctcagccaaaaatgcgtcaaaatcctccagcagcttccacggcctatatggaatcacaatcaaaatacccgttcgcgaaacaacttccgacaaaacttcctgggaagaccatctgccactggtagctactcagactccatccaaatggaagatgggccgtcgcgagtgaccttcagtgagaatcaatttgatttgccacatgatgaagcgaacagctcacacaagccgtcgcaatccacaattgactttaacgatctaattgagcagcgtcgtcgcgaacgcagggaacgcattcgacaccgatttttggatatgcaaagtacccatctgcgacatgatacctccggtgctccttatacgatcacagttcttcgtcccccatccgatgaaactctgtccgagagtcaggaagcgggggacagagctcaacaggatccatcgggcagcaaggaaccccctccaaataagacggaaaagcaggattag

SEQ ID NO: 16197 - protein, 327 aa, DROSOPHILA
MSYCEKNGSLIPLSFVLGFFVRIVMNRWWDQYTTIPWPDGIAILISTSIHGSDDRARVMRRTILRYVCLCQVIVFTMISPRVKRRFPTYTQIIEAGFLLENEKKIIEAMDQAFPSYPKHWMPIVWAASIVMRARRENKIRDDYAVKTIIDELNQLRGNCGFLLYYDWISVPLVYTQVVTVATYSFFLFSVLGQQWNESHSDEDGTRIRRWFPILTVLQFFFYMGWLKVAETLINPFGEDDDDFELNWIIDRNLTVSYCIVDEMHQEHPELVKDQYWEEVFPNEIPYAQPKMRQNPPAASTAYMESQSKYPFAKQLPTKLPGKTICHW

SEQ ID NO: 16198 - DNA, 6351 bp, DROSOPHILA
cgtcaaattcccgccgtgcacagcccttttacaagtgatggcgccgtgtaattttaattgcagcaactatatctgcagtgcgggtgtccggcaattcaggtgaatggcggcacattcagagggcctccactttctatccagcttttaatgcactctggcggagattccaatacacaggcatttcccaaactcattatcagcgaggccttttgtggacattccgggttcacggctggattggtcctggcagattgccgcctggagatcgccctggggcactgactctgccattgccaagtgctccattgtctggctgcgagtggcccgcatgggatgggttcaacttttaaactaaattgaatacccctttgaatccgacaatgagctggatgcctgttcttgccgggattaagctcacagttgggtttctcgcaccctcacatcgttattgtctgtaattgttaagacgattttaggtttaatagctgccatttcaaatagagttggagtctgttggctgacccctcgaaaactcaagactttatcttttgttttaccacaaggatgcaattgcacactctatgtggccctaaggggtgtgagacttttattgtgcaatactcaggaacaaacggcctgggaaacttaaagcatgacaggagtcttcaactaggaaatattttctcggttaataatgcactctaaagaacttttaaataccattgtatgtagatgatgatgtagatgataccattgtatgatgaaatgattgcctgatagttaggacctgaaaaaatgaattctagccatttgcatagtttgattacgactttataggagattgtttacagcgtacagatagttctacaataggtgcgattgcgattgggtgtgctttactaatagcgttactaacatagggcgtttatttctaactcgatcgaacatccaggggggtcatgcgtctaaaggctgtgggtttatccgtgggatgatccgatcactgcagcgtgctctgtggcggagtgagcggggtccaggtgtcggcagctacggccggagctccattcaccacggcggttggcaccgagaccacggcagctccaccgccaacagtgccccgttccccggcgtgctccagggatgaggactctatcttgatgtcgtgagagctcttcagggaggaactggcgcactccagcgttatgaccgagccctgctcatcgctcggcttgtacatggcagcctgggggtcgtccagtgtctttgaaacatcaacgggctccaacggatgagtggcatagctggaaggcggttggtgggaaatcattgatagctacgttagcggtaagtgcgcacagttccccaccgattcaacctacccgatctccaggggaatgtattccggctggtaatacgcggcggcagcgttctggtacagtccgtactccgccccggatccattgtgccaaccactggcggaatagcttagcgccgagggcgcattgagaaccgcattcgtgtacagctggtgagtgggtgaggtgggcgtgggatggtacacctggtgggcagctgcaccgtatgccgcttgcggggatcccgttgttcctgccccgcccccaacgcccactccggttccatagatatccgtttgggccatgttgtactgatgactgtgtggcgtcaggtgatgaatggtgtagctgggcgaggaggtcgtatagctcggggatccattcgtcggcgacggagagttatgagatgctataaaattaaatttatcagtcacctatcttccatatcatgattgtaaatagtcattataatgtgtgcagcaaactagaaactgtcaaaaaggtgataccattgtccaaagttgaactttttacaaaaaaaattactctgcttacttaataatatttaagtatatattttactttaatggtaaattgctaagtgcattgaaaactgtcacgattcttaaattatttcaaaagcaaggagctcaaaacttttgatacgcgaaaacttaagagcaacactaggtactttttaattaaatttccgtttcgaaagttcaaaggtcacgtagcttgttagcaaacgtattgtatctttggttagcctttcgggtatttttgcaaagatataagcagaagcatttcctcctgccctccatgaagtacttacagatgttgcggccactgcacacgttcatgggcatgggtcccggcacgctggtggcgttccagtaattgccattgctctgccagctgctgggataggagaacacggacgccgtgggactggcatcgaccgacatgaagccggattgggcgtaggaactgctgaagcaaccagtactcggcgcagatccgatgccgccgccgctcgagctgctcacactggtgctcacggagccagtggacgtggagtgcaggctggtgggcgtttgtggagccgacggcggctgcggcgatgtggacgaggcattgccggcactgccatttgatccggatccggaaacgaccctgggtcgactgtacggtgtggtgcgagtgggtgcgacactgcgtgaagatagggatctgccgtagcgatcgcaactgccgcccgatgatggacccacggattcggccgaggaaacgctgggacacgaggccaccaggccgtgactctgggcaatggacaacggaggaggagctgccacggcggccgccgcagccgtataatgtgtgggcggtggaatgagccagccgtagtgggtatcgtgtggatacagtgtatccggtcgctctttggcatccagaaaggccttggcaaatggattatacttgatcttcagcgatgtcacctcctcattctgatacgccgtcaccgcgataaactgcgtttccggaaatggataggtgaccacgtgacgctgctcggaacccacgcgaaccagatgcacacgtggttcgtacttgtgcaacgaatttagcattatctgtaagatagttgtgtttaattataactggttgctttgatggtaaggattttcgtggttctgctcacctgtccattgccattggtcttgttggtcagctttactttggcaaacgagatgggctccttcatccagtgggctccaaaattgggagactcggggtgtacgtagatgggatttgacgggggaacctctgccttgccaccaggaacctaagtgggttaaaataatgttaaaaaatataaataacaataagaaggtaaaataaggtaattacgaaaagccttataacataaacagatacttcagatttgcatgggttttttgataattgaatagacttacccattcaccgttgacgtacttccagcgatgtgagtcgatctggacgaactccaggaggacggtgtacatggcggcgggatccagaccggaggcactgatcttcacgaccgggaacatgcgcctgtttgtgacaacggtgttggcaattagcaattataacagttatataacaatggcccttgcattcgtaattgttaggcaaatagtgagcgccaatgttttacctatgcctttgcctttggcccagacctcaaacgaaattccagccgaatccgaacctccaacctcgagatggagcagaaggcggaggagcgtagacggcagggattgcgttgcgggcaaatattggaacgttcaggcgggctctgttccacaacaattagtacaagatggcggctgttgccgggccacgctaattagcacctgaccaggccagcagacccgactctcggcccggttccaagttctaaacgcgcgtttcgcacacactcacctccgcacgctcgtacatacatacatatgtacatatgcccgtaaattggtaaatatttttagttatttcaacaaatgctggcatgtaaataaacagacggatggatgtatctttacactcaaagaaataggaagtataccttatagaaacttcgtgtttcgattaataactgtgtagagttacaaaaccatgtttaaaatgactgcgttaggatcagtctaagcatattctataattttacttatcaattgatattatccatatatgatttatctaccaattgtattacatgctcttggttttcttcgaatgtatcggctctaggctgagctggagaaacgttaacgcttcattatgacttgcaaatggcgagcagtgagatgaaaaccgtggaaaagcgatgcatcaaaaacaaaagcgcaaaaccccattgccaatttgcataggaaaacaaaatgcgacgccgtcgccatttaacacattcgaatttcgaacagcgctcacaaaaaataaaataaaaaaaaacatacaatccaatcaattcgactcactcacctgccgtttttggtgacgatcatctcgttggtgagattctggaaacgcagccagagctcccgatcgtccagcgagatgcgcagattgcggtccagttcattgggactgcctgctccgcccaccacgcgatggcctccatttccggatacactggctccgcctccgcttaccgctgccacgccccccagcccgtgaccatgcccgtgtccattgtgggtcacatgctgtggcgaaccactgccagcaccgccaccagcaccgccacctcctcctccgcccgaaacattgccactgagtccggttgttggatccacggcggacaggatgtgcgatgtggtcatgtcagctggaaggcaaaaaaagaaatgtaatcagttttaaaataaagatggccaatgaaataggaaattgtctaaatatttcaaagacacaacttccctaagaacatttcatatttatgcttttgtcaaatattcattgtcatttgtaatcatcgaacctttcaatttgttatataactcgtttataaatattttgacataaaatataatttgaaacaagtgagcaatgattaagggaacacataaaggtagattctttaactcatccccttcatctggggaatccagaagtgaaaacatggccttctcgaatcacaatcgtgtccgtggtcagcgctgatgggatggatgggcattacatcaaagcaatctcaaccggctggccgacgaagtgtcggctttatgcgtttacagcactgtcccaggagcattagaagaatgctcgtcgagctctcttgtcggcttttaattatattgcacactttagccatgcctggcatttcgtctgcgagtgggtctgggcctctaaattgggattgggattgcgactgggaatgggaatgggagtgggactgggactgggactgggactgggattgagttggctgagatgctggctggccataaacaacgggcaccctttttatttatggccgcggcaacaaacacctctgttttgcgtcggaccagggtcatttgtattccgaatcggatgcctgcctgcctaccaaagaaatgccctcagatgtgccggttcggtcgggtgatatctatattgtgaacccagtcccaccaccgaaagtgtttctcgcaatgttttgtaatcataaatttacaaaatgtattaattgttttgtttgtctttattgggccacgaaattggaggccaagtgccgccgcctaggattcttttatggaagaacgaactcaaaaaagtattcccaaagactgattgttcttgcttctattgtagcatccagatttgatttattggaaatttcttcgcccatcctacgtcataaaatggcaaatggtcgtatgcggtttgatgtctttcgtatttgtcaaccgtttaatttgatggtgtgaagcgaacaggttttcctgcgggttctaggtgaaaacaagacatataatcaaatcaatcatcaatcagcggatgcatatgtatgtgttatctgaaggctattaaattataaagtaaggagagcgaatcaatcaaagcgagctgttttcgaaaacatgtgttgtggagttgacaacgaatcaaatcagaactcttaagatacatttacattggataaatttcaattttaacttctaaaagtggataccaactttaatataacatacttgtcaactaaccagggacatcttattgcccgaatgtccgtaccatttcaaccagaagctgggcccaattaaaagtttcaattcgaattcaatcggccgagtttaaaagttcaaccactttgggccagcattcgaaagttatattcagtttatgaatgttcaaaggtttccgattttcccagctcgtgctcgctccgcattatcataattttcacgcgatacttggcgggtttttctcatgtgcccaataggcgacatcgacgacatcataa

SEQ ID NO: 16199 - DNA, 2244 bp, DROSOPHILA
atggccagccagcatctcagccaactcaatcccagtcccagtcccagtcccagtcccactcccattcccattcccagtcgcaatcccaatcccaatttagaggcccagacccactcgcagacgaaatgccaggcatggctaaagtctgacatgaccacatcgcacatcctgtccgccgtggatccaacaaccggactcagtggcaatgtttcgggcggaggaggaggtggcggtgctggtggcggtgctggcagtggttcgccacagcatgtgacccacaatggacacgggcatggtcacgggctggggggcgtggcagcggtaagcggaggcggagccagtgtatccggaaatggaggccatcgcgtggtgggcggagcaggcagtcccaatgaactggaccgcaatctgcgcatctcgctggacgatcgggagctctggctgcgtttccagaatctcaccaacgagatgatcgtcaccaaaaacggcaggcgcatgttcccggtcgtgaagatcagtgcctccggtctggatcccgccgccatgtacaccgtcctcctggagttcgtccagatcgactcacatcgctggaagtacgtcaacggtgaatgggttcctggtggcaaggcagaggttcccccgtcaaatcccatctacgtacaccccgagtctcccaattttggagcccactggatgaaggagcccatctcgtttgccaaagtaaagctgaccaacaagaccaatggcaatggacagataatgctaaattcgttgcacaagtacgaaccacgtgtgcatctggttcgcgtgggttccgagcagcgtcacgtggtcacctatccatttccggaaacgcagtttatcgcggtgacggcgtatcagaatgaggaggtgacatcgctgaagatcaagtataatccatttgccaaggcctttctggatgccaaagagcgaccggatacactgtatccacacgatacccactacggctggctcattccaccgcccacacattatacggctgcggcggccgccgtggcagctcctcctccgttgtccattgcccagagtcacggcctggtggcctcgtgtcccagcgtttcctcggccgaatccgtgggtccatcatcgggcggcagttgcgatcgctacggcagatccctatcttcacgcagtgtcgcacccactcgcaccacaccgtacagtcgacccagggtcgtttccggatccggatcaaatggcagtgccggcaatgcctcgtccacatcgccgcagccgccgtcggctccacaaacgcccaccagcctgcactccacgtccactggctccgtgagcaccagtgtgagcagctcgagcggcggcggcatcggatctgcgccgagtactggttgcttcagcagttcctacgcccaatccggcttcatgtcggtcgatgccagtcccacggcgtccgtgttctcctatcccagcagctggcagagcaatggcaattactggaacgccaccagcgtgccgggacccatgcccatgaacgtgtgcagtggccgcaacatctcatctcataactctccgtcgccgacgaatggatccccgagctatacgacctcctcgcccagctacaccattcatcacctgacgccacacagtcatcagtacaacatggcccaaacggatatctatggaaccggagtgggcgttgggggcggggcaggaacaacgggatccccgcaagcggcatacggtgcagctgcccaccaggtgtaccatcccacgcccacctcacccactcaccagctgtacacgaatgcggttctcaatgcgccctcggcgctaagctattccgccagtggttggcacaatggatccggggcggagtacggactgtaccagaacgctgccgccgcgtattaccagccggaatacattcccctggagatcggctatgccactcatccgttggagcccgttgatgtttcaaagacactggacgacccccaggctgccatgtacaagccgagcgatgagcagggctcggtcataacgctggagtgcgccagttcctccctgaagagctctcacgacatcaagatagagtcctcatccctggagcacgccggggaacggggcactgttggcggtggagctgccgtggtctcggtgccaaccgccgtggtgaatggagctccggccgtagctgccgacacctggaccccgctcactccgccacagagcacgctgcagtga

SEQ ID NO: 16200 - protein, 747 aa, DROSOPHILA
MASQHLSQLNPSPSPSPSPTPIPIPSRNPNPNLEAQTHSQTKCQAWLKSDMTTSHILSAVDPTTGLSGNVSGGGGGGGAGGGAGSGSPQHVTHNGHGHGHGLGGVAAVSGGGASVSGNGGHRVVGGAGSPNELDRNLRISLDDRELWLRFQNLTNEMIVTKNGRRMFPVVKISASGLDPAAMYTVLLEFVQIDSHRWKYVNGEWVPGGKAEVPPSNPIYVHPESPNFGAHWMKEPISFAKVKLTNKTNGNGQIMLNSLHKYEPRVHLVRVGSEQRHVVTYPFPETQFIAVTAYQNEEVTSLKIKYNPFAKAFLDAKERPDTLYPHDTHYGWLIPPPTHYTAAAAAVAAPPPLSIAQSHGLVASCPSVSSAESVGPSSGGSCDRYGRSLSSRSVAPTRTTPYSRPRVVSGSGSNGSAGNASSTSPQPPSAPQTPTSLHSTSTGSVSTSVSSSSGGGIGSAPSTGCFSSSYAQSGFMSVDASPTASVFSYPSSWQSNGNYWNATSVPGPMPMNVCSGRNISSHNSPSPTNGSPSYTTSSPSYTIHHLTPHSHQYNMAQTDIYGTGVGVGGGAGTTGSPQAAYGAAAHQVYHPTPTSPTHQLYTNAVLNAPSALSYSASGWHNGSGAEYGLYQNAAAAYYQPEYIPLEIGYATHPLEPVDVSKTLDDPQAAMYKPSDEQGSVITLECASSSLKSSHDIKIESSSLEHAGERGTVGGGAAVVSVPTAVVNGAPAVAADTWTPLTPPQSTLQ

SEQ ID NO: 16201 - DNA, 6018 bp, DROSOPHILA
ccctggaaattgattatattgtttaatatttgttaataactctgcaagtctttgatggggatgcaaactggtttctgtttaataacccagctatgttttcgctagttatcaatttcacaaggcttgtaggaagttagtttgcatccccaacttatccagctaatgcaaatggatggtgaatggtatgaacgatgggtaccactttaaagagtggctccgattgggaatgggcttgaaactgggcattggcgtaggcgggaacgccggctccctccaccgccgtctcgtactcttcaacggggggcgtggtcgagggcttggtgacgcagacttgatgatttggatatttgttggcttgcaatttggtgcgcgcctcaagggtgcgtttctttaccatttgatagaggctgctgtgggctggccgaagaggagctgaaatcgacgtgaatgctagttagttatcggcaaaaacatgaaaacacggatcggtttggccagccggccataacctcacttaccgtatgccggcggcgagcgctgcggcactggacccaatagccttctgttggccaggatgtacgcctgccggatgaacctctgcgtcagacatcggaccccccaaatactcatcgtgatttgcactggctgcggagtaggtgacaccacaatccacaattgtgtaacgtaacaacgttgtgcggcgaaagaaacgtgtgttttgcgagttcgtgttttatttacaaaaaaaccaatttctatgacaaatttctccgtgtgaagtccggcggtgtttaattgatctcgactcctttatccctccttgcttttgggtagtccgcgtttaatttatatttatttttcattccctcgcctgtcttgtttttttctgtctctgtcgcagtgtgaccgtcgcaatgaaatgggaaatggcccagcgcctattcgaaattatttggcttgaaaatagccactttttatcaaaaagtgttcgttggtttttgaaatgttgaacaatatttaatttattttgagcaagtgaaattttaaaatcgaacttacaagctctttgttttgaaaacgataaatattaaaaaacatgttaaaataaagatgtgcttccaaaataaagaataaaaattcttatgaataccacttatgtatgttgtcagtacaattgtgcattaatatatattaaatacatgtgggaacattcatttatcagcactcgcttgctgcaaagcggctgcagcagctgctccacttacgggaggcttgatgtccattagttggcacaactggttccgcagcggacgcacctccaccagcggctgggtccagtccgtttcggagagcagtgttaggatctcatccatattctcctcgggcacttcggtgacatcgccgtgcagagccaacgcttcgtacaattttgtggcagcggttttgcgaacgtggacgtgctgcagtccaagaaatactgagagcttggagaggatgcgtttagacaggcgaggaacctggagcaactggcaaaaagcactgatgctggtcgcagtcttgtacagcttcttgtagcccttaacctccaggttgagcagcctaaagatatcctctgcaaagggatttgcttcatcgtgtagaaccgattctacagttccggagccaatgagtatatccaggaaactgagcagaggataggtcacgcgctcgtttagtagatgctcctcgaaaatctggaccacctcggagcagagacgcggaacagtctcaggattggaacgcaagaagtggaataaggcactggaggcatacttgatctgcaggaagaatattttagagattgatatagaggtggtctatacaacttacaagagattcagtcagttgaccaatgctggcactcagacccaaaagaactcttttagagtaatccggcagagagagcagctcgcagaacagcgggaatgtgtgatcggcaaataaccaaagtacggaatccgcatccgcgggaaatatttccaagagttttgagtgctcccgtatgtaggggatcctcggctgatgatggatcagttggcagcaaaggcgaccacctaatccacgagtgcgatcgatcttctccaccgcctgttgcataaagcccacgacaatctcatgcacttgctctggggcgaggagatcaggcggacacgtagtgacgatttcgtatagcgatgacatagccgcctccctcacccacgctccgatgtcaccacggttgtccagggtgtactcttgaagagctcttaacaggcattcgataaccttgttaaagtttttcggctcagcaaatgagtctgaaaaaataattgtatactaagatttgttcacattcttagcccacaactaagatcattgactcaccaattccccctccatatcccacggtcttcaccaacttggtcaaggccagcacgctctgtgtccgtgcctcgctccacctgtatgcctggatgttctcgcggtcacccatttcacccaccagaactgcttgcagtggagttagggagtgcttcaccagactgtccaatatagcctgcagatgacagcggatcataaaggatgggagcacacccagagcagcaatgtagcccatgcgaatgtgctcctccaaatcgttatctgcacctgttagataagtgttgattatggcttcgttttccccgtgcctggaatctgagcagtaataagtggtacagagttcaccgaacgcttccaccgcaccatcccgaatagcgtttgatttggtgatcaaacaggaatcgatgactttctgccaggaaactgaaacgaataaacgcaattaaataatatgcttgttatactttagggactcttttcctacccaagcactccggcgtagcctgcaacttggccagactgcagttctttatgtagctgctggtgcaagatttcatcaggtcgccgctcattccgcgatagaaatttttgtctaggaacgttattattagttcattcagctccgcaacccgttggttggagaggtaaaccacttggggatcactcttttcctctagtttccgtagggtcagtgttatttctcccatggctaagacacaaccatgccggcagttaatatcgatggtgtcagtttttgccagcagttgcggcagcaccacagcggccatgtactcgggctcccaaagggatagtttgtgcagggctttggctgtcagctcccttatagccgaatcccaatggcttaccttatgctgaactagatggttaatcaatggttccctgtacacctcaaactgtgcaatgtagtcactgatgtttagataggaattctgcctgatgcccacggaatagaagtccgtcgtggtggagatttcgattccgaagggaaagttgcccaggcgtcccacactttcctgaaaagctgccgaggcagcccgcctgcagttcacctcgcggtcgaacactgcaacggtcagcaggccagatgagattttgtgcacaaatggcttcacatcatccggattgtaagccctggcaaatgcccagcacatgtagcaggctgaatctcggatgtgttgccccaccgacatgtagcccttcatctcgtcgtagaagagcgcctgcataaggaggggtactagctcctccaatcgatgtggcagcagcaatcccctttttgccagttctgccaaagccaggcatgcaccatgccaggcctcgtggggttccagcgggttgagtatatcaatcacagaccctataacctcatcggccagctccttgggaaggcgattggtgactctgcctaatcctttggcggcgctccagcgtatatcgtttcctccgcttcgcagtgcctggagcagctcctcaatcacctcttctatggcatcggggaccactatttcctcgccttcctccagggattgctccaaaacaactggttcacctcctgccgcagttgtctggtttagattggtggccagtgaacgagtgcctaagaaaacactagtttattatggtttcatgcgtgaataacaaaccccaggcttacctcttttataccgccagctggcaatgcgtggcttcaaatgaaccaatccaattctctggatgatttttacatagttcttgtacttgagaaagtcgttgtcatccttgtactgacaggaagtgatccactgaagaagtttgtccgcatagggcagaagatcttctcgctttccgtgctttaaaatagcagccactgcagccagttggccgaacttgacgttcaacgtgtccgcttggtgctgctccataatccagtccaggaagcgctccagatatagatccttgatgtcactgcgaatgaaatacttggcggccaggaaagcagccatgctgctgcatgtgtcgttggaggacacataaagctggatgagctcgaagatgcgatccatcttggtgttcttcgactgaacatggttcacgggactgcaattggtggtgggagcagatgtggaggtgtcataggcatctagtctcgacatgtgaaagggatttaggaccaggatagacatccacaggagcagtatatagcgcgtttcccactgttcgaactccttgggattttgctgacccagcaaatccagaacaaactccagatcgctcagttcgtgtggcataaactttaccaggaccttataggtgcgcactttgcagatgatgtagagatacttgaaggctgcatgaagctctccagtgtctagatctggcttccgaatcttgtggagcagtttgccgagtaactcctccaaatgtggatccaagaggtgtggctgctcctgatatctagacaaaacctgggcgtactgctcgaactccctttcgaaggtgttagcggcaatggatttgatgttgtcgatcatctccagcacctgctgcagttcggtgaagtgctccagcgtgtttgccggcaggtcctcatccttgcactcttccacagaattcgacatggctgcttgacgattttatcgagttttaaacccacagccggcaacaaaatcaattcgtttgtgaatcatttgttttactgccagggttgcaaccccaatgaaagtatgctggtatgacaccacgaactgactcgtctctttcttactgtttttcgaccaaaagggtctttatctaattctttatctttaaactaacatttttttttggaatcaaatgcagttattgtacattgtgctctttaaacgtttgtaataaatcctactaaataagttcatctagtgtcatagtgcctttggtgtggccgttttgcatgcacctggtaataccgttaagcagctgttcgaccagagctgccaggcgcaattaatcatttatttgtagtggcaagcgaaactgcgagatttagcaagagcaagattttgtatattccaccaaaacgcagcaaagcaagcccgaatttgggatattaaaagtgttaccgtcgggtcgaaaccgctcacacattcgtcgagtttgctgtgagcgcggtcattgctgtgaaaattgcgttgaaaattcgggatccgcaagtttcggagcattgcatttgtggacaaaccgcaatttctggtccactgcgccatgaaatcagataactaccgtctcatacaggaggtgtccaagcggcggtgcctgtgggacacaaacatgtccatttcgtaccgcaaccaggacgcagctctccagtgggcgagtgtcgcgcagataatgcagcaggatggtgagtggcggataaacgaggagggttttatatgcctaggaaacctataaataacacctggtcattttgcagtctcgatctgcaagaaacgtttcaagggaatgcgggacagctaccgggcagaggtgcgcaagatacagcagaaacgaatcgagatgtcccactggccatactttcgctcactggagttcatgcgccaaatcttcgatccggagggcctggtgccctttccaccagag

SEQ ID NO: 16202 - DNA, 3781 bp, DROSOPHILA
atgtcgaattctgtggaagagtgcaaggatgaggacctgccggcaaacacgctggagcacttcaccgaactgcagcaggtgctggagatgatcgacaacatcaaatccattgccgctaacaccttcgaaagggagttcgagcagtacgcccaggttttgtctagatatcaggagcagccacacctcttggatccacatttggaggagttactcggcaaactgctccacaagattcggaagccagatctagacactggagagcttcatgcagccttcaagtatctctacatcatctgcaaagtgcgcacctataaggtcctggtaaagtttatgccacacgaactgagcgatctggagtttgttctggatttgctgggtcagcaaaatcccaaggagttcgaacagtgggaaacgcgctatatactgctcctgtggatgtctatcctggtcctaaatccctttcacatgtcgagactagatgcctatgacacctccacatctgctcccaccaccaattgcagtcccgtgaaccatgttcagtcgaagaacaccaagatggatcgcatcttcgagctcatccagctttatgtgtcctccaacgacacatgcagcagcatggctgctttcctggccgccaagtatttcattcgcagtgacatcaaggatctatatctggagcgcttcctggactggattatggagcagcaccaagcggacacgttgaacgtcaagttcggccaactggctgcagtggctgctattttaaagcacggaaagcgagaagatcttctgccctatgcggacaaacttcttcagtggatcacttcctgtcagtacaaggatgacaacgactttctcaagtacaagaactatgtaaaaatcatccagagaattggattggttcatttgaagccacgcattgccagctggcggtataaaagaggcactcgttcactggccaccaatctaaaccagacaactgcggcaggaggtgaaccagttgttttggagcaatccctggaggaaggcgaggaaatagtggtccccgatgccatagaagaggtgattgaggagctgctccaggcactgcgaagcggaggaaacgatatacgctggagcgccgccaaaggattaggcagagtcaccaatcgccttcccaaggagctggccgatgaggttatagggtctgtgattgatatactcaacccgctggaaccccacgaggcctggcatggtgcatgcctggctttggcagaactggcaaaaaggggattgctgctgccacatcgattggaggagctagtacccctccttatgcaggcgctcttctacgacgagatgaagggctacatgtcggtggggcaacacatccgagattcagcctgctacatgtgctgggcatttgccagggcttacaatccggatgatgtgaagccatttgtgcacaaaatctcatctggcctgctgaccgttgcagtgttcgaccgcgaggtgaactgcaggcgggctgcctcggcagcttttcaggaaagtgtgggacgcctgggcaactttcccttcggaatcgaaatctccaccacgacggacttctattccgtgggcatcaggcagaattcctatctaaacatcagtgactacattgcacagtttgaggtgtacagggaaccattgattaaccatctagttcagcataaggtaagccattgggattcggctataagggagctgacagccaaagccctgcacaaactatccctttgggagcccgagtacatggccgctgtggtgctgccgcaactgctggcaaaaactgacaccatcgatattaactgccggcatggttgtgtcttagccatgggagaaataacactgaccctacggaaactagaggaaaagagtgatccccaagtggtttacctctccaaccaacgggttgcggagctgaatgaactaataataacgttcctagacaaaaatttctatcgcggaatgagcggcgacctgatgaaatcttgcaccagcagctacataaagaactgcagtctggccaagttgcaggctacgccggagtgcttggtttcctggcagaaagtcatcgattcctgtttgatcaccaaatcaaacgctattcgggatggtgcggtggaagcgttcggtgaactctgtaccacttattactgctcagattccaggcacggggaaaacgaagccataatcaacacttatctaacaggtgcagataacgatttggaggagcacattcgcatgggctacattgctgctctgggtgtgctcccatcctttatgatccgctgtcatctgcaggctatattggacagtctggtgaagcactccctaactccactgcaagcagttctggtgggtgaaatgggtgaccgcgagaacatccaggcatacaggtggagcgaggcacggacacagagcgtgctggccttgaccaagttggtgaagaccgtgggatatggagggggaattgactcatttgctgagccgaaaaactttaacaaggttatcgaatgcctgttaagagctcttcaagagtacaccctggacaaccgtggtgacatcggagcgtgggtgagggaggcggctatgtcatcgctatacgaaatcgtcactacgtgtccgcctgatctcctcgccccagagcaagtgcatgagattgtcgtgggctttatgcaacaggcggtggagaagatcgatcgcactcgtggattaggtggtcgcctttgctgccaactgatccatcatcagccgaggatcccctacatacgggagcactcaaaactcttggaaatatttcccgcggatgcggattccgtactttggttatttgccgatcacacattcccgctgttctgcgagctgctctctctgccggattactctaaaagagttcttttgggtctgagtgccagcattggtcaactgactgaatctcttatcaagtatgcctccagtgccttattccacttcttgcgttccaatcctgagactgttccgcgtctctgctccgaggtggtccagattttcgaggagcatctactaaacgagcgcgtgacctatcctctgctcagtttcctggatatactcattggctccggaactgtagaatcggttctacacgatgaagcaaatccctttgcagaggatatctttaggctgctcaacctggaggttaagggctacaagaagctgtacaagactgcgaccagcatcagtgctttttgccagttgctccaggttcctcgcctgtctaaacgcatcctctccaagctctcagtatttcttggactgcagcacgtccacgttcgcaaaaccgctgccacaaaattgtacgaagcgttggctctgcacggcgatgtcaccgaagtgcccgaggagaatatggatgagatcctaacactgctctccgaaacggactggacccagccgctggtggaggtgcgtccgctgcggaaccagttgtgccaactaatggacatcaagcctcccgtaagtggagcagctgctgcagccgctttgcagcaagcgagtgctgataaatgaatgttcccacatgtatttaatatatattaatgcacaattgtactgacaacatacataagtggtattcataagaatttttattctttattttggaagcacatctttattttaacatgttttttaatatttatcgttttcaaaacaaagagcttgtaagttcgattttaaaatttcacttgctcaaaataaattaaatattgttcaacatttc

SEQ ID NO: 16203 - protein, 1189 aa, DROSOPHILA
MSNSVEECKDEDLPANTLEHFTELQQVLEMIDNIKSIAANTFEREFEQYAQVLSRYQEQPHLLDPHLEELLGKLLHKIRKPDLDTGELHAAFKYLYIICKVRTYKVLVKFMPHELSDLEFVLDLLGQQNPKEFEQWETRYILLLWMSILVLNPFHMSRLDAYDTSTSAPTTNCSPVNHVQSKNTKMDRIFELIQLYVSSNDTCSSMAAFLAAKYFIRSDIKDLYLERFLDWIMEQHQADTLNVKFGQLAAVAAILKHGKREDLLPYADKLLQWITSCQYKDDNDFLKYKNYVKIIQRIGLVHLKPRIASWRYKRGTRSLATNLNQTTAAGGEPVVLEQSLEEGEEIVVPDAIEEVIEELLQALRSGGNDIRWSAAKGLGRVTNRLPKELADEVIGSVIDILNPLEPHEAWHGACLALAELAKRGLLLPHRLEELVPLLMQALFYDEMKGYMSVGQHIRDSACYMCWAFARAYNPDDVKPFVHKISSGLLTVAVFDREVNCRRAASAAFQESVGRLGNFPFGIEISTTTDFYSVGIRQNSYLNISDYIAQFEVYREPLINHLVQHKVSHWDSAIRELTAKALHKLSLWEPEYMAAVVLPQLLAKTDTIDINCRHGCVLAMGEITLTLRKLEEKSDPQVVYLSNQRVAELNELIITFLDKNFYRGMSGDLMKSCTSSYIKNCSLAKLQATPECLVSWQKVIDSCLITKSNAIRDGAVEAFGELCTTYYCSDSRHGENEAIINTYLTGADNDLEEHIRMGYIAALGVLPSFMIRCHLQAILDSLVKHSLTPLQAVLVGEMGDRENIQAYRWSEARTQSVLALTKLVKTVGYGGGIDSFAEPKNFNKVIECLLRALQEYTLDNRGDIGAWVREAAMSSLYEIVTTCPPDLLAPEQVHEIVVGFMQQAVEKIDRTRGLGGRLCCQLIHHQPRIPYIREHSKLLEIFPADADSVLWLFADHTFPLFCELLSLPDYSKRVLLGLSASIGQLTESLIKYASSALFHFLRSNPETVPRLCSEVVQIFEEHLLNERVTYPLLSFLDILIGSGTVESVLHDEANPFAEDIFRLLNLEVKGYKKLYKTATSISAFCQLLQVPRLSKRILSKLSVFLGLQHVHVRKTAATKLYEALALHGDVTEVPEENMDEILTLLSETDWTQPLVEVRPLRNQLCQLMDIKPPVSGAAAAAALQQASADK

SEQ ID NO: 16204 - DNA, 3237 bp, DROSOPHILA
aagtctttggcgttttgtatgtgcatccgaatctttgtatcttagtatctttgtatcttagtatctttgtagctttgtatctttgtatctcagcggctccgtatctctatgctttgcatctctcttagcaggcccatcctaaaagcgatctatctcgactttatttttcctcgactcctccgccaaaacgggcacctcctgccgtctgcacatatttatgtacattttttcacagagttgtcatgcggatgataaaaataaaaaaaaaataattacaaattatataaattgcttaattatgataagcttgtggcacgacaacaacacagcagcagaacgaagaaaagttggcaacgggcaaaagcaacgaatgggggcaatactctttaatagatgcaacatatacgcgcagcactctcaattttttatatgcaaaatttgacaagtcaaagaaatatcttttaaatgcgcatgcgacatgcatataagttaagtatttatgttgtaagcttcttattgaaaacttctagttaaataaacaaagggtttatctggtgttaattgaagcgctaatccctgattcttagaagtttacaaccatggattggcaaagcgaaggagttgaccaccatttaatggtgggtcgcagttggaatttgaatttgaatgcgaattggaaacacagtccattgggatttttgcaacagttgccggcacgtgacgtcaggaccgtgagtttattcattttttcgttttcccagaaacttagccctctggcaattatggcccattatcccggcagcggaatggcaattatggtgatgtaagacatggtcagatgttgtgagtttagcatattataaccacagatagctggaatgtacatatatgttgtgtatgtgtatatatttaatggattcctgtatataatctgcgtgcgcatatctgagattagcttaagacacgtataaatacatataaaacgctcgtaacacacagctacaaaaaaaaatgttacgttaacatttacaatagattcttgtttcattatgcttatcaacacgagttattcgatttgcgaaaaaaaaaaataaacggatatggagtacatatacgacgaaacggaatctttacgtccggcagatgcagagagtgtccagaaggaagacagccgcattgatgatcatcagggaaccggctccaatggcctggcgcttcctatcggtattcaggagtccgccgtgccactcatcgatcaccagtgctccggaggccacgaacagcaggcagccgatcagcgagaatagggcgttcaggcgcttctccaccagcgagttgagcacatgacctgtcaaggaatcaggaatcatcttgtaaggatactgcgcgatatccatagttatataggcaacactcaccgatcagcagaacgccgcagatgacggtgtagccaccaacggtgccggccacaatcaccggatggagggacaagttaccaaccgtctcgtatagcacaatgcaggcgatggcgatggcctggcggatgagagaaagatcagacgatatgattagcagtgttgtgaaactttataggaagcaaatctagaactaaatagtttcttgacgcttttttgtttttactcgaatgaaaatggtctcaaagctaaaagaataactgttttaagcagctaattatcaatactaactatacctataagatttgggcggatttgttaaaattaatttttggataattttttgattatttttttaaggtgtaacatcgtcaaaatatgccaaaaatggccaaaaaatagaatttccatttttgaacacagttcgactggaaatttaaatacaaactcaacgatatataacattccatattcagacaattactttttgtgttgtggcaaaaaaacgaaataatttatgacgaaaatttgtctattcgcaaaatgatatattttcaaagaggactttcttcataacttggctaaaaatggtcctaaagctaaaagaaaagctgttttaagcagctaattaacaatactaaccatgcctttcacttttcgaaggatctagaaaaattaatttttggccaaattttcgcattttttgtaaggggtaacatcatcaaaatttgcaaaaaaggtcaaaaatttaaaattcccaaatttgaatgcaaatcgattgggatttaaaaaacaaactcaacgagatataacattccacatttggacaataatttcaatttttatcgacaaaatactgattattattaaccaaaatctgggaatcccaagattcgaaacttataagctatttcaatacaaatatggatttatgtttgataaatttattttattctgcacaggtttgaagcttcccacatatgaaacccttggcacaatttaagtttgcattttttttttagatagaatacttaatacttaatagaagccaacacaacgaaaatgtcgcccgcgaatggcgccattggccaggctcaaaatcccggaggccagcagcaactgcctctcctcctgcgacttgcagtagcccagccactgggcaaggataatggtgccagcggcaccaaaaaggaagaagccaccgatcgagaagagtatatcgaggcgcttgtccaccacagtgccgctcacatgacctgaaaacatatccacctcataaacggtagccagattgcttgctttcagggttttacctgttgctatcacaaagcaggtgattagataaccaatcaaggtgccatggaccaacaacgcgtgccgtatgaatgtcatgtccgaaatgctctcaatcaggataatgctcgtcacgatgaagacctgcgagttaaggactcgatgctcaaaaccttcggatgaacaagttcacagacggacaaactaacggacaaacttacggacaaacttacggacaaatttacggacaaataaaacggacacacagacaagctgaaaagtcaaaagttggcatagatcttctagagagtggcattccatagaggaatcactagatgcagtagaaaggagctcactttagttataccagaatataaaaactttcacctaaaagttatgggtagttcttcaattctgcctcaatcctatcaaaccaaaattaatcacttttggccaacgccaaaagctgtcggaaaaggcgaactgataattttaaccacatcgtgtgcttaatggccttaatttcagg

SEQ ID NO: 16205 - DNA, 475 bp, DROSOPHILA
atgtggaatgccatcgccatcgcctgcattgtgctatacgagacggttggtaacttgtccctccatccggtgattgtggccggcaccgttggtggctacaccgtcatctgcggcgttctgctgatcggtcatgtgctcaactcgctggtggagaagcgcctgaacgccctattctcgctgatcggctgcctgctgttcgtggcctccggagcactggtgatcgatgagtggcacggcggactcctgaataccgataggaagcgccaggccattggagccggttccctgatgatcatcaatgcggctgtcttccttctggacactctctgcatctgccggacgtaaagattccgtttcgtcgtatatgtactccatatccgtttatttttttttttcgcaaatcgaataactcgtgttgataagcataatgaaacaagaatctattgtaaatgttaacgtaacatttttttttgta

SEQ ID NO: 16206 - protein, 114 aa, DROSOPHILA
MWNAIAIACIVLYETVGNLSLHPVIVAGTVGGYTVICGVLLIGHVLNSLVEKRLNALFSLIGCLLFVASGALVIDEWHGGLLNTDRKRQAIGAGSLMIINAAVFLLDTLCICRT

SEQ ID NO: 16207 - DNA, 4625 bp, DROSOPHILA
tccagtcactgatcttgacccaaatttaagtttcacgcgcctaccaacacttgttgctttctccatttcacctaccaacatttcaccaaactatattagcagtccaaaaatatgaaaaaccaaaaccttcgctgcatcgtaaccgattgttataagagtggtcaacaggatagtagctccatgtacaagttccccataaatccggttgtccggcagaagtggttggataatattgcggacataaaagatattaacttgttcaatagtcgggtgtgtaggcggcactttgagacacaatgttttggcaagaccaaggtgttttcctgggcagttcccacacttttcttgagtaagtgtatcgaagcagcctcctagatagcttcctaaacctgttctcttcatgatttagatacaaaagaggtagtgcaccaggtcagtaagccaagcaggaactccttcattcgcagatgcagcgtcaggaactgctcctcacgatctcctccagaacgactgcacttctttccctcgaatcccgaaatgcgcaaggcatggatggaaatatgtcggcttacggtggacaacaagtggctgtttatttgcggcagacactttcgccggacttatctgccaaacaagggaaaccttagaaaggacgccattccagagttccacttaggaacggaggaggaggatcccctcggaaagagcatcaaaagtatgaaatcatgtgctaatagaagtaatatcagtttcaagagcgaggattctggcattgacgaggaaagctttaaggagagtaagcctcataataatccatgcgccaattgccttgatctccaacagcaattggcagcagctcatcttcgcattcagcaacttgaggaaagaaggcaagaggagacagacagtgatgatgatgaggagggggaggaggaggagcacatattcatgctaatgaagtagactattgcttccctttatcccttaaagtatatttattttagtgcatatccagttcgagttcaatcagtcgcttgttcgtgtcgttgggcaggcgatacggcatagttgctgccatgttggacagggctttggctcgctgccggagttgctgcatctgggtctgttccagcgagctgcctgatcctgccttcagctgcttgtactgcttctgggcgatctccatggcggccactataacgtcgggcaggaccttgattacctcgccgctaagttgcttcacattgcccagtacaacatcgacatcgtccaacgtattgggcaccaactgggtttgcctgagcagatccaacgctgcattaaattttccgtcatgatagaagttgaagaagataagcagatcctgcagcagcacaaagctgctcttcatcttgggttccacatcgatgctgtcgctagccagcagctggttgaatctctgagcgtcttggccaaggcgttcccttaacgatccacctagcgtgggcaggtgcaccacctgggccatcagaatgcagatgtgcttcacggccaggttgtacttgcccgccatttcgtacagccgcgccgacatctcaaagttacccagcgcagccagttcgtcgcccacctgagcggccatggtgcgcgtgtcgaactccgggcattcgaactggcggaagagtccactaaaaacacaagagactagactttagactgactgaataaatgtaacattgcatataatcacctgttaacatcgttttggtcactcgactgccgcttgccgaatatcagatcgaaaatggtggtatcaaagactccgctgtccaccacaagatcgcacacacaggccataaacatgttccggcccttggaatccttcagacagcgcagtgtgtagtagtaatgcagcgcctccgaggtgtctgtccgctcaaatcgctgcacatactgtcggataagccgagttaggttcaagcgcctcagtggctgcggatctttaatatcgatcgaaagcaggggctgcgacacactgcgcgcactgcctagaagtcctagctcaaacagcgctatggccatgtgaactgcatgtgcccgattttcatcttggcgcgccaggaactcgatggcggcttcaaactggccggttaatgcaagggtctcgaagtagagatacggctgctgcctagcattgaagtacttttcaccatactgttccaaaatcattgactgcagtttaccatagttgtcagcgtcaccgggctgtatcatggccagccgcatccaaaggaagtcgtctatggtcttggccacttctccgtgtacttcattgacatcgcagcccaaaaggatgcagtaaacggccttcttataggcatcggtggagttgcgtattttgttggcgtactgcagtcgcagttggttttctattttggaattggtttcgccggcattgcgatctgcaacgagctgggcaaactcatcgtggctactgcccgcttcgcgcaggaactcaaccgccaccttaaccgctccgcagcgcaatccgtagtaaaccagcggccataagggtatttcgcggacggtgtccacaagtccgatggtctgctgtgctctgaaccggtggtttacataggccacaaccaactgatagctgttgttggcataggatccaccgacttgggagcacatgaacacacgatagcgccgttctaggtacgatttagcataggtaacaaactccggtctttgctgtcggctcttgatggggtcactgcgcagcggctcgctgatttgggtgacgcaagccagcagggtccacatgtccgtaagccggcaatctccgaagctctgggacagatgagcgaacttttggacgagattgggtcgatggctgctcttaagcagcagttcattgtaatgccgcaactcttgcgcatacactagttccagcggatcgaggcaggaacgtggctgacaaagcggatttacgatggtgggttccggcagccgttgtaggtcgataaagttctgtgacggcgcaattaaggcgtccagcaggcgggtcttctcctcgttccatactttgttcatactggcccacctctgcttgttcgcagagtcgctgatctgcgagtatgggagaagtcaacaatgttttgactatatggttcattacttacattctttttcgtgtcctcgatcaccgagagaattgcattctcgcgttcgttcttcaggaatgtgcgcacatccgtgtccgcctttacgtctagcggctcgaaggttttccgggcactcagcgcctccagcttctggttcagcttgggcaggtccacgcccttggagcccagcagtatgtgactggtgaatgaggttcatatcgattatggttcactttaattcagtattgtttactcacgcctggatctctttgcagccggtttgggtgacgcgggagtggagctccgtggtggcccgcaggacctgctgaagcgtccgctccacggcgggcagctcgcactctgccttcgcgtcattgttcaggttctgggcgcgctgcagcagagtgttcaggtccatttttgcaaataaataaagttgagtccaaaagcagcggcaagatcagtgtgaccagatgttggcgcctcaactgtgttagagatgacagtatcgattccggtacgcctgtgcaagcaattcctagtgttgtataatagattaacaaggaatttaatgaatatgaaataaatttaatattatttccattaaagcatattcgaaaatttgctttaattcatatatttatatttgctttaattcatatatatatatatatatatatatatatatatatatatatatatatgtatatatatatatatataattatcaaagttatagttttagtttttcagtttttttcaatatagttgctaatagttttgccgatagtgctacctgtagtttccacttgccatctctaaaaacgtgataaacacgcttgttttgtttttaaagttggatccacttgcctgcttgcaaaatatggctcttttgactgagaagcgtgttaaaaagacacatgctcctgcgagcgacagttctccggaggaatccgattccgagggcagccagaattcagccagcgaagcggagggcaacgccggctgggcggattccattcagaaggtcctgaagaccaccaagccgaagacccaaaaaaaaaccgtgctagctcgagccaaaaaaagccaggcggctgtgcgattccagaaagacgccgccaacaaaaagccaggattcgatttcgagatcgagaaagcagatgtcaaggaggaggacgaaggcgataaccatgaagacgagaagccgcaggcctctgccttggatgccacgctaaccaaacagcagcgtaagaatgtgcccctccagctgcgtgtgaagcccagtttccgggacatggagcgtgaacgaacgctccgcaaagttgccactcgtggagtggtgcagttctttaatgccgtgcgcattcagcagaaggatctgcagcagcagctggaggaagcgggtccgctggacagccgacaggatgcggtgctaaacaacatcaacaagcgaaagtttttggacgtcctgatgag

SEQ ID NO: 16208 - DNA, 2452 bp, DROSOPHILA
caacatctggtcacactgatcttgccgctgcttttggactcaactttatttatttgcaaaaatggacctgaacactctgctgcagcgcgcccagaacctgaacaatgacgcgaaggcagagtgcgagctgcccgccgtggagcggacgcttcagcaggtcctgcgggccaccacggagctccactcccgcgtcacccaaaccggctgcaaagagatccaggctcacatactgctgggctccaagggcgtggacctgcccaagctgaaccagaagctggaggcgctgagtgcccggaaaaccttcgagccgctagacgtaaaggcggacacggatgtgcgcacattcctgaagaacgaacgcgagaatgcaattctctcggtgatcgaggacacgaaaaagaatatcagcgactctgcgaacaagcagaggtgggccagtatgaacaaagtatggaacgaggagaagacccgcctgctggacgccttaattgcgccgtcacagaactttatcgacctacaacggctgccggaacccaccatcgtaaatccgctttgtcagccacgttcctgcctcgatccgctggaactagtgtatgcgcaagagttgcggcattacaatgaactgctgcttaagagcagccatcgacccaatctcgtccaaaagttcgctcatctgtcccagagcttcggagattgccggcttacggacatgtggaccctgctggcttgcgtcacccaaatcagcgagccgctgcgcagtgaccccatcaagagccgacagcaaagaccggagtttgttacctatgctaaatcgtacctagaacggcgctatcgtgtgttcatgtgctcccaagtcggtggatcctatgccaacaacagctatcagttggttgtggcctatgtaaaccaccggttcagagcacagcagaccatcggacttgtggacaccgtccgcgaaatacccttatggccgctggtttactacggattgcgctgcggagcggttaaggtggcggttgagttcctgcgcgaagcgggcagtagccacgatgagtttgcccagctcgttgcagatcgcaatgccggcgaaaccaattccaaaatagaaaaccaactgcgactgcagtacgccaacaaaatacgcaactccaccgatgcctataagaaggccgtttactgcatccttttgggctgcgatgtcaatgaagtacacggagaagtggccaagaccatagacgacttcctttggatgcggctggccatgatacagcccggtgacgctgacaactatggtaaactgcagtcaatgattttggaacagtatggtgaaaagtacttcaatgctaggcagcagccgtatctctacttcgagacccttgcattaaccggccagtttgaagccgccatcgagttcctggcgcgccaagatgaaaatcgggcacatgcagttcacatggccatagcgctgtttgagctaggacttctaggcagtgcgcgcagtgtgtcgcagcccctgctttcgatcgatattaaagatccgcagccactgaggcgcttgaacctaactcggcttatccgacagtatgtgcagcgatttgagcggacagacacctcggaggcgctgcattactactacacactgcgctgtctgaaggattccaagggccggaacatgtttatggcctgtgtgtgcgatcttgtggtggacagcggagtctttgataccaccattttcgatctgatattcggcaagcggcagtcgagtgaccaaaacgatgttaacagtggactcttccgccagttcgaatgcccggagttcgacacgcgcaccatggccgctcaggtgggcgacgaactggctgcgctgggtaactttgagatgtcggcgcggctgtacgaaatggcgggcaagtacaacctggccgtgaagcacatctgcattctgatggcccaggtggtgcacctgcccacgctaggtggatcgttaagggaacgccttggccaagacgctcagagattcaaccagctgctggctagcgacagcatcgatgtggaacccaagatgaagagcagctttgtgctgctgcaggatctgcttatcttcttcaacttctatcatgacggaaaatttaatgcagcgttggatctgctcaggcaaacccagttggtgcccaatacgttggacgatgtcgatgttgtactgggcaatgtgaagcaacttagcggcgaggtaatcaaggtcctgcccgacgttatagtggccgccatggagatcgcccagaagcagtacaagcagctgaaggcaggatcaggcagctcgctggaacagacccagatgcagcaactccggcagcgagccaaagccctgtccaacatggcagcaactatgccgtatcgcctgcccaacgacacgaacaagcgactgattgaactcgaactggatatgcactaa

SEQ ID NO: 16209 - protein, 796 aa, DROSOPHILA
MDLNTLLQRAQNLNNDAKAECELPAVERTLQQVLRATTELHSRVTQTGCKEIQAHILLGSKGVDLPKLNQKLEALSARKTFEPLDVKADTDVRTFLKNERENAILSVIEDTKKNISDSANKQRWASMNKVWNEEKTRLLDALIAPSQNFIDLQRLPEPTIVNPLCQPRSCLDPLELVYAQELRHYNELLLKSSHRPNLVQKFAHLSQSFGDCRLTDMWTLLACVTQISEPLRSDPIKSRQQRPEFVTYAKSYLERRYRVFMCSQVGGSYANNSYQLVVAYVNHRFRAQQTIGLVDTVREIPLWPLVYYGLRCGAVKVAVEFLREAGSSHDEFAQLVADRNAGETNSKIENQLRLQYANKIRNSTDAYKKAVYCILLGCDVNEVHGEVAKTIDDFLWMRLAMIQPGDADNYGKLQSMILEQYGEKYFNARQQPYLYFETLALTGQFEAAIEFLARQDENRAHAVHMAIALFELGLLGSARSVSQPLLSIDIKDPQPLRRLNLTRLIRQYVQRFERTDTSEALHYYYTLRCLKDSKGRNMFMACVCDLVVDSGVFDTTIFDLIFGKRQSSDQNDVNSGLFRQFECPEFDTRTMAAQVGDELAALGNFEMSARLYEMAGKYNLAVKHICILMAQVVHLPTLGGSLRERLGQDAQRFNQLLASDSIDVEPKMKSSFVLLQDLLIFFNFYHDGKFNAALDLLRQTQLVPNTLDDVDVVLGNVKQLSGEVIKVLPDVIVAAMEIAQKQYKQLKAGSGSSLEQTQMQQLRQRAKALSNMAATMPYRLPNDTNKRLIELELDMH

SEQ ID NO: 16210 - DNA, 2813 bp, DROSOPHILA
ggactgtactcctgcggggaaacttcctgcgcctcagtacacggagcaaatcgattgggtgccaactccctgctggatctgatcatctttggccgcgtctgtgctctggacattgccgcaaacaactgtccgggggataagccgccccaggtggaggacaaagccacggagaagtcgctggataattttaagcgcctgcgctgcgccgacggatgcattcccactgcggtgttgagaatggaacttcagcggaccatgaccaaacatgcggctgttttccgggagggaaaactgctcaaggagggtctgctcaaagtggccgagttatgtgaacagttcaaggacatcaagacaaccgatcgtacgatggtgtggaactccaacctagttgagacgctagagctgcagaatatgctagccaatgcggtgcacatcattacagccatggaaaatcgcaaggagtcgaggggctcccatgctcgcgaggatttcaagacgcgcgtggatgagctggactatggagcaccactggccggacagaaaaagaaaccattcgaggagcattggcgcaagcacaccatgacctttgcactgggtaacaaaggatgtgcatcgatcaaatatcgcccggttgtggacaccaccttggacagctccgttgcacccattccacctgctccgcgcacctactgaacatttatgtgtagttttgagctggtacagtttcattctcttacattctctgggatattaaaacaaaaacacatattgactatcaaaatgtggccattttgtataaatatataagatgaaaacaacaaaaaaaggtattctcttgttctattttaattgtaaacatttcaacgattttctgatactgaaagcccaactcgcagtcatttagaatgttgttgaatgtaatattaaaagaccatttgattaatttttgggtctaattcggcgattgtaaaagaaaatcgtaaaaggaaacatataaattttaaatacttttgaacttagattctctcagttgtcttagcttctgtaaaaatattggagttgtgcttttaattttagaaatcgatttcagcggaagtggactactactttcggttggtcctagcttaaattcatcattcaccatcatattctccgtagttgtcattatagtaagccataaaatgtacggtgttacgatgaaaaaaattaagtccagaataagggcggtcttccaagcgttgcgcccaagaatatccaagtcctttagatccacggccgtttttaaaacaaattcggcggatgtgctccatgtggaggtcggatgtaaccaaaatggcattggaggtaactctgaccattcgcgcagaagcaaaagattgagaatggagttagtatcgtggctggagctcagtctccgaaattccccatccaccacatggtacacgttagcctcccgaaaggcggaaaatcgtccccttagccaaaaattggtggagagatcaccaaaagccaagtccacatcgaggcaacccattgaggtgctagccagctggtataagaccgctttccaatctccgcaactcggctggtgtgacgaacagattagcaaaagccactcgccagtaagcacttccttccagttgccctcatcaatgcgggtaattaatccatctccatattcggccatcaaatagctagactctgatttccgggatgatcggggacatacatcgatattgactggacttttcgggatcatcgcgtttggaataaccccaaagaccgatagaagaaggattagccttgacgtcatcctcccaacgaattgtataatgttttgtattaagatgttttttttcgtatgacttccggtataaaatataaatgactgtgatgtcgcagactatgtttaactataaaagccgaggctacctgaaaaaatatttgacaacttactcagaaatctactaactacaatcacttatgcattgacctttaagatacgattttattacgaaatggaaatgaaataaattaaataacttgtgtgcagagtagtacagttgcctccgcagaacactaacaggtcattagcatgagatggctatcggtaacagtccatctcgattgccgattctgttctcgagcgactgttgccgatggctgagtgtaaataattacccggcgcatggataacttgtaggttatgcgaggagcactgctaacaggaggatccgatggtaggacctcccctaatgaccacaataaattattttcatttaggggcatttagcatagagaaaaagccggagtggctggtaaagaaataatttatagctgttgaaaacttaacatgtttatttggccacatatgtgtgtgtgtgtatgttttgggggaaaatgggaaattgttggggtgtgtgggtccaataataatggcgcttgttagggcttatgagtaaaatgcttgtgtgcgtgtgggggacagcaaatgaaaggccaacagaatagaacagaaccgaaccacaggaatacttggcagggacaccttgcccgtccggacaacgtaccaccacccactggcccaaacaccaaggacatgccccaactatttggtatgtatttcgtgtgccagtgtgggtagaattgttgctatttcatatggttttgctgctggaaaaaattacagttgcatacacatttgcctgtgttaaattgtcccacaaccaatacaaagtgaccttttcatttatttttatgatgccaccccccaccccctcggccccaagcaacatttcccatctaccatttac

SEQ ID NO: 16211 - DNA, 813 bp, DROSOPHILA
atgacgtcaaggctaatccttcttctatcggtctttggggttattccaaacgcgatgatcccgaaaagtccagtcaatatcgatgtatgtccccgatcatcccggaaatcagagtctagctatttgatggccgaatatggagatggattaattacccgcattgatgagggcaactggaaggaagtgcttactggcgagtggcttttgctaatctgttcgtcacaccagccgagttgcggagattggaaagcggtcttataccagctggctagcacctcaatgggttgcctcgatgtggacttggcttttggtgatctctccaccaatttttggctaaggggacgattttccgcctttcgggaggctaacgtgtaccatgtggtggatggggaatttcggagactgagctccagccacgatactaactccattctcaatcttttgcttctgcgcgaatggtcagagttacctccaatgccattttggttacatccgacctccacatggagcacatccgccgaatttgttttaaaaacggccgtggatctaaaggacttggatattcttgggcgcaacgcttggaagaccgcccttattctggacttaatttttttcatcgtaacaccgtacattttatggcttactataatgacaactacggagaatatgatggtgaatgatgaatttaagctaggaccaaccgaaagtagtagtccacttccgctgaaatcgatttctaaaattaaaagcacaactccaatatttttacagaagctaagacaactgagagaatctaagttcaaaagtatttaa

SEQ ID NO: 16212 - protein, 270 aa, DROSOPHILA
MTSRLILLLSVFGVIPNAMIPKSPVNIDVCPRSSRKSESSYLMAEYGDGLITRIDEGNWKEVLTGEWLLLICSSHQPSCGDWKAVLYQLASTSMGCLDVDLAFGDLSTNFWLRGRFSAFREANVYHVVDGEFRRLSSSHDTNSILNLLLLREWSELPPMPFWLHPTSTWSTSAEFVLKTAVDLKDLDILGRNAWKTALILDLIFFIVTPYILWLTIMTTTENMMVNDEFKLGPTESSSPLPLKSISKIKSTTPIFLQKLRQLRESKFKSI

SEQ ID NO: 16213 - DNA, 4487 bp, DROSOPHILA
aatccacaatagtctcttcaaatttagtaatatattgagaattttaaaaacctttaaaacagtaattatagttaatattaattataaatgagagtgcacacctgtagcacagtgtactttgcacccgtggagaacacacaaacgagttccattttaatattctcgattgtctacaggcggaaattacattataccctagggagaaccgaatatttggaaggcgtgtgcaacccgcgggagattcatgttagccatcagtaatgatgaattaacttaatgatatctaagcccgattaccattgttgatttaccaaaataaacgagtaagcacatattcctaatggaagatcaaatgtggcttgaacgtgggctagggcaaaaagagggtattccgacctcgtcatagtccggtacattcagtcgctaagtcttatgtaaaccattttaattatcgattacctcggaatcagttgcattgaatctcgactcgcccaagattagattgattttcaataagatgatattcggaggcggttgatggttacgacaatgacccttggggtctacgtcactcggtttgatggagtgaaaatacagacgccacacagagtgatgaattatataaaattattaaacaccatcataatgtttatttggcgaacattttaattagtacgcgatcttaaagcacacacataatttataataatagtactttatggtgtatttatattctaatgtggccaaataaattcattttcaccgtggactttgcattaatactaaagattaataattattggtcagcgaatcgttgtatgaattgaatgataaactttttttttattgtacatgtcactttttaataagctttagatcaaatctttaatgtcagcttaatgtattgtacaatgtagacattcgctttaaaggtcgcgttcaaattttaattatagaatttaagtgtagaatactttgaaatattagaggtaacttaaaattagccaaggaaaaggccgccgccacggttaatggatcctccaaggtgagcgccacccaatccaattccggcacttccagagttcccgccgagattgccaccaaggcttagaccatttcctcccagactgatacttccctggcgatatcctccttggctggcagatccgctcgatcccaaggaggcagtgctaccaccgagagagagacttcccgaacccacagcaggggtcagtataccactggcgactccatgggccagagacgcagcctcgtgggcaccggctagtccaatcgatccagctgtgttagagttgtgtccgtttgctcctattgacaggccatttgttccaagtgaagcagatcctgaatttccagaggttccgatactcaaatgtccggcgttgatcttggatgatccggcgccagagccagtagatccagagattccaactgatccgatgctcaagtgaccagatgatccagtgccagaggatcccttagaagcggaatcagttgatccaatgctcagatgtccgacaccaatagatgcagcttgagaggaaccggtacttccagcagattggatatttagatgaccagcttcgatggaggcagaacctgatccggtgtgcagggaactagatcccgatgactcaactttcttgtgctctgtcttgatgtgggcagatccagtgtgtgatccagaggctccagaaccagcagatcctgagattccagctgatccgatgctcaagtggccagatgaaccgagggcagaggatcccttagaggcggaatcagttgctccaatgttcaggtgtcctacaccaatagatgcgtggtttgaagcagcttcggaggatccggtagttccggcagattggacattcagatgaccagcaccgatggaagcagaacctgatccggcgtgcatagagcttgatcccgatgactcaactttcttgttttctgtcttgatgtgggcagatgcagcgtgcgttccagaggctccaatggttgcggatccagaactaatgtgggattgaccagcactgaatttggatgattcggtttttgaggaataagtggatgaatgcccagaagagaccatcgtggactcagatttatgatatgaagaagaagttttcttttcactggctccagtggcgtctacattaatgtggccagcagtgccggaattcgagccagaggtttcgattttcccatgtccagctgtgatcttagcagaaccagcctgaacagatccagtatggtgtgcaccagttgacgaagatccagtgattttggcattgccaagggagcctgagctggatccggaaattccagatgatccgatgctcaagtgaccagaattggctccggaaccagaggttgcaccgttgacaacgccactggcaactgtgtctgctgcctgagctccatgagcggcagtaattgttcctgcggaatggataacattggctccggttcctgcaactcccaaaactccgttgacaacctgtgctccatgagcggcacctgtcgatcctgctgctccagcttccgctgcattcagcactgcattggctgcattaacagttgctgatccggcgctatgatgaaggtcactggaacccgagacgccggaagtgccgatggtcaagtgtgcagtattcgtcttgctaccactgttgccagaggtttgaatattcaaatgtccaactcctagggaagcagatcctgacccactgtgctgagaagacgctttgtgtacctcatccgccgccgttacacctgcagaatgcacagcattgactccagtcgcagcagctcccaaaactccgtgagcagcatgtgctccgtaagatgcggccgtcgatcctgccgagtgcacaacattagctccagttccggccactcccaaaattccgttcactgcctgagctccgtgagcagcagctgttgatcccgctgaatggattgcatctactccagatccagttgctcctagcactccatgggcagcctgagctccgtgattggcagctgcggatccggcggaatgaacgacattggctccagtcgaagcagcgcccaatatcccgttcactgcctgagctccgtgagcagcagctgttgatcccgcagagtggacggcatctactccagatccagctgctcctagcactgcattggcagcctgagctccgtgactagcagctgcggatccggcagagtggacgacattggctccagtcgaagcagcgcccagaatgccattggcagcctgattcagaaccgatccagaagatcctctgttgtattccccacccagactcaatccaggcagacttgcttgagccgagccaccaccgtttccgcctccaaatccaaggctagcaccaccgaagcccagtccgaatccggcggatgccaaggatacgcagcaggcagttagaagtaaatacaatcccgtgggagccattgtctcaattttactaactgctttccgagaaaacggcttgcttttatagaaccgaaaatgcgcctagcagtaatgacgtcaaagccactacaggcaagcttcgctacctcgaaaagctccaaataaattagaatttgttaaaacttcatttcatttcgacatcttaaagataaatcaaattgctgttaaataaaatgcaataaatatctgaaatggaaaaacttgaaactacctaatgtgcacactaacagaggttaaactgtaagtgaacaaatttcgtgacgatttcttcgttaatcaatacgaacaaaaatacagagggaaaccagttccttagcatttatcatagttttttgactgggaggtgcttattctgttcaggggattcacaaatgtataaatataacacgtgtggtgcagaatctgcaaaattaaggtcaatccgatcttgcagaaatagtcacagcaaactttccatacattttagtttttatcatcttgcttaagtgcaaatccagtttactatcatattgatactttctacattctcataaaagtttcatagtttttacctaaacatcttcaacacatgctcattaaaatatacagagtattcttggcatcgcaataagttattcaactttttcgtgcctatatttatcccataattaatttccctcacccaagactgataaaattagcattatttttacatctgctatgacgactatagtagtgcgtcaaaatgaaacgaattttcagaaatatttcatacgtgtaaccagtagaacaagacttacagcttaaatactgtatacggaagtttttctttaagataattatacgcaactaagtagggaacttagtaaattcggtaccgtacaatcgatctgagccacgtgccagttgccgcttggcgcaagcttagacacagtttttcacttaacttggctgctggtgttgcaggaaaagcgcagctgagcgtagctgagctccaccc

SEQ ID NO: 16214 - DNA, 2487 bp, DROSOPHILA
atggctcccacgggattgtatttacttctaactgcctgctgcgtatccttggcatccgccggattcggactgggcttcggtggtgctagccttggatttggaggcggaaacggtggtggctcggctcaagcaagtctgcctggattgagtctgggtggggaatacaacagaggatcttctggatcggttctgaatcaggctgccaatggcattctgggcgctgcttcgactggagccaatgtcgtccactctgccggatccgcagctgctagtcacggagctcaggctgccaatgcagtgctaggagcagctggatctggagtagatgccgtccactctgcgggatcaacagctgctgctcacggagctcaggcagtgaacgggatattgggcgctgcttcgactggagccaatgtcgttcattccgccggatccgcagctgccaatcacggagctcaggctgcccatggagtgctaggagcaactggatctggagtagatgcaatccattcagcgggatcaacagctgctgctcacggagctcaggcagtgaacggaattttgggagtggccggaactggagctaatgttgtgcactcggcaggatcgacggccgcatcttacggagcacatgctgctcacggagttttgggagctgctgcgactggagtcaatgctgtgcattctgcaggtgtaacggcggcggatgaggtacacaaagcgtcttctcagcacagtgggtcaggatctgcttccctaggagttggacatttgaatattcaaacctctggcaacagtggtagcaagacgaatactgcacacttgaccatcggcacttccggcgtctcgggttccagtgaccttcatcatagcgccggatcagcaactgttaatgcagccaatgcagtgctgaatgcagcggaagctggagcagcaggatcgacaggtgccgctcatggagcacaggttgtcaacggagttttgggagttgcaggaaccggagccaatgttatccattccgcaggaacaattactgccgctcatggagctcaggcagcagacacagttgccagtggcgttgtcaacggtgcaacctctggttccggagccaattctggtcacttgagcatcggatcatctggaatttccggatccagctcaggctcccttggcaatgccaaaatcactggatcttcgtcaactggtgcacaccatactggatctgttcaggctggttctgctaagatcacagctggacatgggaaaatcgaaacctctggctcgaattccggcactgctggccacattaatgtagacgccactggagccagtgaaaagaaaacttcttcttcatatcataaatctgagtccacgatggtctcttctgggcattcatccacttattcctcaaaaaccgaatcatccaaattcagtgctggtcaatcccacattagttctggatccgcaaccattggagcctctggaacgcacgctgcatctgcccacatcaagacagaaaacaagaaagttgagtcatcgggatcaagctctatgcacgccggatcaggttctgcttccatcggtgctggtcatctgaatgtccaatctgccggaactaccggatcctccgaagctgcttcaaaccacgcatctattggtgtaggacacctgaacattggagcaactgattccgcctctaagggatcctctgccctcggttcatctggccacttgagcatcggatcagctggaatctcaggatctgctggttctggagcctctggatcacacactggatctgcccacatcaagacagagcacaagaaagttgagtcatcgggatctagttccctgcacaccggatcaggttctgcctccatcgaagctggtcatctaaatatccaatctgctggaagtaccggttcctctcaagctgcatctattggtgtcggacatctgagcattggatcaactgattccgcttctaagggatcctctggcactggatcatctggtcacttgagcatcggatcagttggaatctctggatctactggctctggcgccggatcatccaagatcaacgccggacatttgagtatcggaacctctggaaattcaggatctgcttcacttggaacaaatggcctgtcaataggagcaaacggacacaactctaacacagctggatcgattggactagccggtgcccacgaggctgcgtctctggcccatggagtcgccagtggtatactgacccctgctgtgggttcgggaagtctctctctcggtggtagcactgcctccttgggatcgagcggatctgccagccaaggaggatatcgccagggaagtatcagtctgggaggaaatggtctaagccttggtggcaatctcggcgggaactctggaagtgccggaattggattgggtggcgctcaccttggaggatccattaaccgtggcggcggccttttccttggctaa

SEQ ID NO: 16215 - protein, 828 aa, DROSOPHILA
MAPTGLYLLLTACCVSLASAGFGLGFGGASLGFGGGNGGGSAQASLPGLSLGGEYNRGSSGSVLNQAANGILGAASTGANVVHSAGSAAASHGAQAANAVLGAAGSGVDAVHSAGSTAAAHGAQAVNGILGAASTGANVVHSAGSAAANHGAQAAHGVLGATGSGVDAIHSAGSTAAAHGAQAVNGILGVAGTGANVVHSAGSTAASYGAHAAHGVLGAAATGVNAVHSAGVTAADEVHKASSQHSGSGSASLGVGHLNIQTSGNSGSKTNTAHLTIGTSGVSGSSDLHHSAGSATVNAANAVLNAAEAGAAGSTGAAHGAQVVNGVLGVAGTGANVIHSAGTITAAHGAQAADTVASGVVNGATSGSGANSGHLSIGSSGISGSSSGSLGNAKITGSSSTGAHHTGSVQAGSAKITAGHGKIETSGSNSGTAGHINVDATGASEKKTSSSYHKSESTMVSSGHSSTYSSKTESSKFSAGQSHISSGSATIGASGTHAASAHIKTENKKVESSGSSSMHAGSGSASIGAGHLNVQSAGTTGSSEAASNHASIGVGHLNIGATDSASKGSSALGSSGHLSIGSAGISGSAGSGASGSHTGSAHIKTEHKKVESSGSSSLHTGSGSASIEAGHLNIQSAGSTGSSQAASIGVGHLSIGSTDSASKGSSGTGSSGHLSIGSVGISGSTGSGAGSSKINAGHLSIGTSGNSGSASLGTNGLSIGANGHNSNTAGSIGLAGAHEAASLAHGVASGILTPAVGSGSLSLGGSTASLGSSGSASQGGYRQGSISLGGNGLSLGGNLGGNSGSAGIGLGGAHLGGSINRGGGLFLG

SEQ ID NO: 16216 - DNA, 4992 bp, DROSOPHILA
cagccgcctccagttccagagcactgtggttggccatggctacgtcggctgcgtcggaatctcttactggcgagggagtcgcctgtttgcgtttattcaacatgcggtacttcatgattagactgtcgagaaggaactgatgtcctgcttgtctcagggcaaagtttatatatcccaaggatgtacctgcttatgggccacccgttctcgggctctacctaccaattggtcggtaatccgagtggccctaataagtaaccacctttggcacaagaagtcaggtaggatcctacttcagcgaaaataatatttcgcgaattttattgatcctcgctatattcagctaatccagcctaaaaccctaaaccaggtgctcgtcttttataaggcagatggtttagtcaaattctgggaaaattccaaaaaaatatgtacatttaaattctgtgccgttgtgagacaactcggacaataaacaaatgggttatatgattgaagtaaaaaaaataagttccaaagttcctacgatttatttaaataagaatcaaagcaaaatctcttaggattagttaaataacgggtgcctcaggatcaaaaagcggatttttcaacaccgaaaatgaataatttgaacagtttagttggtacggtgaattttttgtcaacaactttctggtgcttggtttattacgaaagttacacacaattcaacagagacccgcttgtctacgacttttcaatatttacacggagatatgcactttgctgctacataaccgaatcaatgtcgttgactacaaaataaggtttattccaaaaataataaaactaaaatttctgttgcattgcgtcattgccgttcgtatctagttgcagttgcaaatgtacacagtaaacacagttaaaggcattcgggttggataggttctgttcggtgcgtgctgataagcatatcagggtagccagatcttctccatggtccctcgggactcgctgttctctacgcgtgaatctcgaacagtttggccacctcattgaggtcatcgtacttcttattctgattgattattgtcctagctaagcctatccgattgaagaggttccacagcaggatgccgacgatcttgtcgttcttcaagtagaatattacacccttgccatagttgcccgcctcatcgggatcacaggtaacgccatcttggctagccccggcatcagattttgacgactggctggaactcgtactggtctccggcacgtcggaatcactagactcagacagttggtcaacgcgcgtggcggattccgagggcagggcgaacacaccaacggtgggtagcgaggaatccaccaagccaataccctcgtatccgatctctggacctagatcggaccaaaacatgctctgatgttgataaggtttctctgcaaaaggtacggcgaacattatgatcgatcggttattaactttaagcccagtaacttacttgctcccgtcatgttctcgccggccagccgaccagagaccaccgagtgatcatggtgctccacccgtcgcctgcccagcagaggatcgaagaagcaggaagcatcaccggccacgtacaggttccgcctggcctccagctctgcattaaccacaaaaccgccgagacttctgtccacctctagcctgctgggtcccgcgagatccgtgtttggcgtgcaacccacgcagaccaccaccacgtccgacatcaaagtcattccattgtttaactccaactttagattggtttcatcgcgaactgccgagcgaatgctggcgttggggatgacgcagacaccctgggcttccatctttgccgtcgtccagcgactcaagtagtttggaaggacctttgacatgttggcattttcctggaacacctggtacactttaccgccattgttctctctggaatagtgtgccagggagcaggccagttcactgccgataaatccattgccaacaattgtgattgaacgcttttccgccgccaatttgcggaggcgatcaaagtcatcgggtgtgcgatagaccattactttttcgagcacgctgggcggagcatcacgcagcatgggcaggttcttgggggcacagccggtggcaattaggcattcgtcgtagcttatctcgtaaccgtcgttcaacgtcactatgcgtttttgagcgtccaccttcttcacagagaaaccttgagcgacggcaatccctccatttgcattatcatccagatcctcggggtcaatgaaaaactcatccggctcaaagaacaagctgtgaacaggaagggaataacttaatgggtttcaattatataaaaaaagttattcagacctaccttctctcggatcccgtccattgtttgaatcgatagtccttgatgggatcctcgttaggattgggcgtataccacagttccttggacagtggggggcgcatgtagggtttgcggaactcgttgctaatcattaaaaccttggctgttgcatcgttagacttgatggctcggaaagcagagaaggcagcggttccgccgccgataatcaggtacggcacatgcttgggaaggtcctcagaactgggcggacctgcgcatagagagaaagtgataagttacctcggcctatcttgaaaattgttgtaattattatccaatcatgatgattttgaggtatgtataagataatgcttatctgaatcagttggcaaatgtggtttaatctagcctaccaattcaaaaatctatggttttcgctttacttactcgtggctagtccagcaactaatctacgttttcgttcctcctcctccgcctcggcttttttggcttcactgtcatccgtatcccgcgtcataaaccaagcgagctatatgatagcaaagtaattagagaatatttcctttagatatcagatcgaaacatacaaatcctccggctaacaaggcagccagggcacccaagaggcacttaagccgtaggtccttcatccgacactcgcactcctcgtctccaccatcaccgccaccgggagcagtaccatcctcgtcgcagggctggcaggtggtctcctttcgtttgcgcttgaattcctcgcagggactagtcgctttgcaggaatccaggacgggttggctggtgctgagctttgcactgtccgactttaacacatccttagcactgcagacggacttgacgtcagcaaagccctggaaattgattatattgtttaatatttgttaataactctgcaagtctttgatggggatgcaaactggtttctgtttaataacccagctatgttttcgctagttatcaatttcacaaggcttgtaggaagttagtttgcatccccaacttatccagctaatgcaaatggatggtgaatggtatgaacgatgggtaccactttaaagagtggctccgattgggaatgggcttgaaactgggcattggcgtaggcgggaacgccggctccctccaccgccgtctcgtactcttcaacggggggcgtggtcgagggcttggtgacgcagacttgatgatttggatatttgttggcttgcaatttggtgcgcgcctcaagggtgcgtttctttaccatttgatagaggctgctgtgggctggccgaagaggagctgaaatcgacgtgaatgctagttagttatcggcaaaaacatgaaaacacggatcggtttggccagccggccataacctcacttaccgtatgccggcggcgagcgctgcggcactggacccaatagccttctgttggccaggatgtacgcctgccggatgaacctctgcgtcagacatcggaccccccaaatactcatcgtgatttgcactggctgcggagtaggtgacaccacaatccacaattgtgtaacgtaacaacgttgtgcggcgaaagaaacgtgtgttttgcgagttcgtgttttatttacaaaaaaaccaatttctatgacaaatttctccgtgtgaagtccggcggtgtttaattgatctcgactcctttatccctccttgcttttgggtagtccgcgtttaatttatatttatttttcattccctcgcctgtcttgtttttttctgtctctgtcgcagtgtgaccgtcgcaatgaaatgggaaatggcccagcgcctattcgaaattatttggcttgaaaatagccactttttatcaaaaagtgttcgttggtttttgaaatgttgaacaatatttaatttattttgagcaagtgaaattttaaaatcgaacttacaagctctttgttttgaaaacgataaatattaaaaaacatgttaaaataaagatgtgcttccaaaataaagaataaaaattcttatgaataccacttatgtatgttgtcagtacaattgtgcattaatatatattaaatacatgtgggaacattcatttatcagcactcgcttgctgcaaagcggctgcagcagctgctccacttacgggaggcttgatgtccattagttggcacaactggttccgcagcggacgcacctccaccagcggctgggtccagtccgtttcggagagcagtgttaggatctcatccatattctcctcgggcacttcggtgacatcgccgtgcagagccaacgcttcgtacaattttgtggcagcggttttgcgaacgtggacgtgctgcagtccaagaaatactgagagcttggagaggatgcgtttagacaggcgaggaacctggagcaactggcaaaaagcactgatgctggtcgcagtcttgtacagcttcttgtagcccttaacctccaggttgagcagcctaaagatatcctctgcaaagggatttgcttcatcgtgtagaaccgattctacagttccggagccaatgagtatatccaggaaactgagcagaggataggtcacgcgctcgtttagtagatgctcctcgaaaatctggaccacctcggagcagagacgcg

SEQ ID NO: 16217 - DNA, 2349 bp, DROSOPHILA
atagaaattggtttttttgtaaataaaacacgaactcgcaaaacacacgtttctttcgccgcacaacgttgttacgttacacaattgtggattgtggtgtcacctactccgcagccagtgcaaatcacgatgagtatttggggggtccgatgtctgacgcagaggttcatccggcaggcgtacatcctggccaacagaaggctattgggtccagtgccgcagcgctcgccgccggcatacgctcctcttcggccagcccacagcagcctctatcaaatggtaaagaaacgcacccttgaggcgcgcaccaaattgcaagccaacaaatatccaaatcatcaagtctgcgtcaccaagccctcgaccacgccccccgttgaagagtacgagacggcggtggagggagccggcgttcccgcctacgccaatgcccagtttcaagcccattcccaatcggagccactctttaaagtgggctttgctgacgtcaagtccgtctgcagtgctaaggatgtgttaaagtcggacagtgcaaagctcagcaccagccaacccgtcctggattcctgcaaagcgactagtccctgcgaggaattcaagcgcaaacgaaaggagaccacctgccagccctgcgacgaggatggtactgctcccggtggcggtgatggtggagacgaggagtgcgagtgtcggatgaaggacctacggcttaagtgcctcttgggtgccctggctgccttgttagccggaggatttctcgcttggtttatgacgcgggatacggatgacagtgaagccaaaaaagccgaggcggaggaggaggaacgaaaacgtagattagttgctggactagccacgagtccgcccagttctgaggaccttcccaagcatgtgccgtacctgattatcggcggcggaaccgctgccttctctgctttccgagccatcaagtctaacgatgcaacagccaaggttttaatgattagcaacgagttccgcaaaccctacatgcgccccccactgtccaaggaactgtggtatacgcccaatcctaacgaggatcccatcaaggactatcgattcaaacaatggacgggatccgagagaagcttgttctttgagccggatgagtttttcattgaccccgaggatctggatgataatgcaaatggagggattgccgtcgctcaaggtttctctgtgaagaaggtggacgctcaaaaacgcatagtgacgttgaacgacggttacgagataagctacgacgaatgcctaattgccaccggctgtgcccccaagaacctgcccatgctgcgtgatgctccgcccagcgtgctcgaaaaagtaatggtctatcgcacacccgatgactttgatcgcctccgcaaattggcggcggaaaagcgttcaatcacaattgttggcaatggatttatcggcagtgaactggcctgctccctggcacactattccagagagaacaatggcggtaaagtgtaccaggtgttccaggaaaatgccaacatgtcaaaggtccttccaaactacttgagtcgctggacgacggcaaagatggaagcccagggtgtctgcgtcatccccaacgccagcattcgctcggcagttcgcgatgaaaccaatctaaagttggagttaaacaatggaatgactttgatgtcggacgtggtggtggtctgcgtgggttgcacgccaaacacggatctcgcgggacccagcaggctagaggtggacagaagtctcggcggttttgtggttaatgcagagctggaggccaggcggaacctgtacgtggccggtgatgcttcctgcttcttcgatcctctgctgggcaggcgacgggtggagcaccatgatcactcggtggtctctggtcggctggccggcgagaacatgacgggagcaaagaaaccttatcaacatcagagcatgttttggtccgatctaggtccagagatcggatacgagggtattggcttggtggattcctcgctacccaccgttggtgtgttcgccctgccctcggaatccgccacgcgcgttgaccaactgtctgagtctagtgattccgacgtgccggagaccagtacgagttccagccagtcgtcaaaatctgatgccggggctagccaagatggcgttacctgtgatcccgatgaggcgggcaactatggcaagggtgtaatattctacttgaagaacgacaagatcgtcggcatcctgctgtggaacctcttcaatcggataggcttagctaggacaataatcaatcagaataagaagtacgatgacctcaatgaggtggccaaactgttcgagattcacgcgtag

SEQ ID NO: 16218 - protein, 690 aa, DROSOPHILA
MVKKRTLEARTKLQANKYPNHQVCVTKPSTTPPVEEYETAVEGAGVPAYANAQFQAHSQSEPLFKVGFADVKSVCSAKDVLKSDSAKLSTSQPVLDSCKATSPCEEFKRKRKETTCQPCDEDGTAPGGGDGGDEECECRMKDLRLKCLLGALAALLAGGFLAWFMTRDTDDSEAKKAEAEEEERKRRLVAGLATSPPSSEDLPKHVPYLIIGGGTAAFSAFRAIKSNDATAKVLMISNEFRKPYMRPPLSKELWYTPNPNEDPIKDYRFKQWTGSERSLFFEPDEFFIDPEDLDDNANGGIAVAQGFSVKKVDAQKRIVTLNDGYEISYDECLIATGCAPKNLPMLRDAPPSVLEKVMVYRTPDDFDRLRKLAAEKRSITIVGNGFIGSELACSLAHYSRENNGGKVYQVFQENANMSKVLPNYLSRWTTAKMEAQGVCVIPNASIRSAVRDETNLKLELNNGMTLMSDVVVVCVGCTPNTDLAGPSRLEVDRSLGGFVVNAELEARRNLYVAGDASCFFDPLLGRRRVEHHDHSVVSGRLAGENMTGAKKPYQHQSMFWSDLGPEIGYEGIGLVDSSLPTVGVFALPSESATRVDQLSESSDSDVPETSTSSSQSSKSDAGASQDGVTCDPDEAGNYGKGVIFYLKNDKIVGILLWNLFNRIGLARTIINQNKKYDDLNEVAKLFEIHA

SEQ ID NO: 16219 - DNA, 4021 bp, DROSOPHILA
gggattcacaaatgtataaatataacacgtgtggtgcagaatctgcaaaattaaggtcaatccgatcttgcagaaatagtcacagcaaactttccatacattttagtttttatcatcttgcttaagtgcaaatccagtttactatcatattgatactttctacattctcataaaagtttcatagtttttacctaaacatcttcaacacatgctcattaaaatatacagagtattcttggcatcgcaataagttattcaactttttcgtgcctatatttatcccataattaatttccctcacccaagactgataaaattagcattatttttacatctgctatgacgactatagtagtgcgtcaaaatgaaacgaattttcagaaatatttcatacgtgtaaccagtagaacaagacttacagcttaaatactgtatacggaagtttttctttaagataattatacgcaactaagtagggaacttagtaaattcggtaccgtacaatcgatctgagccacgtgccagttgccgcttggcgcaagcttagacacagtttttcacttaacttggctgctggtgttgcaggaaaagcgcagctgagcgtagctgagctccacccaaatgcaaatggcaagacaatgtgggctaagagcccaagaaactatagctggcggaaggtcgggcgggggtgcaagaaaggagggaaatgcggcagcttcttggccccggtgtcagctgttggcccactggaaagcactggggaaaatggaaaattgtgctcgcaggaaatctgcttacaaatgcatgtatcttggcccgccagctggatgatgttgatgcaaaatctgttacggcttttgtggggcgaaagaaacacttgacttccgcttccgccggagttgcccatgcacacttgcgaatgccaaatgctatgcaaatgcgggcatcttttccatatttaaagcaaagtacaacgaagagcaaataaataaataaatatttaaattggtactgccaagtggcttcgttatttttaatatgaatctgaaatcgacactctatgtgataattttacgcacggaatggtaataaatacgaagcacagagttttgtttataatattattgtagaaataaatacttatagttacaaaataaatatgtccaagaagaggtaacacaattaagaacgtatgaattttccccggatttcccttctggatcgattagcctcttctggcgagccctctggcacttttccgaggacctgcagcatacggcgatagagcatttttcgcacatcgatggcccagaggaagtccatgtggttgaactccttctgcggcaccaggtacttgcccgtcacgttgcccaggtcatcgcacatggactccacatccttggggtggcaaagcagatcattggtagagtagtacacgaaagtgggcaccgtcaccagactcaggttgtaacgaggtggcaggtgatccctgtacaactgcatattcttattggaactgtagctataaggagcaaagcgaccgctcttgatgatctgaatgaagtgcttcacctgcttggcagccactcctgccgggtagtgacccaggatcacagggaacattttctgcaacaaatcttgaaagtaaatacgtactcttgttgaaacttaagcataaagttaccctgttaaactcgttccagttgcgacccactattccaaatacggcctcgatgcacagccgttccgtctcctccgtcatccggcatagaaaccggaactccccattgaacatctccctaatcgagctgcctaccaggctctaaattatgtaatggaaatatgttctttatcatgatataggaaaactatacttttattgttactcacattaaagtacagactgatggcccgaatgtaggggtggtcctcggtctccttggcataaacggcgggtgcgagggcctgcatggaaacgaccttgtcgttgtaggctggacgcatggagcacatcacgaagaaagaggtgcatccctgcgagtggccggcgtagtgcagtttcgggaatccggtcacctttagcacgtgatcaatcatcgctggcaagtcgtacatcccgatctcgtgccaactgaagtcccagaacttggactcgtccgggtcgagggtggtgtgattcctcgagtagcgattgccacgcgcgttccccagccagacatcgtagttgtggtcggccagcaagtaggctgcaaagtggacttcggtcgtaatcacttggccattaatcacggacgacgcgaatggcacttacccaggctcacgttgggccccattaccacaaatcccgccgagctgtccacgagtccgtgctgcaggaggaagggcggggcgccctgcttgcggatgcgatgcatggtgagaatgtatccgtcctcggtggtcacatggtgcacctccgactcgtagccgtacttggcgattaatttgtcctgatgacgaaatgggtgagaagtgatgataatggccgtaaaaagaggagtaatcttccacttggctatgaaaagatttttcagtaattattgggaagcgcaagacattattttccacaatacaactgtctctttaagatatatatatatatagcagccctttttgtgatgctaaagtgttaataatatcttttactgattattgaatttttttctttttctgatgttttttatagcactggagaagtttcaatttatatcataccacactgagagtcgaatcctgtttgatgttcttgcgctgcagtcgatcctccggcgtttcgtcctcgacgctctcctcctcttcttcttcctcctcctcgtcctcttcgtcctcctcgccgccaatcagctggccttggatcctggagatgaacacacagagtcccaggagcaggagcaactgcatcctcaggctgcaccgcatcttaatttagccacaagtatctgcgagtttcactttcacggaagcgaatctcttggcggaattcaacctcaacgcagcgcgacgcgaactcaactgaagaccaattcgaaaactgtcaacggttcgaaccgccgattacaaaaaccacatcgaccaacttctgcagagaccctgcagcaaataaaaaaaaaaaaccgaaataataaaaagaatgccgaaatacgaaaaactttcgatcagacaacaacattgcgcactgtgacgtgttagcttgttttgtttacatttcgattacgttttaccttttgggccagttaattaaatatgggtacaaatcagtgggtctccgaggagggggagggtgtacttcgaatgcgtagggcgtatcaatcggaaacaagaaacttatcaagtgcagcaagtacagtaaagcgtcgagccagagacaaaagcaattgtcaaattgaaccatgttcaatggagcccacaaatatcttatcaatcacaaatgttcacacaattgtaaaattgtattttatgatgacataaagcccaatggtttataataatttatttatctgagattattttccaaaaaataacagcaatcaaagagatataagtagataaatgttgataacattttgatacctaaggtactttgtttacacccactgttgtaaagtaggtccaaacatttccaccaaggtaattatcattatttatcgtctctcattttaccatcgaaatagcttaataaccgaaacctttttggccaaagccacaacaaccaacactggtaacagataactttattgttggccatcaaaagaaagtaaaagtgtcgaccagttgtggcggctgcctttttgaattatacatatatatatgtatatttttttttaatggtttggctaccgcattacataattggcattttggacgactgccaaggtaaataaagcatttcgctgggcaattattttctgttatttctgttataatgggccttttttatataattttggcggtcattcaattacgtagggcaagcgcccatcga

SEQ ID NO: 16220 - DNA, 1565 bp, DROSOPHILA
aattccgccaagagattcgcttccgtgaaagtgaaactcgcagatacttgtggctaaattaagatgcggtgcagcctgaggatgcagttgctcctgctcctgggactctgtgtgttcatctccaggatccaaggccagctgattggcggcgaggaggacgaagaggacgaggaggaggaagaagaagaggaggagagcgtcgaggacgaaacgccggaggatcgactgcagcgcaagaacatcaaacaggattcgactctcagtgtggacaaattaatcgccaagtacggctacgagtcggaggtgcaccatgtgaccaccgaggacggatacattctcaccatgcatcgcatccgcaagcagggcgccccgcccttcctcctgcagcacggactcgtggacagctcggcgggatttgtggtaatggggcccaacgtgagcctggcctacttgctggccgaccacaactacgatgtctggctggggaacgcgcgtggcaatcgctactcgaggaatcacaccaccctcgacccggacgagtccaagttctgggacttcagttggcacgagatcgggatgtacgacttgccagcgatgattgatcacgtgctaaaggtgaccggattcccgaaactgcactacgccggccactcgcagggatgcacctctttcttcgtgatgtgctccatgcgtccagcctacaacgacaaggtcgtttccatgcaggccctcgcacccgccgtttatgccaaggagaccgaggaccacccctacattcgggccatcagtctgtactttaatagcctggtaggcagctcgattagggagatgttcaatggggagttccggtttctatgccggatgacggaggagacggaacggctgtgcatcgaggccgtatttggaatagtgggtcgcaactggaacgagtttaacaggaaaatgttccctgtgatcctgggtcactacccggcaggagtggctgccaagcaggtgaagcacttcattcagatcatcaagagcggtcgctttgctccttatagctacagttccaataagaatatgcagttgtacagggatcacctgccacctcgttacaacctgagtctggtgacggtgcccactttcgtgtactactctaccaatgatctgctttgccaccccaaggatgtggagtccatgtgcgatgacctgggcaacgtgacgggcaagtacctggtgccgcagaaggagttcaaccacatggacttcctctgggccatcgatgtgcgaaaaatgctctatcgccgtatgctgcaggtcctcggaaaagtgccagagggctcgccagaagaggctaatcgatccagaagggaaatccggggaaaattcatacgttcttaattgtgttacctcttcttggacatatttattttgtaactataagtatttatttctacaataatattataaacaaaactctgtgcttcgtatttattaccattccgtgcgtaaaattatcacatagagtgtcgatttcagattcatattaaaaataacgaagccacttggcagtaccaatttaa

SEQ ID NO: 16221 - protein, 439 aa, DROSOPHILA
MRCSLRMQLLLLLGLCVFISRIQGQLIGGEEDEEDEEEEEEEEESVEDETPEDRLQRKNIKQDSTLSVDKLIAKYGYESEVHHVTTEDGYILTMHRIRKQGAPPFLLQHGLVDSSAGFVVMGPNVSLAYLLADHNYDVWLGNARGNRYSRNHTTLDPDESKFWDFSWHEIGMYDLPAMIDHVLKVTGFPKLHYAGHSQGCTSFFVMCSMRPAYNDKVVSMQALAPAVYAKETEDHPYIRAISLYFNSLVGSSIREMFNGEFRFLCRMTEETERLCIEAVFGIVGRNWNEFNRKMFPVILGHYPAGVAAKQVKHFIQIIKSGRFAPYSYSSNKNMQLYRDHLPPRYNLSLVTVPTFVYYSTNDLLCHPKDVESMCDDLGNVTGKYLVPQKEFNHMDFLWAIDVRKMLYRRMLQVLGKVPEGSPEEANRSRREIRGKFIRS

SEQ ID NO: 16222 - DNA, 4153 bp, DROSOPHILA
tgtttagaatatcccccaggaaaagtttatatttaatgtacatgcttataatgtaatgtacttcttaatattaaataatatatagcccagctgcacatcaaggaattcaattaaagtacacaatacatatcgcaaaaatatatagtatgcaatgcacattttggtgatctaatgaaataactaaactaaatatataatccactttattttcgctaatcaaatcttcacctatgactaagtgcatttttctactttcaatcgattagtgccagtcactaccgccaacaatttatagaccctcaaattaagtgtaaactaccaaaccgtttatgattagacaaagctactgatagttttgcaatttatggacaagagcaattcattcaaatacttatacattttctaaatatgtgtaccttaattatatgaacatactatttttaagaatggcgaacgtcttgaggtcagtcactttactgtccttggttagataaatttattggcatgccattttggcaaagtataacttacgtaagatgatacgctttcataaatattttataaaaaaaaaacaaactctcgtggaaaataatttaattatataaaatataatactgtatagtaaaaaccgaatttcagcagaatttcgttcagatcttgacagcaatgcaaactcattaaagttaaacaaacagatgagccagcgaatttgttatcgggtgtttatggctgataagacaggatcctggacaggaacttaatatgacttgcaagctgtttatcacgccagattgttcagttggttatcatgttgttttcgcgcatgaggaggatgaagtcgattattactgctggctattagcacgtatctgcagatattttatcgttcagatgcaagccaaaattaagttcgttgcctttgtggcgaaacaatactaataataccctggaaaggcagtgctacaaataagattccaaatcaaaaaccaaaaacattaactttagtttgagatatttttttttattataataataaaatatatgcgtttcatatatatttcatacgtttctaagtctacgtaatacacaatctgtttttgaacaagcaaactatccataaaattacccccctaggtgtacgatctacgcttaacgtctatgcagattcggccatgtcagcagtagagaccctggccctcgttctgctccacgtggtagtagcagtactgccgctgggtgggcgtcagacccatggtctccgcctccgccttaaactgctcgatgccgccgactccggccaggtagccattcagtttggtggccacatagctggtctgcagcagtttggggctgagatttagcgatgaggcgagatccttgtggccctgcaacctatacttctggtggtacctatgaacaaacaaggaaattcatatcaacgcactcagattttcttagttaaaacttacgcctcggctgggtaaaagttctccttggatgcaatctcagtggttatgatctccggtgcacggcgctcttgctcctccaatttggaggcgtgtgccacctgcttctgctcctcatcgtggtacagaatcaaggaggcgtactgcctcttgatgggcgtggtcaggccatactcatggttgttccagaacagatccagcagctccttaaagctaatgaccgtgggatcatagtcgatttccagcacctccgtatgatcgcccctgttgagattggtggttagtaccggatccgaaaggattatgggatgcaacatgtagggacgtgaaaggaagacatatggatgattaatgctctcaacttgctcccttacattttacggtacgttggcaaatccgagctgcctccggcgtagcccacggtggttctcaaaactccacgggtggctccatacagggattctgcgccccaaaagcaacccatgccgaaagtggccgtggctttggtgacattcacatcgtgaaccggcgaaatgttcagttccttttgttcattgcgaacggtgctctggaagaagaagaagaagaagaaaggggagtatgagcaacagatttctaaaatttgaaatattagatttattcgtattgagcgcacaccaaaaacagaaacgtaaggccgtaaccatagcccggcaaacagcgcattttaagcacaaaattttatatgtatataataaatgcaatattcggcaggttttaagttttttaagtattttctttggggctttgttcgcgtctgatgtcgtcagcaaaataataatgcactttgtgcgctcattttaaactctctctcgcgctcttttcggttttcgctctgttcgccttgcacttgcagctgtcgaacagctgattgaaaatactatctctctcgcacacactattgcaaaatcaatttcaaaatcaaggtcaatggaaaaactgatttaaagaaagtaaaagtcgttggctaacagcgcttcacttcgcacagcaaacaactaaattaatcctagcttaaatcacttttaaaaccatttaaatatgcggttttaggtgagcaaaactcgccttgaaattacgaaacagtcgcgaaaacattattatgtgtaaactgctcaactgttgggaagcaactgaacctggccaaaacaaaccgaattcctctagccaacaaaaaggtgctcacatgagctttaattattctgaacattagatgtcggaaactggcttttatgactaagcacatcaaagttttggccacccggccttgggggttcaagaaactttaagactcttcacaaattacttatgtcttgtacatcaaataatttaattgcatatatttgtttatttatatttgtacactgtttaaaggtgtattaaagtcacgattcggcaaaaaaaaatttaaaatatatttcattagctatcatagcattttttaatttacatttaagctcgaattaaaccgcaggacatttgaaatcactagtcacaggattaggcaccaatcactagaccaattacttaccagatccttgagctcaggatgagtgacactggaagtaatagtcagagacatgatttcactagttaaaattgttatttatttaatgtgtcgcttttaacatttaaagctgaactgatgcatctgcagaaaggtcggtccaatttatactgccgcctctcccgctttctacgcgaatgtggagagtgccgcgctatcgttatcaattctcccgctcttcagtcttctggcggccggccccgtctctttctccctctcccgattctacgctgattaaaactgcgcagcgctacaggtttcttggggccacaattgatcgtacagctgggacatttgatcagggttataatttaattgcctttaatattctaatttgaacaagtcaagtgcagtcttttgtgttctccggattgtggactaactgttatttgccgggctcgtattttagccggctcaaacgcaaaatgaagtccaacaggaacatttgtatttttatctccttgggattctcggtgacatagaagccgggaacgccggccttttgaagtgtggattgttggtcattaacctgcgtaatgatattagatattagttcaacatcaagaaaaaacaaagaaagttaaagtagtaaaatctaatttcgtattcccatataagcatttaaagttatgattagaaataatttgtattacaaaagaaaatatctttagtgataatttcatttcaattataagaatctgcagataaatatatacctaaaatatacctaatctatagatccatccataatcaaactatgtatcatatttgaatttaattttaaataggattaggattatctaagtttgagattcgactattgtttttaaagaaatttggatggtaagaccaactaaaagtgcgtggaatggaacgactcaaaaggatattgaattcttcaccttttgatctagtatttcgataatcttcgtatccgactcgtgtagtttcttagtgtgctttattttcatgagtcccaaaatgtggcgcaactcctcgggatccttgatcttgctcctccactcggccacttctatttcatactcgttctccgcctgcatccgtattttaattaagtgtc

SEQ ID NO: 16223 - DNA, 1018 bp, DROSOPHILA
catcagttcagctttaaatgttaaaagcgacacattaaataaataacaattttaactagtgaaatcatgtctctgactattacttccagtgtcactcatcctgagctcaaggatctgataataatgttttcgcgactgtttcgtaatttcaagagcaccgttcgcaatgaacaaaaggaactgaacatttcgccggttcacgatgtgaatgtcaccaaagccacggccactttcggcatgggttgcttttggggcgcagaatccctgtatggagccacccgtggagttttgagaaccaccgtgggctacgccggaggcagctcggatttgccaacgtaccgtaaaatgggcgatcatacggaggtgctggaaatcgactatgatcccacggtcattagctttaaggagctgctggatctgttctggaacaaccatgagtatggcctgaccacgcccatcaagaggcagtacgcctccttgattctgtaccacgatgaggagcagaagcaggtggcacacgcctccaaattggaggagcaagagcgccgtgcaccggagatcataaccactgagattgcatccaaggagaacttttacccagccgaggcgtaccaccagaagtataggttgcagggccacaaggatctcgcctcatcgctaaatctcagccccaaactgctgcagaccagctatgtggccaccaaactgaatggctacctggccggagtcggcggcatcgagcagtttaaggcggaggcggagaccatgggtctgacgcccacccagcggcagtactgctactaccacgtggagcagaacgagggccagggtctctactgctgacatggccgaatctgcatagacgttaagcgtagatcgtacacctaggggggtaattttatggatagtttgcttgttcaaaaacagattgtgtattacgtagacttagaaacgtatgaaatatatatgaaacgcatatattttattattataataaaaaaaaatatctcaaactaaa

SEQ ID NO: 16224 - protein, 258 aa, DROSOPHILA
MSLTITSSVTHPELKDLIIMFSRLFRNFKSTVRNEQKELNISPVHDVNVTKATATFGMGCFWGAESLYGATRGVLRTTVGYAGGSSDLPTYRKMGDHTEVLEIDYDPTVISFKELLDLFWNNHEYGLTTPIKRQYASLILYHDEEQKQVAHASKLEEQERRAPEIITTEIASKENFYPAEAYHQKYRLQGHKDLASSLNLSPKLLQTSYVATKLNGYLAGVGGIEQFKAEAETMGLTPTQRQYCYYHVEQNEGQGLYC

SEQ ID NO: 16225 - DNA, 6410 bp, DROSOPHILA
aaactatgataacgattatcatgatcagattgtaagaaagggcaactggtagcccactctaattgaccttcagcattaaacttagcatattaaaccaattatcaatcccaaattagttttggaaaaatgactggcatccaattttaactaacatcacgatttccatttccttacagccacttcgatgtgaacatcaaggcggtgttcaatgtcacccaatctctgctgccccgcttgaaagacggagcctcaattgtcaacgtgtcctcgatagcgtcatcccgatcctttggcggccacacggcctacagtgccaccaaggcggccctcgattcgctgaccaagtcgctggccttggagctgggtccgcgcaaaattcgcgtcaattccgttaatcccaccgtggtgctgaccaaaatgggcgccgacaattggtcggatcccgccaagagtggaccgctgctggcccacataccgctgaatcggttctgcgaggtgcaggaggtggtggacgccaccggctatctgctgagcagcaagtcgagcttcgtgaacggccaccacatcctgctcgaaggtggatattccgtttcctaagacgccagcgttaacttcaatgtgcaagcccgaaatttgatacaaatgaaatatgattgaattaaaactgtggaaattccatgattttataatactctctccataaactaaacacaagggtaaggttaaaaaaaaaatgccattttgtttgtttgttgcttacgaatacatacatctttgaaatgtatttaaaaagacaattttgtgcttaaaccttaagttttgcgcttaaaactagagttggaaaaaaatccatagatatacaatttcattttatatttataatccgcctataaacgacacttgcaacgtgctctcctgtcggtctaaagacgtttgtatttgcacaagattaaataggagagtcgttgcgcaacacgcgctgatgtgaatgccacccaagctaggcgcatatcttgccctgctgctggctctgcagttgctgctgcttcttctcgcgctcccggcgacgcagcttcttgcgccgccgatcgataaccgccagttcgcccttgatggtattgtaggccttgcgcagatcctggatctgtttgcgcaggatcgtgatgcattcgtcggagctgagagctggatctgcagtggaaagcggacggttagatggaaaccaattggtgtaggaaattcactttgctcttacccagctcgacgaggaagttgtacggacatggacgcacgcccgaagagttggtcgactggatgccctgcggcagttgcgtctgctgctgttgcagcaattgctgttgctgctgctgttgcgcattgctctggggcatcatgtgctggcgggcgctctgccgtggctgctgctgctgctgtcctgcgttcggcgctatgttatccgagttgtcgtcggtatcggagcccgctgaaaatgaaggcaagtgtcattgatctactgatctacttggtcaaggatctactaggatcaacgctaacttaccggcggtggttgtggttttttgattgcgcattccggaaacctggcgtcgccgcttgcccagggattgaagctgggccgccacggcagccgccgtctgggcgctcatcggcagaggcttgcggttgcgtttacgcttgttcagcgctcccagtccggtggagtcctcgtgctcgagccctgcattcttctttgcctcctcgccactctcatcctggctggccgagtccggcgaactgttgggccccgagggattgacctctcccgtcttagccgcctgctgctgttggccgctttgcagttgatgctgctgctgttgctggatggcagcaactggaacgggtggcggcgtatccggcggcaggggcgtaatgcccacgatggctagagccgaattcacggcggtgggtagctgatcggtgccaccgtaattgggcgccggactgcccggtatggtttcctcgcaaagcaaattaatcgactcgttgtggggatcgctgatcaagggcgagctggccgccggtgcgaccacattgaacagttccttgcccacggcgtgcatcacaaatggtcgcgccaccactggggcactgctattggaaggttcggccatttccgcgtctaaaacatagttggcgggcatctccgatgatgcttgaagcacgctggcctgctgctgctgttgggggaaattggagatgacagtgggtgttcctcctccgccggctgatgctataacgcttccggccggcgccgctcccactgctccgcttactcctgtataggcctttagcaacagtccaccaacctcgcccacttttggtgcggttaggaacgttttgggagagatcaggacgggtgcctgtgagttcggcgtggagccaggactgtgacgcatcactgtggcggcggaagccaccatgagggctggcgtggccaccacaacagaggcgggaatctcgggtagcacaatgggaatgccaaaggagctgatactcttcgactggccctgagcctgacccaactcctcctgctgctggagcttggccagcggtggtggttgaactaccccggtgagtttcccagcaaaggagctaccctctgcgggcttcagaggaatgggtgcttggattcctggcatagccttggcgcccagttccaatttcacgggagcaggaaccggaggcgtgggtgtgctgctgcttgtcccctccgtttcggcggtaaccgccgtcgccatagtggccgtattagtttgaccctcctcttgctgggatccaggactcttctgctcgccagttgttgtggtcgttgtgtgctcttccgctatcacatcctcgatgaccagacgctgctcggagtcggtgctgtccattgattcgtctgagaatcctgctcctgcagtggcagttgagttcggagtatgggcggtgggtggggtacctgccgtagagctggccagcgagagggctccaccaaccggcgtctttcgctgctggatggcacactccagcttctgaatcgtctcgctcaactcgctgttctttgccggcaacgaagactccagaatggacttggtctccggactgctggttgctggtccgggtctatagagttcgcccaaaagtggacccgtttgtatcttgagtggttcgctcaacaacttcagggtgtcgagcttgatagcactgctgcacagatccagtttggccgtcgggcttgggaccacatcctcacgccctggggtcttggcggcggcagcgggttccaccggcggcttgcccttgttgttctccacctcctcctttttctgactgatggcctttagcaccttatccgctatggagctggtcttctgctcatagcttccggcatccaggtcgaagggccccactgctccggccagcagtattttcacgttctccagtttctcaaacttgttgtccttggactcgcccgaactgtagccactgccttcgttggatgtgctcagctcgaacacgttcctggtttcgatgaaggggcttcccacaatgtgagaagcaggcggctgcttgctggcattgatcgcctgcggtggtgtgctcaacttgggcgaggccaacactgggtttgctcccgtgggtggagtgctgggacaactcaagccggctgtcccagctgtgggcattgcggtgatcactggcgtcactgcagttggtgtagatccacttgccgacacggtcggcgggacaggcgtacttggaggctgcagtgcatccgttagcgctctagttgtctcttgcacagtctgcgccaattcctcgttcaaggcggtgatgttcagattaaaactgggcgacttcctcaaggcatcgaatggtgtggcatgatgcggagtcagttggctgtacgtggaggacgctgacagctgggcgtggccgctcgatgtagttggcgtactcaagttggacatggcctccggtgagcctgctccgtatgattctactggccctaaggtgggttggattagctgctgagtcttctgctccactggctgctggacctgatccttatccaacttgtaggttttcgccttttccatacacaaggctgcctccttcagtggagaacccctctttttaagcttgggcgctgttaacaggcttatagatgatgtcataccaccgtagccaccacgctcgcgaccagcggcgggactttggtgctccaggatgtgctgaatcgcgctggccttgagcgcttgctttctggccgccgatccgaccaccactggggctgaagtggaggcactggctgccacgcctgatccggaggctcctggtgttggcaccattgtcgtgatcaccgaagcagctcctgcagccgccattgcaccggctgcagtggctgcggcagccacagtaccgcccactgaggccatcggagagatgcgcttttcaaactcgaagggctccgtgtccttaaactcatagacatccgaggagagtagctttcgcatgcttattcccgaacctgcagcagctcctccactgctgctgtacttcgactccttggccgcaccggacgaactgacctgtgcgacattcgatggttgcagagccgctgctcccggcgtcgctcctgggacagtcccgctgctgatctccagcttgctcatgtccggcagggagcgagtggcagaacttgaactcaccgcggaacctgtcgaacagaaggaactggatgaggaggaggacgacgagggcgagcaagctgccggcatttccactttcaagcttgccacaggttctgcaaacttcttcgactcctgacttgccgcggaagagctagcagctgttccaccagctccgccggattgtttcttgagaagctcggccttcttgggcacatgttgctccactgacttcttgccgccgattgttaggggtttctccacgatcaccgacgtgtatttggccgtagtagagctcgatccggatgaactggctgcctgggcagccgaggtattcccgaatctagctggcgctatcagggcggtgggtttgatgtctgcacctgacaagaagggtttgctcttggtttcctcctccttaggctccgttttgggttcgattttcagaggctcttccttgacagccagttcccttttggtcactggttcatgatgtaatttggagggagaggctgtgggttcctttttgccagctccagatccctttagttgtttgcggtagtcggaggactgcgagtcctcgtccgcatacgattccgtttccgaggacagttccgtggagctgctcttggccgacgactccagtttgggctcctttttgatgtcctgcagcgctggctcatcggagggctctttcttcgcaagatccttgcgctcctcgttgctcgcggcgttcgtcagaagcttcggctggaatcccttaagctccgatctaatctcgctaagatcatagtcgcgtcccttggcggaagcggcgccactgctcatggcacgattacctccggcccgggatccccgcaaagaggaagcctgctgttgctgctgcttggaggaagctgctctggccgccgatggttcctcttcctcctcatcctcctcggaatcatcgctaggatgggcagcgggtgccgtggaggaggcactactggccaagcgccccttccctggcggctgtgccttgcccgcttgcggtttgtccttggcactctgcctctttggacgccgcaccggttcatcggagtctgaatcggactcggaggccattgaagcatcggacacccgacgtggagtggtggtgccggggacgactcgggtcggacgctttttcatctgttgctgaagttgcggctgtgaagcagccggggacttggtgcgaccagagtgggccaccaccgacgagggtgtggtggaacgcggcggcatggagtcgctgcgtccccgtccgcgcttggcacctcccgttggtggcgtcttgactaccgtagagagcagcgaaggtgtggagctagcgcctcccaaggatcccgacagcgacggagctccaggtccagtcgaatttcccgatgagggtgacattttggagcagccatccttgcctggctgcttatcggacactcctgggggctgtgagccctgcaccaaaagggaacctcctgctcctcctaaatctgttcttacatttgattcgatggccatgtcccgaatccgaattctgaagcccatgcagcatccattgctcatcctgccagtgctccttctcgtcctgatcgtcagcgaggcagcggcgggctccttggtgtccccgaacaacaggcaaccatcgcagaggttcttctacgc

SEQ ID NO: 16226 - DNA, 5172 bp, DROSOPHILA
atgagcaatggatgctgcatgggcttcagaattcggattcgggacatggccatcgaatcaaatgtaagaacagatttaggaggagcaggaggttcccttttggtgcagggctcacagcccccaggagtgtccgataagcagccaggcaaggatggctgctccaaaatgtcaccctcatcgggaaattcgactggacctggagctccgtcgctgtcgggatccttgggaggcgctagctccacaccttcgctgctctctacggtagtcaagacgccaccaacgggaggtgccaagcgcggacggggacgcagcgactccatgccgccgcgttccaccacaccctcgtcggtggtggcccactctggtcgcaccaagtccccggctgcttcacagccgcaacttcagcaacagatgaaaaagcgtccgacccgagtcgtccccggcaccaccactccacgtcgggtgtccgatgcttcaatggcctccgagtccgattcagactccgatgaaccggtgcggcgtccaaagaggcagagtgccaaggacaaaccgcaagcgggcaaggcacagccgccagggaaggggcgcttggccagtagtgcctcctccacggcacccgctgcccatcctagcgatgattccgaggaggatgaggaggaagaggaaccatcggcggccagagcagcttcctccaagcagcagcaacagcaggcttcctctttgcggggatcccgggccggaggtaatcgtgccatgagcagtggcgccgcttccgccaagggacgcgactatgatcttagcgagattagatcggagcttaagggattccagccgaagcttctgacgaacgccgcgagcaacgaggagcgcaaggatcttgcgaagaaagagccctccgatgagccagcgctgcaggacatcaaaaaggagcccaaactggagtcgtcggccaagagcagctccacggaactgtcctcggaaacggaatcgtatgcggacgaggactcgcagtcctccgactaccgcaaacaactaaagggatctggagctggcaaaaaggaacccacagcctctccctccaaattacatcatgaaccagtgaccaaaagggaactggctgtcaaggaagagcctctgaaaatcgaacccaaaacggagcctaaggaggaggaaaccaagagcaaacccttcttgtcaggtgcagacatcaaacccaccgccctgatagcgccagctagattcgggaatacctcggctgcccaggcagccagttcatccggatcgagctctactacggccaaatacacgtcggtgatcgtggagaaacccctaacaatcggcggcaagaagtcagtggagcaacatgtgcccaagaaggccgagcttctcaagaaacaatccggcggagctggtggaacagctgctagctcttccgcggcaagtcaggagtcgaagaagtttgcagaacctgtggcaagcttgaaagtggaaatgccggcagcttgctcgccctcgtcgtcctcctcctcatccagttccttctgttcgacaggttccgcggtgagttcaagttctgccactcgctccctgccggacatgagcaagctggagatcagcagcgggactgtcccaggagcgacgccgggagcagcggctctgcaaccatcgaatgtcgcacaggtcagttcgtccggtgcggccaaggagtcgaagtacagcagcagtggaggagctgctgcaggttcgggaataagcatgcgaaagctactctcctcggatgtctatgagtttaaggacacggagcccttcgagtttgaaaagcgcatctctccgatggcctcagtgggcggtactgtggctgccgcagccactgcagccggtgcaatggcggctgcaggagctgcttcggtgatcacgacaatggtgccaacaccaggagcctccggatcaggcgtggcagccagtgcctccacttcagccccagtggtggtcggatcggcggccagaaagcaagcgctcaaggccagcgcgattcagcacatcctggagcaccaaagtcccgccgctggtcgcgagcgtggtggctacggtggtatgacatcatctataagcctgttaacagcgcccaagcttaaaaagaggggttctccactgaaggaggcagccttgtgtatggaaaaggcgaaaacctacaagttggataaggatcaggtccagcagccagtggagcagaagactcagcagctaatccaacccaccttagggccagtagaatcatacggagcaggctcaccggaggccatgtccaacttgagtacgccaactacatcgagcggccacgcccagctgtcagcgtcctccacgtacagccaactgactccgcatcatgccacaccattcgatgccttgaggaagtcgcccagttttaatctgaacatcaccgccttgaacgaggaattggcgcagactgtgcaagagacaactagagcgctaacggatgcactgcagcctccaagtacgcctgtcccgccgaccgtgtcggcaagtggatctacaccaactgcagtgacgccagtgatcaccgcaatgcccacagctgggacagccggcttgagttgtcccagcactccacccacgggagcaaacccagtgttggcctcgcccaagttgagcacaccaccgcaggcgatcaatgccagcaagcagccgcctgcttctcacattgtgggaagccccttcatcgaaaccaggaacgtgttcgagctgagcacatccaacgaaggcagtggctacagttcgggcgagtccaaggacaacaagtttgagaaactggagaacgtgaaaatactgctggccggagcagtggggcccttcgacctggatgccggaagctatgagcagaagaccagctccatagcggataaggtgctaaaggccatcagtcagaaaaaggaggaggtggagaacaacaagggcaagccgccggtggaacccgctgccgccgccaagaccccagggcgtgaggatgtggtcccaagcccgacggccaaactggatctgtgcagcagtgctatcaagctcgacaccctgaagttgttgagcgaaccactcaagatacaaacgggtccacttttgggcgaactctatagacccggaccagcaaccagcagtccggagaccaagtccattctggagtcttcgttgccggcaaagaacagcgagttgagcgagacgattcagaagctggagtgtgccatccagcagcgaaagacgccggttggtggagccctctcgctggccagctctacggcaggtaccccacccaccgcccatactccgaactcaactgccactgcaggagcaggattctcagacgaatcaatggacagcaccgactccgagcagcgtctggtcatcgaggatgtgatagcggaagagcacacaacgaccacaacaactggcgagcagaagagtcctggatcccagcaagaggagggtcaaactaatacggccactatggcgacggcggttaccgccgaaacggaggggacaagcagcagcacacccacgcctccggttcctgctcccgtgaaattggaactgggcgccaaggctatgccaggaatccaagcacccattcctctgaagcccgcagagggtagctcctttgctgggaaactcaccggggtagttcaaccaccaccgctggccaagctccagcagcaggaggagttgggtcaggctcagggccagtcgaagagtatcagctcctttggcattcccattgtgctacccgagattcccgcctctgttgtggtggccacgccagccctcatggtggcttccgccgccacagtgatgcgtcacagtcctggctccacgccgaactcacaggcacccgtcctgatctctcccaaaacgttcctaaccgcaccaaaagtgggcgaggttggtggactgttgctaaaggcctatacaggagtaagcggagcagtgggagcggcgccggccggaagcgttatagcatcagccggcggaggaggaacacccactgtcatctccaatttcccccaacagcagcagcaggccagcgtgcttcaagcatcatcggagatgcccgccaactatgttttagacgcggaaatggccgaaccttccaatagcagtgccccagtggtggcgcgaccatttgtgatgcacgccgtgggcaaggaactgttcaatgtggtcgcaccggcggccagctcgcccttgatcagcgatccccacaacgagtcgattaatttgctttgcgaggaaaccataccgggcagtccggcgcccaattacggtggcaccgatcagctacccaccgccgtgaattcggctctagccatcgtgggcattacgcccctgccgccggatacgccgccacccgttccagttgctgccatccagcaacagcagcagcatcaactgcaaagcggccaacagcagcaggcggctaagacgggagaggtcaatccctcggggcccaacagttcgccggactcggccagccaggatgagagtggcgaggaggcaaagaagaatgcagggctcgagcacgaggactccaccggactgggagcgctgaacaagcgtaaacgcaaccgcaagcctctgccgatgagcgcccagacggcggctgccgtggcggcccagcttcaatccctgggcaagcggcgacgccaggtttccggaatgcgcaatcaaaaaaccacaaccaccgccgcgggctccgataccgacgacaactcggataacatagcgccgaacgcaggacagcagcagcagcagccacggcagagcgcccgccagcacatgatgccccagagcaatgcgcaacagcagcagcaacagcaattgctgcaacagcagcagacgcaactgccgcagggcatccagtcgaccaactcttcgggcgtgcgtccatgtccgtacaacttcctcgtcgagctggatccagctctcagctccgacgaatgcatcacgatcctgcgcaaacagatccaggatctgcgcaaggcctacaataccatcaagggcgaactggcggttatcgatcggcggcgcaagaagctgcgtcgccgggagcgcgagaagaagcagcagcaactgcagagccagcagcagggcaagatatgcgcctag

SEQ ID NO: 16227 - protein, 1723 aa, DROSOPHILA
MSNGCCMGFRIRIRDMAIESNVRTDLGGAGGSLLVQGSQPPGVSDKQPGKDGCSKMSPSSGNSTGPGAPSLSGSLGGASSTPSLLSTVVKTPPTGGAKRGRGRSDSMPPRSTTPSSVVAHSGRTKSPAASQPQLQQQMKKRPTRVVPGTTTPRRVSDASMASESDSDSDEPVRRPKRQSAKDKPQAGKAQPPGKGRLASSASSTAPAAHPSDDSEEDEEEEEPSAARAASSKQQQQQASSLRGSRAGGNRAMSSGAASAKGRDYDLSEIRSELKGFQPKLLTNAASNEERKDLAKKEPSDEPALQDIKKEPKLESSAKSSSTELSSETESYADEDSQSSDYRKQLKGSGAGKKEPTASPSKLHHEPVTKRELAVKEEPLKIEPKTEPKEEETKSKPFLSGADIKPTALIAPARFGNTSAAQAASSSGSSSTTAKYTSVIVEKPLTIGGKKSVEQHVPKKAELLKKQSGGAGGTAASSSAASQESKKFAEPVASLKVEMPAACSPSSSSSSSSSFCSTGSAVSSSSATRSLPDMSKLEISSGTVPGATPGAAALQPSNVAQVSSSGAAKESKYSSSGGAAAGSGISMRKLLSSDVYEFKDTEPFEFEKRISPMASVGGTVAAAATAAGAMAAAGAASVITTMVPTPGASGSGVAASASTSAPVVVGSAARKQALKASAIQHILEHQSPAAGRERGGYGGMTSSISLLTAPKLKKRGSPLKEAALCMEKAKTYKLDKDQVQQPVEQKTQQLIQPTLGPVESYGAGSPEAMSNLSTPTTSSGHAQLSASSTYSQLTPHHATPFDALRKSPSFNLNITALNEELAQTVQETTRALTDALQPPSTPVPPTVSASGSTPTAVTPVITAMPTAGTAGLSCPSTPPTGANPVLASPKLSTPPQAINASKQPPASHIVGSPFIETRNVFELSTSNEGSGYSSGESKDNKFEKLENVKILLAGAVGPFDLDAGSYEQKTSSIADKVLKAISQKKEEVENNKGKPPVEPAAAAKTPGREDVVPSPTAKLDLCSSAIKLDTLKLLSEPLKIQTGPLLGELYRPGPATSSPETKSILESSLPAKNSELSETIQKLECAIQQRKTPVGGALSLASSTAGTPPTAHTPNSTATAGAGFSDESMDSTDSEQRLVIEDVIAEEHTTTTTTGEQKSPGSQQEEGQTNTATMATAVTAETEGTSSSTPTPPVPAPVKLELGAKAMPGIQAPIPLKPAEGSSFAGKLTGVVQPPPLAKLQQQEELGQAQGQSKSISSFGIPIVLPEIPASVVVATPALMVASAATVMRHSPGSTPNSQAPVLISPKTFLTAPKVGEVGGLLLKAYTGVSGAVGAAPAGSVIASAGGGGTPTVISNFPQQQQQASVLQASSEMPANYVLDAEMAEPSNSSAPVVARPFVMHAVGKELFNVVAPAASSPLISDPHNESINLLCEETIPGSPAPNYGGTDQLPTAVNSALAIVGITPLPPDTPPPVPVAAIQQQQQHQLQSGQQQQAAKTGEVNPSGPNSSPDSASQDESGEEAKKNAGLEHEDSTGLGALNKRKRNRKPLPMSAQTAAAVAAQLQSLGKRRRQVSGMRNQKTTTTAAGSDTDDNSDNIAPNAGQQQQQPRQSARQHMMPQSNAQQQQQQQLLQQQQTQLPQGIQSTNSSGVRPCPYNFLVELDPALSSDECITILRKQIQDLRKAYNTIKGELAVIDRRRKKLRRREREKKQQQLQSQQQGKICA

SEQ ID NO: 16228 - DNA, 3546 bp, DROSOPHILA
gcgcatcgttctggccgctgctggcggcgtcaagcacgatgatctggtcaagcttgcctgcagcagcttgggtggcctggaggccagtgtgctgcccgcggaggtgactccctgccgcttcaccggctccgaggtgcgtgtgcgcgacgattccctgcccctggcccatgtcgccatcgccgtcgaaggctgcggctggaccgaccaggacaacatccccctgatggtggccaacaccttggtgggtgcttgggatcgttcccaaggcggtggcgccaacaacgcctccaacctggcccgtgccagcgctgaggacagtaagtgtacatcagtaagacgaccaggatatggagattattaactattattgccctacagacctttgccacagcttccaatcgttcaacacatgctacaaggacaccggactctggggcatttacttcgtgtgcgaccctctgcagtgcgaggtaagaagaattaatgattcaacagaaaactctcgagagaaagcaaattttacgtaaacaaacctcttccccaggatatgctcttcaacgtgcagaccgagtggatgcgtctgtgcaccatggttaccgaggctgaggtcgagcgcgccaagaaccttctgaagaccaacatgctgctgcagctcgacggcaccacacccatctgcgaggacattggccgccagatcctgtgctacaaccgccgcatcccgctgcacgagctggagcagcgcatcgatgccgtgagtgtgggcaatgtgcgcgacgtcgcaatgaagtacatctacgatcggtgcccagccgtcgctgccgtgggtcccgttgagaacctgcccgactacaacagaatccgctcctccatgtactggttgagggtttaagaggttccgccccgctgttgttggacattgtagtttaattcaaaagaaaatttcacccccagaggatcagtaaaccgataatactaaaagttatataagtttctcaggcctttattggtgtgaatagttaatgggtataccactgagtccctgctgcaacttggcgggctccgtctgtccaagggcaggatccaatccctgccaggtgcgatcctcgaaggagagcccggtatccgtcgtcatgagagccattttggcttgtgtagccagagcaagcgaggcgggatctccacctgtttccagggaatcgttgaccgctcctcgtagccttccactcaccaagctgacgtcgttctctggtatatctgccgcatcaaaaggcaagaagctgcgtccttccggcagaagttgtttgaaatccgtaacataagcttcggggtatctcatgtgccaggcgggattcaaggccatctctgcctcgaagacagagacaatgggcttatagtactctttggagtcgtacatattattgaacgggcaaccgatcaggacaaaacaatcgatttccaggaagttagcgagtttggctgggttaatcctgcccacggaaataagctgcgtcttaatgcctctgcccttcgccattgtttgcagtcgcgtcaccacatctaagtaaccttcagccgaaagagtggccacaatgagtcccagtgtttgtgcatccttacacttttcgatgtggaagtagcgacggcggatgaactgagccgtgaggggattttttgagctgagactgtcagatgatccatcgtagatgtgccattgcacggcagctggagcggtcagagagagattagcgaatcgctggttatcggcgcctatgaaaatacaaatcctctcaaggttcgtggtctccctagttgtcgttgattctgcctcgatgggcggaaacagttccagcagcagttctttgggctccaggatctcggacagctgcttctttagcttttccccgtacacatgctggtacccaatgtccaggtacacgcatacctgtcgatctatgctctccgcgcgcagaccttgcagcttgctcaggagaacattcacatccagcggcaactctggataaaggtaaagtaccggcaggcgggcggccctactgcgacatgcgtttccgaagtgaatcacactgtctgcatccacatgggcagccgcaatctcgtccacgcagcagcttccgtatgtggtgtccgccaggatgaagactttcacgtcctccggcgcaagtagctccttcaggcccacactaattgcattgctgtggggcagatagtcgtctgggaattgcaggcaaacctagaagaatacgctttagacggtaattccaaaagcgtagccgataaacacacccttttgtaaccacttttgcgaatccaatctacgctcgatcgccggtggttttcgttccagatctgttccaaggtcaccggctgctccacttccgcctgacgctccagggcggctgtgtccgagctcgagaaagccgatgctgatgtttcggacgaggtcatttcaaatcactttctactcaagattcctttgtccagtaaaaaagtatcaaatgcatgcagcaaaataaacaaagtcaagataacaccgatgcattagactggattagaaattgaaacggacaaagagaaacgaaacgcaactttgttatacactcacgaagtgtatattagttatattagagaacggatatattgtaataaataaatatataaattaaagtacaaaaaaccgaagtcgctaaaagttcctattcaaatgctagatcccaatttaaatcatctgttagtaaataaaaatataaaaatcagaatagttaattttattttaaaccagttttggtttaatttaaattaaataaaaaccagaatgcctgatagtatttaaagtgttttcatttaaaacattgttgcttattcctaaaattataaattaacatgtaaactatttaattcaattaacctgaagaaaaataatgcatatctgagttatttataaattatattaagtaaagcaaaaaccttatattcaggaatataaaaaaactcattgaccttagtagagattcatatcttaaaaatcgacgattttgcaaattataatttctttaatgaaagtgtatcacgtgatcagtgttcttgctaatttggttggaggacagacttaccgaagactcaaccccgaatactgcgtgaccacaaaagttcgcttgctcgtttgaattaatttctgttgaagcgcaataaacaatttaaaaattcaaaaagtttataaacctaagtcctgtaatgttttccccgatacaataaaaagcttactaaagaagacattcaggtaccccctcttttgaccaacgtccagtcactgatcttgacccaaatttaagtttcacgcgcctaccaacacttgttgctttctccatttcacctaccaacatttcaccaaactatattagcagtccaaaaatatgaaaaaccaaaaccttcgctgcatcgtaaccgattgttataagagtggtcaacaggatagtagctccatgtacaagttccccataaatccggttgtccggcagaagtggttggata

SEQ ID NO: 16229 - DNA, 1493 bp, DROSOPHILA
ttatcttgactttgtttattttgctgcatgcatttgatacttttttactggacaaaggaatcttgagtagaaagtgatttgaaatgacctcgtccgaaacatcagcatcggctttctcgagctcggacacagccgccctggagcgtcaggcggaagtggagcagccggtgaccttggaacagatctggaacgaaaaccaccggcgatcgagcgtagattggattcgcaaaagtggttacaaaagggtttgcctgcaattcccagacgactatctgccccacagcaatgcaattagtgtgggcctgaaggagctacttgcgccggaggacgtgaaagtcttcatcctggcggacaccacatacggaagctgctgcgtggacgagattgcggctgcccatgtggatgcagacagtgtgattcacttcggaaacgcatgtcgcagtagggccgcccgcctgccggtactttacctttatccagagttgccgctggatgtgaatgttctcctgagcaagctgcaaggtctgcgcgcggagagcatagatcgacaggtatgcgtgtacctggacattgggtaccagcatgtgtacggggaaaagctaaagaagcagctgtccgagatcctggagcccaaagaactgctgctggaactgtttccgcccatcgaggcagaatcaacgacaactagggagaccacgaaccttgagaggatttgtattttcataggcgccgataaccagcgattcgctaatctctctctgaccgctccagctgccgtgcaatggcacatctacgatggatcatctgacagtctcagctcaaaaaatcccctcacggctcagttcatccgccgtcgctacttccacatcgaaaagtgtaaggatgcacaaacactgggactcattgtggccactctttcggctgaaggttacttagatgtggtgacgcgactgcaaacaatggcgaagggcagaggcattaagacgcagcttatttccgtgggcaggattaacccagccaaactcgctaacttcctggaaatcgattgttttgtcctgatcggttgcccgttcaataatatgtacgactccaaagagtactataagcccattgtctctgtcttcgaggcagagatggccttgaatcccgcctggcacatgagataccccgaagcttatgttacggatttcaaacaacttctgccggaaggacgcagcttcttgccttttgatgcggcagatataccagagaacgacgtcagcttggtgagtggaaggctacgaggagcggtcaacgattccctggaaacaggtggagatcccgcctcgcttgctctggctacacaagccaaaatggctctcatgacgacggataccgggctctccttcgaggatcgcacctggcagggattggatcctgcccttggacagacggagcccgccaagttgcagcagggactcagtggtatacccattaactattcacaccaataa

SEQ ID NO: 16230 - protein, 469 aa, DROSOPHILA
MTSSETSASAFSSSDTAALERQAEVEQPVTLEQIWNENHRRSSVDWIRKSGYKRVCLQFPDDYLPHSNAISVGLKELLAPEDVKVFILADTTYGSCCVDEIAAAHVDADSVIHFGNACRSRAARLPVLYLYPELPLDVNVLLSKLQGLRAESIDRQVCVYLDIGYQHVYGEKLKKQLSEILEPKELLLELFPPIEAESTTTRETTNLERICIFIGADNQRFANLSLTAPAAVQWHIYDGSSDSLSSKNPLTAQFIRRRYFHIEKCKDAQTLGLIVATLSAEGYLDVVTRLQTMAKGRGIKTQLISVGRINPAKLANFLEIDCFVLIGCPFNNMYDSKEYYKPIVSVFEAEMALNPAWHMRYPEAYVTDFKQLLPEGRSFLPFDAADIPENDVSLVSGRLRGAVNDSLETGGDPASLALATQAKMALMTTDTGLSFEDRTWQGLDPALGQTEPAKLQQGLSGIPINYSHQ

SEQ ID NO: 16231 - DNA, 3202 bp, DROSOPHILA
ttcatcgcgtaatcattgtcaaagacaatgatattttttaactagtaactgaagtggacaacttttatcaggtcgagttttccttgattatcttccagggtattgcagtcatgttttctggcataaatttggaattttttcccaaggtatcttgcgttttcaatgtgttactacttacttggccatgtgcattgtacttttctgtgcagacgcaggcagacgtaatttcttaggggaagtcggaccctgtcgcaccctccgttggcattcccttcacgcaacgctgcctctttatgggttcatgggtacacttattcccgctcgcgggcacatgtttgttgggcgggaagcgaaacgcttgtctgtctgcgtccgtctcatcctttgtcgttgttgttgactctctttttctcattcgtccaaagtcgtagaacactcggggtaccaatggaattcgacttgcagagggaggttgactactattgtagtttgtttcctacgttagtaaataaaagattaaaaattaaaataagtttaaaaactaaaaaaaaaattaaaaccaaaaaagttttaaaattgataaagaatttaaaaaactagaaaaccaaaacaaataaaaaaaatttaaaaatattttaaaatcgatagttaaattacaaaactcgaaaacaacattaaataatacaaaacaacaacacaaggattaggttttgtccagaatgggcgtattctttattttcccttgatatttcagtttttactagagatgggtttttgtctttttttttttttaaatttttaaatatttgaaatgctttgtttccaacatgaacattataatttcgtcgtgaagattcccaacaaagattgtatttttaaaatagtacaatgttctggacgcctatggaaagttgctgcacaagaaagtgaggcagctttctaatcgcatccagctcattattctcgaatcgtcttggttgggaacttcaatacaatcccactaacgtgagttcttgttgaactgatcgtaaaagtcatcggagacggcattggttaggcccacaagggcttccttgcgctggcgatcctgctccacggccaacttggaattcgcccgcatcagctcatcgaattccgccttacgtcggcgatcatcctcgatttggtgaaggaccagggtgcggtccatattaatggagtattgctcccactgtttgtccatcatctgggcctccgtcttgcgctgaatagacaaacgaagctgctgatcttgtccaagacgaaacacgcgaagttcttcgggcgtcatgccgcgatacatgaaggcaatcttcttgttcggatcggtgcgcgattgagccacatccggattttcagttagcatatcgctggagagcatgttatagatctcggccatgtcatcctcgtacttttcacgcttttccctttcgcggtccaattgcttctgcttggccatgttgatattgaactgacgcactcgctggatgacttggttgcgcatctggtgatcagacttggccatctcctgcagatgcttgtctctgcaaccaacgttgtccatcaacacattatcggcctgcttgcgagcatcctccgccctcttacgctcctgcacttgctgatccagccaggctctttgctgctcccgctgccgctgctttctgtcagagttatagaggtcctcgccttgaaagatctgggcactggacacgcccagcgaaatgtcattgtcggcgactcttgttggacgtgccttcttcaagaaattcggatcatttaggtcgaattcgcggcgctgctccttgcgctgatagcggcagcgataatagttaagatccgagtccaccacacgctgttttttctccaactccatttcctgggccaggatcagacgcttctgcagctgctcctgttcttcaaatttcttgtcgcactccatctgggcggttcgctgcttctttttctcaagtatttggcgatccagcatttctaggtcgagctgtgaataggaatattcggcaatgaagctcacccagtctgcagatgcatacttaccccgtaaagacgctgtttggcattaaaaatgcgccgcttccgctcatcttcgtactgctcccgcttctgcagcttcatcgcctcgtcgagatcctgcttggtgcatataccgattttgagcgtcattgtgccggagttagttataaaagatgttcaactgtattcgaggtcgatatgtctgtctcttcttgttagtaggatgtggatatatgcctgagttgactttgtttgcccggttgctgggtgctttgtttattgtttgcctctactactacctctgtaacctactagttacagactatttacatatatctataataatttcatgggagttaactgccttaatataaaacaaatgctgatgtatgtacatatattcatgtcaatcgaattctttaatttttgcagctcgagtcgcttgacggttccaataatcgttaaagcgaccataaaataatcacctaatgtacatattgcccatatatatgtacatatatgtaggtgtttggcaaagaaatttaagttcgaactgggaatttcgatgcgactcacgtactacgaaataaccaataaataaataaaaatcggttaactccctcccccagctgttgtttgccacttctcctatggtatttatacgcttgatttgatgactgtacggctttttctcccgtgaaatttgtacatttttgacaccttcttaagatgaaactgggaacgggtagttggttgccagattagagtgtagaaaaggcataagctatatatatgcgaatcctaacctaaagtattaaaagtttggcttagtaatttttgttaggccgggtaatctaatcggtttctaatcatttgtttgcatgtgtttgcatcttccagaagaaacatcgccccaagccactctatatgcgcagacagaaggacattagccacaatatgcgctccatccttattgattggctggttgaggtttccgaggagtacaaactggacacggagacgctctatctctcggtcttttatctagatcgatttttgagccaaatggcggtggtgcgctccaagttacagctggtgggcacggcagctatgtatattgccgcgtaagtattcttgatagtccggtaat

SEQ ID NO: 16232 - DNA, 1146 bp, DROSOPHILA
atgacgctcaaaatcggtatatgcaccaagcaggatctcgacgaggcgatgaagctgcagaagcgggagcagtacgaagatgagcggaagcggcgcatttttaatgccaaacagcgtctttacgggctcgacctagaaatgctggatcgccaaatacttgagaaaaagaagcagcgaaccgcccagatggagtgcgacaagaaatttgaagaacaggagcagctgcagaagcgtctgatcctggcccaggaaatggagttggagaaaaaacagcgtgtggtggactcggatcttaactattatcgctgccgctatcagcgcaaggagcagcgccgcgaattcgacctaaatgatccgaatttcttgaagaaggcacgtccaacaagagtcgccgacaatgacatttcgctgggcgtgtccagtgcccagatctttcaaggcgaggacctctataactctgacagaaagcagcggcagcgggagcagcaaagagcctggctggatcagcaagtgcaggagcgtaagagggcggaggatgctcgcaagcaggccgataatgtgttgatggacaacgttggttgcagagacaagcatctgcaggagatggccaagtctgatcaccagatgcgcaaccaagtcatccagcgagtgcgtcagttcaatatcaacatggccaagcagaagcaattggaccgcgaaagggaaaagcgtgaaaagtacgaggatgacatggccgagatctataacatgctctccagcgatatgctaactgaaaatccggatgtggctcaatcgcgcaccgatccgaacaagaagattgccttcatgtatcgcggcatgacgcccgaagaacttcgcgtgtttcgtcttggacaagatcagcagcttcgtttgtctattcagcgcaagacggaggcccagatgatggacaaacagtgggagcaatactccattaatatggaccgcaccctggtccttcaccaaatcgaggatgatcgccgacgtaaggcggaattcgatgagctgatgcgggcgaattccaagttggccgtggagcaggatcgccagcgcaaggaagcccttgtgggcctaaccaatgccgtctccgatgacttttacgatcagttcaacaagaactcacgttag

SEQ ID NO: 16233 - protein, 381 aa, DROSOPHILA
MTLKIGICTKQDLDEAMKLQKREQYEDERKRRIFNAKQRLYGLDLEMLDRQILEKKKQRTAQMECDKKFEEQEQLQKRLILAQEMELEKKQRVVDSDLNYYRCRYQRKEQRREFDLNDPNFLKKARPTRVADNDISLGVSSAQIFQGEDLYNSDRKQRQREQQRAWLDQQVQERKRAEDARKQADNVLMDNVGCRDKHLQEMAKSDHQMRNQVIQRVRQFNINMAKQKQLDREREKREKYEDDMAEIYNMLSSDMLTENPDVAQSRTDPNKKIAFMYRGMTPEELRVFRLGQDQQLRLSIQRKTEAQMMDKQWEQYSINMDRTLVLHQIEDDRRRKAEFDELMRANSKLAVEQDRQRKEALVGLTNAVSDDFYDQFNKNSR

SEQ ID NO: 16234 - DNA, 3282 bp, DROSOPHILA
agtctttatttgtaagcttattcgtggggatgttgagagtcccgacttgattagtcggcttattttctcggttacaagtagattcactagaaactatataccccttatcttaaatcattgtagatctaactatgagttgcatgacccttacagagttttatattctgactataatagactttatcttattctgtatctgtaatcttgactctctgccgctcttaaagcaatcgattttaccttttttattacataattagatcctactaacagtaatatttaatatagtaattttacattttattcatttcctcggttcctgttctcttttttatatcgcgtctatatcttctcgcgaatcgagccgtacgatacacggcagcgcccctcggtcggttggacgggaggtgtagccgtgggacccgaattaaaaaaaaaaaaaaagttcatgtttaagtctctagttaaacattaattattgtttcagctaatactcctaaaagtgcaatttacaacactcaactacagggaaagacacaagaaattcaacaattcaaaatcacaaacacatagtacaagccagttctttcgatccctatcacttgtttaataaaaacatgtatcttaaccgtgctggatttttttaaatttctggtacgcaacactaaagtcttatctactactaacctaagggcgtaatcaaaactttgtattacggacttttgaaatagggctttttgaccacaaaaaggtactattaagcctatattgcagtgccacgaaacaacaatattgacaaagacaatggcataaagcatgcagatgctgtgatgcatgcgactcactgtgggtcccgacagtcgcgtccacgagaatagctatttagaataaaatgtatctacattttgatacccatagtcccgtagtcggtcccattgtctgacccgcagtcggtaaaatataaatattatgtaggtgcttaaaagttatcgtttatttaataaaatttaaaaggactattgtgctgggcgttgctgatgacgacacacgggccgtgctgcaccttcacggagctctcgctgcgccagtcgcactcgatgggcacaaactgacccttccgcatcatggtcttgggcttggtgatgccgtagcaggcgtgctggaagacgcttctcgagatgggcaggcactgctcgtagatctccacgatgtccgcgtgcatgctgtccacggagaagtcctggccacagcgcagcttctggtggatgtgcagtttgctgcgtcgcgagaactgggtgcgacacctccggcagtggaggtcctttagcggcgagctggtctgatccctttcgatggaattgacgggggtggagagctcgtggagccgctggaattggcccatgatattgttcaggatgaggaagttcttgttgggcagctgctggagggtttcgctgatatgatagggcaccacatacagctccttggtggtcttgcactgcttgcagtccgtagagattgacgcgcatgttgggcgggaagtagccgttgcactcgcggaagtgcttcaggtaggcggagcgcagactggcaagctctgcctcgctggtggagcagccggtagtggcggtcaggccctcctcctcctgaagctgcaggggtagggcgaagacggacgagtccgctgactgaccgtccgcctccaccctaatcctcttcacctgtactttcaatctggtgatgctgcactctgccatgccgtactcgctgctgcagttgaggtagttttcaatcctctgcataagcatctcgtagaccacgcccacggattcgtctacgtcgtagtggtggtccaccctcagcgagccgctctgaaagatcaacacctggtccatggcgttcacgtagcaggccaaattgaactccacggccacggtgttgttctggaacatccagcggagaagctcggggattcccctcgcacaggtctcgcccatgaagtgttccagcttgtccttggaactctcgtcgcagaaaaagaaagtctcgatctggcgggcctcgataatatccataacggcctgctgttgcttggtaagatgcaagccctgtgatgcttctcctccccgcagccaatgctgggagggcggctcatctgcgtcgatggagctgtagcaggtggcacattcgtgtaactggccctgggaaaaccactggtggtggaatgtctgcgtggtctcttcgtcggtaaaaacgaagctggatatgggctcgtcgaacatgattgagatatggaaactttggattcgaaaactgaaggtggatatagctctgaagcactgagatgtgtctatgacaaggttcagttgctgactgatacccttctcttcgtcgacctggcttataggcaaattgaagatggaggtaacaggtagtctgcgagtttacctgacgcaggtatatcccttggtagataacatctgcttaaggatttacctaatatatttatggttctttaagaacttttatgaagtttatagagtgattagggaatttcatattttttcgttattgcagcaacatttcaaaaccaggcaattccaggtgcgattccttcaaatctcataatacaagctgagttcattaaagccatttatggcagtgacatatgctgcaaatgctgtaattattagctacttacaaagaaatatagagcccagtcctattgccctagaaatatacgaataagaatatgtcaaacttacccattttaaacaaccaacataggtcaagcttcgtgcctttcaatttagttctctctatatatgcatttgtccctattcattaattttaactagttaaagctgcttctaaaaaaaaagcccattcaactcactaaagtgaccaaaggcaaaaagatcaaccaacagacagagagagagagagtaaacaaacggcgccaccaccgcgtgcaatttgcagcagtcaaacgcagggcgcaccgtacggtggagcctcccactgccaccgttttgagccatggcatcgtggccgttgtctccgctgtaaaaccaagtgcacaatggccagtggagaaagaggacactggacaatggccacctcgtggcaagtgacgcgacaatggcgacggcgatgtcctggatctacaggatctggactctggagccagttgcactgcagtcgcttaatttccgtttccgcttttcacgcttcattgtccgccttggcttaggttttggtttcggtttcgggtgtggtttt

SEQ ID NO: 16235 - DNA, 1282 bp, DROSOPHILA
atgttcgacgagcccatatccagcttcgtttttaccgacgaagagaccacgcagacattccaccaccagtggttttcccagggccagttacacgaatgtgccacctgctacagctccatcgacgcagatgagccgccctcccagcattggctgcggggaggagaagcatcacagggcttgcatcttaccaagcaacagcaggccgttatggatattatcgaggcccgccagatcgagactttctttttctgcgacgagagttccaaggacaagctggaacacttcatgggcgagacctgtgcgaggggaatccccgagcttctccgctggatgttccagaacaacaccgtggccgtggagttcaatttggcctgctacgtgaacgccatggaccaggtgttgatctttcagagcggctcgctgagggtggaccaccactacgacgtagacgaatccgtgggcgtggtctacgagatgcttatgcagaggattgaaaactacctcaactgcagcagcgagtacggcatggcagagtgcagcatcaccagattgaaagtacaggtgaagaggattagggtggaggcggacggtcagtcagcggactcgtccgtcttcgccctacccctgcagcttcaggaggaggagggcctgaccgccactaccggctgctccaccagcgaggcagagcttgccagtctgcgctccgcctacctgaagcacttccgcgagtgcaacggctacttcccgcccaacatgcgcgtcaatctctacggactgcaagcagtgcaagaccaccaaggagctgtatgtggtgccctatcatatcagcgaaaccctccagcagctgcccaacaagaacttcctcatcctgaacaatatcatgggccaattccagcggctccacgagctctccacccccgtcaattccatcgaaagggatcagaccagctcgccgctaaaggacctccactgccggaggtgtcgcacccagttctcgcgacgcagcaaactgcacatccaccagaagctgcgctgtggccaggacttctccgtggacagcatgcacgcggacatcgtggagatctacgagcagtgcctgcccatctcgagaagcgtcttccagcacgcctgctacggcatcaccaagcccaagaccatgatgcggaagggtcagtttgtgcccatcgagtgcgactggcgcagcgagagctccgtgaaggtgcagcacggcccgtgtgtcgtcatcagcaacgcccagcacaatagtccttttaaattttat

SEQ ID NO: 16236 - protein, 421 aa, DROSOPHILA
MFDEPISSFVFTDEETTQTFHHQWFSQGQLHECATCYSSIDADEPPSQHWLRGGEASQGLHLTKQQQAVMDIIEARQIETFFFCDESSKDKLEHFMGETCARGIPELLRWMFQNNTVAVEFNLACYVNAMDQVLIFQSGSLRVDHHYDVDESVGVVYEMLMQRIENYLNCSSEYGMAECSITRLKVQVKRIRVEADGQSADSSVFALPLQLQEEEGLTATTGCSTSEAELASLRSAYLKHFRECNGYFPPNMRVNLYGLQAVQDHQGAVCGALSYQRNPPAAAQQELPHPEQYHGPIPAAPRALHPRQFHRKGSDQLAAKGPPLPEVSHPVLATQQTAHPPEAALWPGLLRGQHARGHRGDLRAVPAHLEKRLPARLLRHHQAQDHDAEGSVCAHRVRLAQRELREGAARPVCRHQQRPAQ

SEQ ID NO: 16237 - DNA, 3304 bp, DROSOPHILA
agtaaaagtcgttggctaacagcgcttcacttcgcacagcaaacaactaaattaatcctagcttaaatcacttttaaaaccatttaaatatgcggttttaggtgagcaaaactcgccttgaaattacgaaacagtcgcgaaaacattattatgtgtaaactgctcaactgttgggaagcaactgaacctggccaaaacaaaccgaattcctctagccaacaaaaaggtgctcacatgagctttaattattctgaacattagatgtcggaaactggcttttatgactaagcacatcaaagttttggccacccggccttgggggttcaagaaactttaagactcttcacaaattacttatgtcttgtacatcaaataatttaattgcatatatttgtttatttatatttgtacactgtttaaaggtgtattaaagtcacgattcggcaaaaaaaaatttaaaatatatttcattagctatcatagcattttttaatttacatttaagctcgaattaaaccgcaggacatttgaaatcactagtcacaggattaggcaccaatcactagaccaattacttaccagatccttgagctcaggatgagtgacactggaagtaatagtcagagacatgatttcactagttaaaattgttatttatttaatgtgtcgcttttaacatttaaagctgaactgatgcatctgcagaaaggtcggtccaatttatactgccgcctctcccgctttctacgcgaatgtggagagtgccgcgctatcgttatcaattctcccgctcttcagtcttctggcggccggccccgtctctttctccctctcccgattctacgctgattaaaactgcgcagcgctacaggtttcttggggccacaattgatcgtacagctgggacatttgatcagggttataatttaattgcctttaatattctaatttgaacaagtcaagtgcagtcttttgtgttctccggattgtggactaactgttatttgccgggctcgtattttagccggctcaaacgcaaaatgaagtccaacaggaacatttgtatttttatctccttgggattctcggtgacatagaagccgggaacgccggccttttgaagtgtggattgttggtcattaacctgcgtaatgatattagatattagttcaacatcaagaaaaaacaaagaaagttaaagtagtaaaatctaatttcgtattcccatataagcatttaaagttatgattagaaataatttgtattacaaaagaaaatatctttagtgataatttcatttcaattataagaatctgcagataaatatatacctaaaatatacctaatctatagatccatccataatcaaactatgtatcatatttgaatttaattttaaataggattaggattatctaagtttgagattcgactattgtttttaaagaaatttggatggtaagaccaactaaaagtgcgtggaatggaacgactcaaaaggatattgaattcttcaccttttgatctagtatttcgataatcttcgtatccgactcgtgtagtttcttagtgtgctttattttcatgagtcccaaaatgtggcgcaactcctcgggatccttgatcttgctcctccactcggccacttctatttcatactcgttctccgcctgcatccgtattttaattaagtgtctttcggtttcgtgttgcagctccattaatgcttttactattacaaaaatgccatcgtttagcacacaattggcgagttcggtgagtagatcgtaggaaatgcgtgtctgcaagtttctgttaatcaaaaatggcgttaaatatttaaataaactaaatatcaaggacttactcgggaagttccgaatggtaagttcgcaattggtccaccaaaaaatagattttgcgttgtaaaaactccggagttggctgctgatactccactactgcctcactagtgttcgcactaccttcgctggttgccggtatgtccgccatcttaactaaattgtgatttcctatttatttacaataatttgtgtaatattcccaagtatttgtgtttttagtgatgttttgtgcaaccgcactccaatttcgcctcttcgccgcacgaacagctgagcgccagggctgcaaactgcagcagcagcagtgtgaccacaatcagtttggctgcccacataacggtaagtcagagaaagacgcggaaagtaaaatgtttcaaaagtatttatatatatttttgttgtatcagagcgtgaaaagaattgtgactgtacgatttgaaatcaatgatgcttatgactaaggtgattacatcggttcgtattatgattagaagttcaaagatttgcgagccttgatgaaattcttatcagcctcgtaagtgtacatgcgattcagtttgtttttgcggcgctttttgagttcggtttggaactttccgtgtcctgagctgctgggggtggctggtaccagggaatacttcttgctgtccagggagtagcactcgcgttttccgaactcatgctgctcctttggggtttccacgattttcaggctgttcaggcgctgcagcacttggttggtttcatttgtcgacgacataataactgctaggctggctgatcaggaagttaatgtgaagcttgacgttgctgatttgctactgatttccttttgcccacggccttctttatatccacttgagtgtgcaatttcaggactgccataaatatctgcgcggaaaatacagcttatccgttttccacatctgtcacttttatggtgctacctgctcataattaaaatttccgcagaaaattctcgctaatccctttttaatgcgttcagaattacgcgagcaggtagtaatgggttttagtctaccgccataaagtccgccttttacaaatcgcaataaattagaaaggaattcgtaacaatttccaaatttggtgtttaaagtgcataactttttaatggagtatattaatttcttactttatagataataattccttaaagataatataaaaatataatttattggatctccaaatgctttcaattatattggatctctaaatgctttcaataatccaatcttttaaatgtagcctctaatcaattaatacgcttttaaaaaaacgcgcgcaggtgaaagaacccactgccgttttaaagtgtgtacatactggcgaaatcatatggtgggcatacacgtgtatcggttgtacagtttatgcgttaatcgacttcgcgaactacgaaacctaaagctgat

SEQ ID NO: 16238 - DNA, 876 bp, DROSOPHILA
tcaaatcgtacagtcacaattcttttcacgctctgatacaacaaaaatatatataaatacttttgaaacattttactttccgcgtctttctctgacttaccgttatgtgggcagccaaactgattgtggtcacactgctgctgctgcagtttgcagccctggcgctcagctgttcgtgcggcgaagaggcgaaattggagtgcggttgcacaaaacatcactaaaaacacaaatacttgggaatattacacaaattattgtaaataaataggaaatcacaatttagttaagatggcggacataccggcaaccagcgaaggtagtgcgaacactagtgaggcagtagtggagtatcagcagccaactccggagtttttacaacgcaaaatctattttttggtggaccaattgcgaacttaccattcggaacttcccgaaaacttgcagacacgcatttcctacgatctactcaccgaactcgccaattgtgtgctaaacgatggcatttttgtaatagtaaaagcattaatggagctgcaacacgaaaccgaaagacacttaattaaaatacggatgcaggcggagaacgagtatgaaatagaagtggccgagtggaggagcaagatcaaggatcccgaggagttgcgccacattttgggactcatgaaaataaagcacactaagaaactacacgagtcggatacgaagattatcgaaatactagatcaaaaggttaatgaccaacaatccacacttcaaaaggccggcgttcccggcttctatgtcaccgagaatcccaaggagataaaaatacaaatgttcctgttggacttcattttgcgtttgagccggctaaaatacgagcccggcaaataa

SEQ ID NO: 16239 - protein, 194 aa, DROSOPHILA
MADIPATSEGSANTSEAVVEYQQPTPEFLQRKIYFLVDQLRTYHSELPENLQTRISYDLLTELANCVLNDGIFVIVKALMELQHETERHLIKIRMQAENEYEIEVAEWRSKIKDPEELRHILGLMKIKHTKKLHESDTKIIEILDQKVNDQQSTLQKAGVPGFYVTENPKEIKIQMFLLDFILRLSRLKYEPGK

SEQ ID NO: 16240 - DNA, 4679 bp, DROSOPHILA
ggatgaggtcagtctggaggacataggtgccagacatcgtcgcgagcgcaaggatttgcaggccaagctgcaggccatgaagaagaatgcgccgaaaaataataaaaacaagcggaaggagttcctggaggagatggctcgcctggagggagagctggagcagcgccacaaggcggaactgaaggcagcggaagccatggaggcaccggtgttggtggaaccggtcgtcaaagagccagcggaaaagccagaaactgaagtgacagacgatgatggaatcgaggaaaaagaggaacagctggcgcccaatcagcgtgtttccaaggcacagaaacgccgggacaagaaggcaaaggaggcacgtgcacgagaggcagagatcaagacggagctgcaaaatgctgccaatcagccaacgcccaagttaatcgaactgcagcagattacagcaaagctatcccaacgccaattatcccttcacaatataccctccgatggcgactgcttatatcagtccatcagacaccaacttatcgtaaatgctcttccaggtaatgcttcacgattcagtccacacagcaccaaaactaatccataataattgcaccaaaggtcacagtgttcaggagttgcgggaggaaactgccaattatgtgcgtgctcacaaggactcgcttatctcatacatgatccacccggaaacaggagacattctgaacgaccaacaattcgaacaatactgccacgacatagcaaaaactcacgcttggggtggccacatagaactgaaggccatctcatcgctactccgggtgcccattgaagttatccaagcggaaggagcaccgacgctcctggggcaagaggaattcggtggatcaccgctgatcatctgctaccaccgccacatataccaattgggtgcccactacaattccacggtgccagcagcctaaacgggaaatgcccaatggcatttaccatcaactcactcgattttgtaacagattgttttattacatattatgttgactttataaatacgtatgcatttggaagatttgaattattgtcaaaaattgcaagtatgtagtagttatatacaataatagtcaatataataacaattctaggttagctagcaacttagttagctggatttgttctaagaaaatatttcctatatagaaaaataattcgtttagctcaaatttagttttcttgtggcggtttagtgtaaattcaagcaataatttgattattcctcaaagcctagctacttattacttggtaatgttgttgcaacaacccattatttgtccttttttctaggtaaagcgttcgatttcaattatttgtccttcttgctgtccttgggcttctcggcagccggtttgttgggataaatagcgaacatggagagctgaatgccgcccaggaccagcagcaaaaggttctgcagctgaaatagaagaattttcggttcaaatttacattctcgtttaatagaattaattgctaacttaccaccatcacagtattcttgatggagatggcatacagcgtccaggaaaatgccaccagattaccggcaaagataatcgggaacggcattccctcggtgctcttcttctcaatgattttcggcagatgcagcaggggagagcccaccatccaaaccaggatgccggtgatcagcattcccaggcggaactcaatcttggcgggatcctcgaagttggcatacgcggtgatggccaataggaacaccgaggaatagccaatctgcttccagatcttgctcctgctggcgctcgaggcgtagtagtaaaatccgaagaggaagacgaagtttatcaccaggccgattaaattcgtattgatcatggcagcatcattcataatgttggccagcttcaagctgagaacggtcctagaaagttcaacaatttgttaattagttactttaatttaggacaaaatttggtttttatatttaaacaaaaatgtaatactgttaccattcatattcattttaaaatattcttcaatataaggctggaaattttataaattccagttaacttgtagataagagcatagttttctgaggatattataattaattcaaattaattgaccctgcccgaaccagttttccagcagtaagtcgctacagaaagttcgaatcaagagaaatggaactagttttcatttaaagtgctccagtctaccacttcattgaaaaaaaaaaccagtttacacttattaattgcgttatcagattctatactaggtggagatagataaataagcataatagggccggcgtgcaaatcatggtacacgtagcatttgataaggagctcaacgctcaacaaataatcagcattatcatcgatcaacctataaacaaacccacaacaatggtgaaatacacccgggctgggcgaaatgaaatgcaaactggccgaggaacctgcccttgaccgagacctcgagcgcccattgggtggagtggaattcgtttagcatacaactgttgcttcgcttgcatgtctgcgggtccttacacttgacacagtccaagttaacaccttccggaaaaccacccccaagtaagccccggcgcagtgatggcacactcacttgatggtactcattcacttgctgccatatggcactttatgatcttttgagatgttcaaaacaaacagtggaaagtttacgatttaaaaataaaaaggtaaattcctcgagagttcatctacatttagtgctttagccagcaggaatttggaattgtttaaagaaatgtattattacggaaactatagttaaaaaaatattatgttttgctaagcaaacactattattcatatgcagtaatggacaagccttacggctataattagagaagattatatttatagatgacaagatattcccatcaccaccactgggtggcccaccccctttggaatctgggcagccccgctttatgccgagcacgtggagagggcgagtcgcgtatctttcgcccgtcgtataaacgattagcggctctcccagatttggacagactctaccggatcagcattcgtaatagaggagctctaaaattatacactctagataagagctacgtgtttggagggttctcgcatcgataaggcggcaaaagtgctgctggcggattttcgacaaggttaacgatttcgaaatgtaacggtcgcggatgatcgaagtgtaattcccatttggccaacgcagtgatgtaatcgattccattgttatcttcttgaattgtgtgcaaaaccgattcactggcggccttgaagagactcgattctgtgctgtcatggcgacagttctaaaatttaatcaattcccacacagatgcgttggcttttgttcttttcactcgcttttcctgccccctgcccactagtttttttttcgatgtcgcatgcagtggagcatcacggaatcccaattaggttacttacagcaccactccgaagagaaatgggcccaccgggtagacgtcgctgctacccttcttgcggatgtcgttcatcagaaccactccggacagaaattgcagggtagttatggtgccggctaccttggcgattagttcgctgtgtggcgccaagagatcccccagtgcctccatgatttcaatgactctcagttgatgcctttcaaacgggttatgtgggaacgggaggggggccgagtgccgcgcgagtataaacaaatgaacgaaaacaaaaactaacgaccgactggcggctgccgtaacaacaaacgaacaaatactgagcaccaacggtggggctggcaaccttttataatcgagaatcccctagaaatggacgcgtctctccgattttccccaaacgttatcgcccgcgagggcttatcggatacgaattgaatttcaaatttccgcgaaacgttgctgcatggcaaagcaaatgagttttctctctagagcaacaggagagtattccttagaacttatcaacatcttctttcttctagtatcactgaattaaagccaaacaatagtttaaactaagcaaattcactgataacttcggtttgacttgaccaaactgaaagtcacttgagaacaatgatagaaagtgagaaactcaattgagattaggcttcttaatatatacatacatagtctccttacaaaaatcaattttattcaaacttatccaactacagtcgttagcaatcatcctcacacctcctccttcagcacatgcttctttttctcgctgacgtagggcaccttcttgctcttcttggtgtgcttgcgcacattggcctccttgacctgctccttctccttgaccgtgcgcatcttcttctgtgcattgagcacgtgacgcggcacctggcgatggcgcgcgatgcgcttgatctgcggatgagcggcatacttttgcttcagcgcctcctggtaattgaaattgacgcgctcacgtggacggatgacgcccagcttttcggaggcattcgccttccacatgcggacgttcatttcgtcggagccggagaaaacgtatcgattatcgagggaccaggccacgcagaccacatgctgcatgcgttttgtgtggtaaatatcccgcgagtgactgtggtgggcattgtag

SEQ ID NO: 16241 - DNA, 1038 bp, DROSOPHILA
atggaggcactgggggatctcttggcgccacacagcgaactaatcgccaaggtagccggcaccataactaccctgcaatttctgtccggagtggttctgatgaacgacatccgcaagaagggtagcagcgacgtctacccggtgggcccatttctcttcggagtggtgctgaccgttctcagcttgaagctggccaacattatgaatgatgctgccatgatcaatacgaatttaatcggcctggtgataaacttcgtcttcctcttcggattttactactacgcctcgagcgccagcaggagcaagatctggaagcagattggctattcctcggtgttcctattggccatcaccgcgtatgccaacttcgaggatcccgccaagattgagttccgcctgggaatgctgatcaccggcatcctggtttggatggtgggctctcccctgctgcatctgccgaaaatcattgagaagaagagcaccgagggaatgccgttcccgattatctttgccggtaatctggtggcattttcctggacgctgtatgccatctccatcaagaatactgtgatggtgctgcagaaccttttgctgctggtcctgggcggcattcagctctccatgttcgctatttatcccaacaaaccggctgccgagaagcccaaggacagcaagaaggacaaataattgaaatcgaacgctttacctagaaaaaaggacaaataatgggttgttgcaacaacattaccaagtaataagtagctaggctttgaggaataatcaaattattgcttgaatttacactaaaccgccacaagaaaactaaatttgagctaaacgaattatttttctatataggaaatattttcttagaacaaatccagctaactaagttgctagctaacctagaattgttattatattgactattattgtatataactactacatacttgcaatttttgacaataattcaaatcttccaaatgcatacgtatttataaagtcaacataatatgtaataaaacaatctgttac

SEQ ID NO: 16242 - protein, 228 aa, DROSOPHILA
MEALGDLLAPHSELIAKVAGTITTLQFLSGVVLMNDIRKKGSSDVYPVGPFLFGVVLTVLSLKLANIMNDAAMINTNLIGLVINFVFLFGFYYYASSASRSKIWKQIGYSSVFLLAITAYANFEDPAKIEFRLGMLITGILVWMVGSPLLHLPKIIEKKSTEGMPFPIIFAGNLVAFSWTLYAISIKNTVMVLQNLLLLVLGGIQLSMFAIYPNKPAAEKPKDSKKDK

SEQ ID NO: 16243 - DNA, 4716 bp, DROSOPHILA
tcgttatatatatatatgtatattatatatagtttaacaaacgttttgcaacaagtattagctggataaacgacttctatatatatgtatgtactagcacaaatgcagtgcgttccgtgactgtaagtgccaatgtcttggccttacagctgcgaaacgcactgcacatgttttgaagaaaagtaagaagattgtttgcttttgcttacactttgacgttccctattaattcacttaagttaacgagaaaaaaatgagagtagagtaatagtttaaaagtaaaattgaaatattgaaaatattcaattttaatatattttcaaagaactgaattaacaagttttccaaaatgtgacttaccaaaacaaaaaaaaaaacaaaaaatggactaaacgaaaaaagaaaagttattgcttacgaaaaacatatattataaatatatactaatatacttcaatatgtttccagaaacaagattaaaacagaatatgtatgaactatgatttagctgcgtaaacatttacacacaactattattgtccaacatttgtaattctgttcgcaactacgcatgtcaacgaatagccgagaaaaattgtaatttcaaaactctgatgtaaagtatatggaaaacaactatttatatgtatatatttaaagtcaaaatgggatgaatgtaaggcggagcagtgcgcgccgtgactgtaagacggtactacagacagtcatgcatgactcgcactgtctgcacactcgataaatgtgattgaagacgctttgggtaatctcaacttgtgtttagttttaagcgaaactcatgtgttcatccaaataaagaagaggagaagaaggctgcccgggatcaggcgacaaggatcacctgaggagtgaggataaataaagttggaatcatatacacattcatttcatgaagcaaacgcctgtttctttgtgggcttcgcgggtcagcaatggatgatcacctgctcaagggggcacttcacttggccaggcggcgcatctgctgtgtctgctcactcatggctatctgagcgttgtccgcctggttgatcagcgcatccagcttgtccagctgcgagtccatgcgcttctgcttggccgccttggcggcgctgacctcggcagccgtcggcggaggcttggccagtggctgttcctggacaggaggacgctcctcctgggtggaggcgattgagcccgatctaccaatgcccgccgaaagatccaccgagcccgagctggcccgggcaaatatgttggtcaaactgccacatgccgtttgcttgaagcgattcagcttctgctgcgtgctggacaggatgctattgagctcgcccagcttgccgcccacattgcccagactctcgtcttgttgctccagcagctggagagcgaattttagtggcgattcgtatggttagaggtcataacataccaccgcctcggcggcctcttgctcggccaactcgtgctccagtcgtgcctgccgtttgcgctcgaactccgcgggatccggtggctggaggcccagcagctccgcccgttggcattcctgctcgtagctggtgttctccggctgctccgacgacatgcttccgaacactctatcacccaacgactggcgatgccatcgatttttgctggtcgtggccccaatccacccacttggttgtgcatggagtgggcacaacgcatgcgctgttccagctgttttgggccacagctgatgctgaggcttaaagctttaacaaacgatgattcttaagtctaagttagagttagattaaagatcaaaaccagcactgttcttctacaatgaaacacacttgtctacatttctcctattcaagggccactcatagtcgctacactcgactacagcatattttattttttatcatggagtttgttaaccgaaatatagttaggagttattaaaagtcaggtggatcacgaggagtttggacagcgctcgtagatttggatgtaggactcggtgagcgtgatcatctgcggcagtatctcggtgacatgcagatcctgcatctcgtaccactgaccgttggccttgtgcaggatgtgggcacgataggtgcccttcttgggatcgccgtcgtgcacaatattggccaccagattgtatttcgtatccttgacatccttgtcgcgctgccgcatgcccagaatgtcgccaaagtccacgtgcctgaaaatgaaatccagttgcaattaatattgtaataattcgcgttttgacactcacttgatgggaaagttcacaatggtgggattcttttccaggaagaatgtgttcttggtaaatcgcttgatgtacagaatgatgaactgcggcaggcgggtgatctcgaagcgcttcataaagttagccttgtaggtcttgtactccttttcggcagtgccattgaacttgctcagcagctgatataagttcacctgcggtatgatgttctcgcgaaactcgtcggtgaacagcggcggcggaggtagatcgcatgtgaggtagatgaaatttttgtcctccacctggtccttgtactcctcggtggccagcagttgcgccttggcagcgtcgtccaactcgacgggcggcatcttgcgcgtgtagatcttcatctcgcccagaaatatcttgtagagtatagaagaattcggatgtttgttgcccttgagggcgcggtgcagtgtattgaggaaccaggacagaaagtcaatgggatcgccttgctcggtgatctggaaacgcttgctggaccaaagcaccacagcttgcagcatctcgtgtggcgaaacgtgcgacttaaagttccgcggattccacatcttgcgcattagctcgccgaaacgttgcaccagcgtgaacacggaatctccaggtggccgcacgacatgcgcatagctttgcttttgcaggaagtagtccctaagtggaccgacgtgggagagtgcatgcagcaccacattgcagtagtcgttcgctttgatgttgttcaaacccacgacgccgggtaagtacagaacaccgtccacggttcgcgaatgcttcggctgtaactgatccaacttgctgatctcctggcgtgtgaacgttggatttagcacgtatttgatatcgtccaacgaggagtcgatgatctcgtaattatccggcaggcagtagaatcgcagcgtgtgcagattgaggaacacgtgatgagcctcgcccacggaatgtgtgtaggcgtgggtgttggtgccacgtccctggaagtacttgccgcacaccaggcaggcataaacattgatcctcgtcagcgaaatggagcaaagcttctcgaaatcgaaatccagcaggttacggttgatggtgtccaagtagggacacaccctgtacttcggattgaacacggagggcgtctctacggatggaaacgtgaattaatgccctgcaaacatgtttatctgcaatagttaccatcctcttcgacgggatttgccggcgtcttctccagcttcatgcgcttggcggctaaatggttgttgcaaacatgaaaacataatgtgggcttattggaatgacttaggacctacctggagcttgcgtttgcgccatttttccagctgattcagtcagtaattcatataaaactaaaattaagacttttgttgactgtttgtccgactggccgcagttatcgattggcaggaaaatcgatttatctttgacagcgatgtaataactgtttccacttatatattccaaagcgttcacactgctgaaattaagaagtaaacatttttagatgaataacaagtttagactgagttacatcaaaaaaaaaagcctcggcataaattattaaattacctaataatataaaattatttgtttgttagttttcaaatgttgtaatactttagattaaattcaaaaattatgctaactagctaacttaactaaatcgccacaaaacttttaggttacccaagtaactgactaatttaatactaatgagtttactgctgtaaaatatgtttatttatatttctttatttctttataaaatgtgcttttcttaattgaattttttttctatttaagttttgcgtacacacttataagtaaggcagctaagatgcaaattgatgatagttgctctaaaattgagaaacaggttgggcttgaagaaccaccaggtcattcacgaatccggattcttgggcttatcgctttatttgggcctatggctctatttataactgatcgtatcagtttagggggccacatagcctcggcccaccccactgccaccccctggaggagatcctctgcagatctgcgatcggagaacgaccttaaacgccctaccgcagagagccaaagctcccggcttcggattctccgaggaaagctccggtctggccggcgattggtggcgccgataaggtgtaaacagtatttccagttcagttcgcccagcgatcctcttgcattcggaacggaactttccaagattaagcagctttcattatgtggacagatctcgcgggcaaggtgatcttggtgaccggagccggggccggtattggccaggcgttggtcaagcagttggcctccgcgggtgccaccgtcatcgcagtggccaggaagccagagcagctccagcagctggtggccttcgatccggtgcacatcca

SEQ ID NO: 16244 - DNA, 2267 bp, DROSOPHILA
cgataactgcggccagtcggacaaacagtcaacaaaagtcttaattttagttttatatgaattactgactgaatcagctggaaaaatggcgcaaacgcaagctccagatgaagctggagaagacgccggcaaatcccgtcgaagaggatgagacgccctccgtgttcaatccgaagtacagggtgtgtccctacttggacaccatcaaccgtaacctgctggatttcgatttcgagaagctttgctccatttcgctgacgaggatcaatgtttatgcctgcctggtgtgcggcaagtacttccagggacgtggcaccaacacccacgcctacacacattccgtgggcgaggctcatcacgtgttcctcaatctgcacacgctgcgattctactgcctgccggataattacgagatcatcgactcctcgttggacgatatcaaatacgtgctaaatccaacgttcacacgccaggagatcagcaagttggatcagttacagccgaagcattcgcgaaccgtggacggtgttctgtacttacccggcgtcgtgggtttgaacaacatcaaagcgaacgactactgcaatgtggtgctgcatgcactctcccacgtcggtccacttagggactacttcctgcaaaagcaaagctatgcgcatgtcgtgcggccacctggagattccgtgttcacgctggtgcaacgtttcggcgagctaatgcgcaagatgtggaatccgcggaactttaagtcgcacgtttcgccacacgagatgctgcaagctgtggtgctttggtccagcaagcgtttccagatcaccgagcaaggcgatcccattgactttctgtcctggttcctcaatacactgcaccgcgccctcaagggcaacaaacatccgaattcttctatactctacaagatatttctgggcgagatgaagatctacacgcgcaagatgccgcccgtcgagttggacgacgctgccaaggcgcaactgctggccaccgaggagtacaaggaccaggtggaggacaaaaatttcatctacctcacatgcgatctacctccgccgccgctgttcaccgacgagtttcgcgagaacatcataccgcaggtgaacttatatcagctgctgagcaagttcaatggcactgccgaaaaggagtacaagacctacaaggctaactttatgaagcgcttcgagatcacccgcctgccgcagttcatcattctgtacatcaagcgatttaccaagaacacattcttcctggaaaagaatcccaccattgtgaactttcccatcaagcacgtggactttggcgacattctgggcatgcggcagcgcgacaaggatgtcaaggatacgaaatacaatctggtggccaatattgtgcacgacggcgatcccaagaagggcacctatcgtgcccacatcctgcacaaggccaacggtcagtggtacgagatgcaggatctgcatgtcaccgagatactgccgcagatgatcacgctcaccgagtcctacatccaaatctacgagcgctgtccaaactcctcctttaagcctcagcatcagctgtggcccaaaacagctggaacagcgcatgcgttgtgcccactccatgcacaaccaagtgggtggattggggccacgaccagcaaaaatcgatggcatcgccagtcgttgggtgatagagtgttcggaagcatgtcgtcggagcagccggagaacaccagctacgagcaggaatgccaacgggcggagctgctgggcctccagccaccggatcccgcggagttcgagcgcaaacggcaggcacgactggagcacgagttggccgagcaagaggccgccgaggcggtgctgctggagcaacaagacgagagtctgggcaatgtgggcggcaagctgggcgagctcaatagcatcctgtccagcacgcagcagaagctgaatcgcttcaagcaaacggcatgtggcagtttgaccaacatatttgcccgggccagctcgggctcggtggatctttcggcgggcattggtagatcgggctcaatcgcctccacccaggaggagcgtcctcctgtccaggaacagccactggccaagcctccgccgacggctgccgaggtcagcgccgccaaggcggccaagcagaagcgcatggactcgcagctggacaagctggatgcgctgatcaaccaggcggacaacgctcagatagccatgagtgagcagacacagcagatgcgccgcctggccaagtga

SEQ ID NO: 16245 - protein, 719 aa, DROSOPHILA
MKLEKTPANPVEEDETPSVFNPKYRVCPYLDTINRNLLDFDFEKLCSISLTRINVYACLVCGKYFQGRGTNTHAYTHSVGEAHHVFLNLHTLRFYCLPDNYEIIDSSLDDIKYVLNPTFTRQEISKLDQLQPKHSRTVDGVLYLPGVVGLNNIKANDYCNVVLHALSHVGPLRDYFLQKQSYAHVVRPPGDSVFTLVQRFGELMRKMWNPRNFKSHVSPHEMLQAVVLWSSKRFQITEQGDPIDFLSWFLNTLHRALKGNKHPNSSILYKIFLGEMKIYTRKMPPVELDDAAKAQLLATEEYKDQVEDKNFIYLTCDLPPPPLFTDEFRENIIPQVNLYQLLSKFNGTAEKEYKTYKANFMKRFEITRLPQFIILYIKRFTKNTFFLEKNPTIVNFPIKHVDFGDILGMRQRDKDVKDTKYNLVANIVHDGDPKKGTYRAHILHKANGQWYEMQDLHVTEILPQMITLTESYIQIYERCPNSSFKPQHQLWPKTAGTAHALCPLHAQPSGWIGATTSKNRWHRQSLGDRVFGSMSSEQPENTSYEQECQRAELLGLQPPDPAEFERKRQARLEHELAEQEAAEAVLLEQQDESLGNVGGKLGELNSILSSTQQKLNRFKQTACGSLTNIFARASSGSVDLSAGIGRSGSIASTQEERPPVQEQPLAKPPPTAAEVSAAKAAKQKRMDSQLDKLDALINQADNAQIAMSEQTQQMRRLAK

SEQ ID NO: 16246 - DNA, 3505 bp, DROSOPHILA
tggccaacgcagtgatgtaatcgattccattgttatcttcttgaattgtgtgcaaaaccgattcactggcggccttgaagagactcgattctgtgctgtcatggcgacagttctaaaatttaatcaattcccacacagatgcgttggcttttgttcttttcactcgcttttcctgccccctgcccactagtttttttttcgatgtcgcatgcagtggagcatcacggaatcccaattaggttacttacagcaccactccgaagagaaatgggcccaccgggtagacgtcgctgctacccttcttgcggatgtcgttcatcagaaccactccggacagaaattgcagggtagttatggtgccggctaccttggcgattagttcgctgtgtggcgccaagagatcccccagtgcctccatgatttcaatgactctcagttgatgcctttcaaacgggttatgtgggaacgggaggggggccgagtgccgcgcgagtataaacaaatgaacgaaaacaaaaactaacgaccgactggcggctgccgtaacaacaaacgaacaaatactgagcaccaacggtggggctggcaaccttttataatcgagaatcccctagaaatggacgcgtctctccgattttccccaaacgttatcgcccgcgagggcttatcggatacgaattgaatttcaaatttccgcgaaacgttgctgcatggcaaagcaaatgagttttctctctagagcaacaggagagtattccttagaacttatcaacatcttctttcttctagtatcactgaattaaagccaaacaatagtttaaactaagcaaattcactgataacttcggtttgacttgaccaaactgaaagtcacttgagaacaatgatagaaagtgagaaactcaattgagattaggcttcttaatatatacatacatagtctccttacaaaaatcaattttattcaaacttatccaactacagtcgttagcaatcatcctcacacctcctccttcagcacatgcttctttttctcgctgacgtagggcaccttcttgctcttcttggtgtgcttgcgcacattggcctccttgacctgctccttctccttgaccgtgcgcatcttcttctgtgcattgagcacgtgacgcggcacctggcgatggcgcgcgatgcgcttgatctgcggatgagcggcatacttttgcttcagcgcctcctggtaattgaaattgacgcgctcacgtggacggatgacgcccagcttttcggaggcattcgccttccacatgcggacgttcatttcgtcggagccggagaaaacgtatcgattatcgagggaccaggccacgcagaccacatgctgcatgcgttttgtgtggtaaatatcccgcgagtgactgtggtgggcattgtagatccgaatggtcttgtcgtagctggccgagacgaattccttgccagtgggcgagtagtcaacatcggtgacagcggaaacatggtcaaagtgaaccttcagcggcgtttgcagcttgcgagtgtcaaaggtataaaggctgtaagaaataaagattttagcaacacatcctcttcgtatggccgttttactcacttgcaatcctcgttggccactgtgaagttgaacgcctccatgggattccacgcgagcttgttgctcttcatggttaggacgaccttccttagtggctgcgcctctctctgatcgtacaggataatgctgcgatcgctggcacagcacgccaggatgcttgtttccacggggttataggatatggtgtgaagggtatcgacgccccacttcaatgtcttcaaaggatcgttgtgcctttcgtcccaaatggcgcatacctcgccacaggtggcgaacttgttatccctgcgattgtgcgagatgccgtgcagtccaaatttactcagtatagtgttcaccggcacctcatcctcgccgacttccggagcctctgctttccaaaccttgatggttttatcatctcccacggtgaaaatgcgacctccgttctgggtgtaagcaatgccgcgaacgaaaccgtcgtgggccacaaagttccgagagctgatacgattcgccaagtcccaaatgcgcacttcgccgtcataggcgccggtggccaaggtggaaagttgcttgggatgctttccgaagcaggagactccatcgcgatgcccgctcaaattgcagacgaagggtttggcaaatactcgatccaacttggtggcattcagggcacgcacgtattccctgggaccctccaaaggatgcagcgaaggatcgtagttcctgggcactgaaagtggcattcttataatactttggtctttcttcgtatatgaacttacttttgtgctgttgcagtttggtttctcggacatagttatccggattgcgactaatcattttcaccttcatcctgattgcatttattaagcttttctgcggcgtaaaataaaattaatcgtgagtttcgaacataaacaacatgtgcgtgctacagtgttgccatacagagcggctgtcagctgattgtgttgagtagtgggtgtggtaacactaatgcaaaaccaatagggtaacactgaaatttgaaattttggagggaattcttctgagtgttgtatgatcaatcaaatgcaacacagttcacgttcattttatgcaaatgcataatactaaaaaatttcttatatttgattaattgtacatcaacctagtactgatagcaaccaaaaacggcagcaatgcagataaaactgccaccatcaaaggtgaaggttatgtagtcatcggacagctcatcccaaatggcgcgagctccgtagaaacatccggctccggtctgctggtaaagcattacgttcacaacgtgcttgaatcttggagaagagccgcgtcccttcatcttaatgtttatgtcatcggcgacttcgcgggtccatttaagggcttccgattgattataggtcttgtttgccagcttctccttgaccacctgggctatcatcaagcgaatgtacggcaatgggaacttcttgccgaatgctggtcccatgttgtagtagttatagatggtgacatcagatgccggcttatcctcattcccaggctcccattcttcatccgagtcactgtgggacattacctcggatcggctgtctgcgctgaccgcggacgctcgaaaggactcctttgcagtcgacaaggttttgggtctttgtgtcgacatttttgcgatatttttatctgtgtttcgttcaaattccagataaacttcgattgcaataagttaagagaaataatcagacagaacaaatttttcatggccatctagttttccaaagaaaacacagtgattggtaaataataagttcaattttcgctttttaaccttttttgcaattataaaaaaatctattgttttgttagttttttatttcgcataaacatatttttgttatttttttttac

SEQ ID NO: 16247 - DNA, 1397 bp, DROSOPHILA
aaactcacgattaattttattttacgccgcagaaaagcttaataaatgcaatcaggatgaaggtgaaaatgattagtcgcaatccggataactatgtccgagaaaccaaactgcaacagcacaaaatgcccaggaactacgatccttcgctgcatcctttggagggtcccagggaatacgtgcgtgccctgaatgccaccaagttggatcgagtatttgccaaacccttcgtctgcaatttgagcgggcatcgcgatggagtctcctgcttcggaaagcatcccaagcaactttccaccttggccaccggcgcctatgacggcgaagtgcgcatttgggacttggcgaatcgtatcagctctcggaactttgtggcccacgacggtttcgttcgcggcattgcttacacccagaacggaggtcgcattttcaccgtgggagatgataaaaccatcaaggtttggaaagcagaggctccggaagtcggcgaggatgaggtgccggtgaacactatactgagtaaatttggactgcacggcatctcgcacaatcgcagggataacaagttcgccacctgtggcgaggtatgcgccatttgggacgaaaggcacaacgatcctttgaagacattgaagtggggcgtcgatacccttcacaccatatcctataaccccgtggaaacaagcatcctggcgtgctgtgccagcgatcgcagcattatcctgtacgatcagagagaggcgcagccactaaggaaggtcgtcctaaccatgaagagcaacaagctcgcgtggaatcccatggaggcgttcaacttcacagtggccaacgaggattacagcctttatacctttgacactcgcaagctgcaaacgccgctgaaggttcactttgaccatgtttccgctgtcaccgatgttgactactcgcccactggcaaggaattcgtctcggccagctacgacaagaccattcggatctacaatgcccaccacagtcactcgcgggatatttaccacacaaaacgcatgcagcatgtggtctgcgtggcctggtccctcgataatcgatacgttttctccggctccgacgaaatgaacgtccgcatgtggaaggcgaatgcctccgaaaagctgggcgtcatccgtccacgtgagcgcgtcaatttcaattaccaggaggcgctgaagcaaaagtatgccgctcatccgcagatcaagcgcatcgcgcgccatcgccaggtgccgcgtcacgtgctcaatgcacagaagaagatgcgcacggtcaaggagaaggagcaggtcaaggaggccaatgtgcgcaagcacaccaagaagagcaagaaggtgccctacgtcagcgagaaaaagaagcatgtgctgaaggaggaggtgtga

SEQ ID NO: 16248 - protein, 446 aa, DROSOPHILA
MKVKMISRNPDNYVRETKLQQHKMPRNYDPSLHPLEGPREYVRALNATKLDRVFAKPFVCNLSGHRDGVSCFGKHPKQLSTLATGAYDGEVRIWDLANRISSRNFVAHDGFVRGIAYTQNGGRIFTVGDDKTIKVWKAEAPEVGEDEVPVNTILSKFGLHGISHNRRDNKFATCGEVCAIWDERHNDPLKTLKWGVDTLHTISYNPVETSILACCASDRSIILYDQREAQPLRKVVLTMKSNKLAWNPMEAFNFTVANEDYSLYTFDTRKLQTPLKVHFDHVSAVTDVDYSPTGKEFVSASYDKTIRIYNAHHSHSRDIYHTKRMQHVVCVAWSLDNRYVFSGSDEMNVRMWKANASEKLGVIRPRERVNFNYQEALKQKYAAHPQIKRIARHRQVPRHVLNAQKKMRTVKEKEQVKEANVRKHTKKSKKVPYVSEKKKHVLKEEV

SEQ ID NO: 16249 - DNA, 3463 bp, DROSOPHILA
gaaggaggaaagcgagccggctgtggagaatgcggataatctggtgcacgctggctactcgtactggacactgggctacgttatatccctgcagggtgcactgaaactgctggccgccaagccgctggacaagctcataccggtcgatgagtttctgccgctgatgttcgatcgtcatccgaacaaaacgtggacggaagcctttcccaagcgtaatcttgttgccttcagcgcctcgccgcttctgctgtatcccatttactatactggtgaatctggttatatatccgacaccgaggactcgcaacaaatcagcgtggagacgagcgaggagggcgaggccaggctaaagagcgatcgagagcaggttttcgaccatgagcaggaattcaagctcaatccggaactcaagctgggcgagagcttgtccaagagccaccaggaactgtagatttctaccgaacaaaaaccatgccaaatttttgactagactaagttagtactagcctaacaactgccaaatgtgcctttaatccaaatccaccaaaaatatgaaacaacgattgctagtttaagttaatgttttgattagccgacctaatattttgtgcaattctttcgaacttttaaactcgccaaaaatgttcctaaatgaaaaaagtttgttatctaaaagataacacaagtagtagtaatctatgttataaagtaatatactttgtaacttcaatttaaacaaccagttttggtacgaaaagcaatatatcttttggaatacacgtacgcacctcaaaactgtagatcagtggaatcagtagttgcacaagttattggccaaaagcaaacgatagactaatatttcagcaacatgccattgtcgtagccattaagtaggttctaaacgttatataaactctctgactttattccgctcacaagtgatgtgcaaacagtaaacacttaaaatttaatttccatttccccatttattgtccctgttctactgacccatcgctccgcgcatgaacagattcttgacgggcggcaagttctgggtcagctgcagacccaagctgcgcagcaagaccaccggactgaactgcgtggcgtagagcgtgtgcagtccatgcacgcccagcataatgggcacgttcttcgccagacacttgcgctcgtatttgatgagatgctgcttgtcgccgagcttgaaaccggcgtatgcaccggcggccagcgattccaccagataccgcacatcgctgaagcccagattgacgccctggccggcgagcggatgcactcgatgggcggcatcaccgaccagagctgctccattgcacacgtacgacgaggcgtgcaggaaacccaatggaaacgtggcacgcgacttgtccagcacgccgcacacccgtggcggatattgcacctggtgctggctgccgttgtgtccaaacaaggagttcagcgcctggacagccttgtctgcgagctcaacgcgcggatactgccggcagaaggcttcgttgagggcgtctacgaattctgtgggtggtagggcttgcagcattttcgcttgctcgttggtggtgctccagaccagggagctcagcctgtccgttagtggtagcagtgccactggtccattgggcagaaacctctgccacgccacggaattatcacaggcatcttcgccgagttccagcgtagccaccaggcccatgcggtcgtagttcagggaaaatacatccacgttcatctcctttctgaccacggaattggcgccatccgctccgatcagcaaatcgcaggaaaagttgcgtccatcctctagctgcagctcggagtgattggagttggagtccctgggcaggcgaacgcactggattctggccttgttgaggatctccacattgggtgattccttggccagcgcatagaccgcatccaggatcaaatcgttctcaatgatgcaggccacgtcgctggcaaagttatcgtgctggaactggatcagtgcgtccgtgttggactcccacacctgcatctgcttgacgggcttgtagcgcgccgactcgatgtgcttccacgcatcaatggacttgaacagctcgatggagttgtgattgatggcggatacgcgattctggtatggcccagtgggattaaatccccggaactcgggcgcaccttccagcagcagtaccttcttgtccgccaacgtcgagttcttggccagagctgcggccaatgtggtgcccaccagtccgccgcctccgatgattatatcaaagtgttcggtggacgtcgattgtgtggattcaccgcggtttgtggtcatgtcagtggtggatttgctggccagcaggcggacggacagaagacgcgcctgccccgccgaagccaacgctccttggatacgtagaacacccaacatcttccgaaatttcaaaagtttctcgtaattccacgattatttcattatgtctctcgtccgctagagatgcaccaaaaatagatgcacttatcgaatctttgccttttgaatgctggcaatgccgcaccaaaactatcgagttttcgattatttctttaacgagctttcaaattttgatactaaaattaactttaaatttaatttaatgcatttttaggtgctcccggcctgcatggcaaatgttttgagctcttctcggagatagccaatgagcacaatggcgatgtctacgaaactctacacctgataatgcgacaaacctttccgatgcatgtttatacggatagtccccagatgattgcatatggacgccgtggagcgatgcaaagtggggagcacatatcagactggtttatccagctgatagataagtatcccgacattgttaaccgcatcctgcacttttacattgagtgcgtggtgtccaatcccattaaagcggtgagtacgtgtaaaatcctctgaaataatattgtaatctaatatataatttcagtggaaaagcaatgacgagaaggtggctataggctatgcagccaaatacgaccgggtactgttcaccaagtgcaacaaatcttgtgcagattacgtgctggaagccgtgaaagccgacgatgctgtgggcattcaaattcgtgctctcgatctgatcgagaagatacttttgcaggaaagcgaggtggagtggagcatctttcgccacgaggtgtccgacgtgcccagagaggtgccgctcctaagggaggtgttgcgttgcctcaacgatcgaacgttaactgtgcgccggaaggcgtgtcaagtgctcatcctggcgctgagacaaggatccccgatgacgaaaaaaattctgcaggaaagcattcgtttcgttcagttcgatgatactgatgtggaagctttggctgaaccctctgcccagcaaaacgagctgcgtttcgagaagcccggaattgtgcagtatgcctttag

SEQ ID NO: 16250 - DNA, 1463 bp, DROSOPHILA
attacgagaaacttttgaaatttcggaagatgttgggtgttctacgtatccaaggagcgttggcttcggcggggcaggcgcgtcttctgtccgtccgcctgctggccagcaaatccaccactgacatgaccacaaaccgcggtgaatccacacaatcgacgtccaccgaacactttgatataatcatcggaggcggcggactggtgggcaccacattggccgcagctctggccaagaactcgacgttggcggacaagaaggtactgctgctggaaggtgcgcccgagttccggggatttaatcccactgggccataccagaatcgcgtatccgccatcaatcacaactccatcgagctgttcaagtccattgatgcgtggaagcacatcgagtcggcgcgctacaagcccgtcaagcagatgcaggtgtgggagtccaacacggacgcactgatccagttccagcacgataactttgccagcgacgtggcctgcatcattgagaacgatttgatcctggatgcggtctatgcgctggccaaggaatcacccaatgtggagatcctcaacaaggccagaatccagtgcgttcgcctgcccagggactccaactccaatcactccgagctgcagctagaggatggacgcaacttttcctgcgatttgctgatcggagcggatggcgccaattccgtggtcagaaaggagatgaacgtggatgtattttccctgaactacgaccgcatgggcctggtggctacgctggaactcggcgaagatgcctgtgataattccgtggcgtggcagaggtttctgcccaatggaccagtggcactgctaccactaacggacaggctgagctccctggtctggagcaccaccaacgagcaagcgaaaatgctgcaagccctaccacccacagaattcgtagacgccctcaacgaagccttctgccggcagtatccgcgcgttgagctcgcagacaaggctgtccaggcgctgaactccttgtttggacacaacggcagccagcaccaggtgcaatatccgccacgggtgtgcggcgtgctggacaagtcgcgtgccacgtttccattgggtttcctgcacgcctcgtcgtacgtgtgcaatggagcagctctggtcggtgatgccgcccatcgagtgcatccgctcgccggccagggcgtcaatctgggcttcagcgatgtgcggtatctggtggaatcgctggccgccggtgcatacgccggtttcaagctcggcgacaagcagcatctcatcaaatacgagcgcaagtgtctggcgaagaacgtgcccattatgctgggcgtgcatggactgcacacgctctacgccacgcagttcagtccggtggtcttgctgcgcagcttgggtctgcagctgacccagaacttgccgcccgtcaagaatctgttcatgcgcggagcgatgggtcagtag

SEQ ID NO: 16251 - protein, 477 aa, DROSOPHILA
MLGVLRIQGALASAGQARLLSVRLLASKSTTDMTTNRGESTQSTSTEHFDIIIGGGGLVGTTLAAALAKNSTLADKKVLLLEGAPEFRGFNPTGPYQNRVSAINHNSIELFKSIDAWKHIESARYKPVKQMQVWESNTDALIQFQHDNFASDVACIIENDLILDAVYALAKESPNVEILNKARIQCVRLPRDSNSNHSELQLEDGRNFSCDLLIGADGANSVVRKEMNVDVFSLNYDRMGLVATLELGEDACDNSVAWQRFLPNGPVALLPLTDRLSSLVWSTTNEQAKMLQALPPTEFVDALNEAFCRQYPRVELADKAVQALNSLFGHNGSQHQVQYPPRVCGVLDKSRATFPLGFLHASSYVCNGAALVGDAAHRVHPLAGQGVNLGFSDVRYLVESLAAGAYAGFKLGDKQHLIKYERKCLAKNVPIMLGVHGLHTLYATQFSPVVLLRSLGLQLTQNLPPVKNLFMRGAMGQ

SEQ ID NO: 16252 - DNA, 2429 bp, DROSOPHILA
ctggcacagcacgccaggatgcttgtttccacggggttataggatatggtgtgaagggtatcgacgccccacttcaatgtcttcaaaggatcgttgtgcctttcgtcccaaatggcgcatacctcgccacaggtggcgaacttgttatccctgcgattgtgcgagatgccgtgcagtccaaatttactcagtatagtgttcaccggcacctcatcctcgccgacttccggagcctctgctttccaaaccttgatggttttatcatctcccacggtgaaaatgcgacctccgttctgggtgtaagcaatgccgcgaacgaaaccgtcgtgggccacaaagttccgagagctgatacgattcgccaagtcccaaatgcgcacttcgccgtcataggcgccggtggccaaggtggaaagttgcttgggatgctttccgaagcaggagactccatcgcgatgcccgctcaaattgcagacgaagggtttggcaaatactcgatccaacttggtggcattcagggcacgcacgtattccctgggaccctccaaaggatgcagcgaaggatcgtagttcctgggcactgaaagtggcattcttataatactttggtctttcttcgtatatgaacttacttttgtgctgttgcagtttggtttctcggacatagttatccggattgcgactaatcattttcaccttcatcctgattgcatttattaagcttttctgcggcgtaaaataaaattaatcgtgagtttcgaacataaacaacatgtgcgtgctacagtgttgccatacagagcggctgtcagctgattgtgttgagtagtgggtgtggtaacactaatgcaaaaccaatagggtaacactgaaatttgaaattttggagggaattcttctgagtgttgtatgatcaatcaaatgcaacacagttcacgttcattttatgcaaatgcataatactaaaaaatttcttatatttgattaattgtacatcaacctagtactgatagcaaccaaaaacggcagcaatgcagataaaactgccaccatcaaaggtgaaggttatgtagtcatcggacagctcatcccaaatggcgcgagctccgtagaaacatccggctccggtctgctggtaaagcattacgttcacaacgtgcttgaatcttggagaagagccgcgtcccttcatcttaatgtttatgtcatcggcgacttcgcgggtccatttaagggcttccgattgattataggtcttgtttgccagcttctccttgaccacctgggctatcatcaagcgaatgtacggcaatgggaacttcttgccgaatgctggtcccatgttgtagtagttatagatggtgacatcagatgccggcttatcctcattcccaggctcccattcttcatccgagtcactgtgggacattacctcggatcggctgtctgcgctgaccgcggacgctcgaaaggactcctttgcagtcgacaaggttttgggtctttgtgtcgacatttttgcgatatttttatctgtgtttcgttcaaattccagataaacttcgattgcaataagttaagagaaataatcagacagaacaaatttttcatggccatctagttttccaaagaaaacacagtgattggtaaataataagttcaattttcgctttttaaccttttttgcaattataaaaaaatctattgttttgttagttttttatttcgcataaacatatttttgttatttttttttacactttccattgtctaaatgacccaattttttctagttaaaatatttcaaagttaacctaacgttaagtagtaaccaaaagtgaagatttaacgagctgaatgcctgtaacgtcgaatacgaggatgtcgattggagagattctgaatgtaggtgtcactactctgctcttgacttgagcgttccctggccttcggtgtgagcaagtcatcgactggattctggttctgacacttttccatttcctcctttttgcgctgctgctgctgaagctcgtggacttttcgcaggcagcagcagttcctgagcgcatccataaagcactctagattcctgcgaaagatctccagattctccggagaaatgggcgacttctccgcatgacaacactcatcgatgaccacctgggcatggaatatacactcgctagcctgaccgagtgtattctttagattgaagatttgctgtttcttcttcaactgcatttgaatatagcgagtgcacagcatctcgaaacggcgctgttcactccggtactcatcgaatagctcgtcgtatttggagtgcagctgctccgttttgctttgaagtaccttgagagccttttccctcttggctaactgccgacgactttggcgatgggacacggagagctcaacgtaactgaaaatgc

SEQ ID NO: 16253 - DNA, 429 bp, DROSOPHILA
atgtcccacagtgactcggatgaagaatgggagcctgggaatgaggataagccggcatctgatgtcaccatctataactactacaacatgggaccagcattcggcaagaagttcccattgccgtacattcgcttgatgatagcccaggtggtcaaggagaagctggcaaacaagacctataatcaatcggaagcccttaaatggacccgcgaagtcgccgatgacataaacattaagatgaagggacgcggctcttctccaagattcaagcacgttgtgaacgtaatgctttaccagcagaccggagccggatgtttctacggagctcgcgccatttgggatgagctgtccgatgactacataaccttcacctttgatggtggcagttttatctgcattgctgccgtttttggttgctatcagtactag

SEQ ID NO: 16254 - protein, 142 aa, DROSOPHILA
MSHSDSDEEWEPGNEDKPASDVTIYNYYNMGPAFGKKFPLPYIRLMIAQVVKEKLANKTYNQSEALKWTREVADDINIKMKGRGSSPRFKHVVNVMLYQQTGAGCFYGARAIWDELSDDYITFTFDGGSFICIAAVFGCYQY

SEQ ID NO: 16255 - DNA, 3183 bp, DROSOPHILA
caaggagaagaaacgcagcaagcatgaggaggagccacctgtgccttacacgcaacctccacatttaattaatgcatctccgccagatgtggctacaaacaacgaagattcctttggtcccgctttaccgccgcatttaaggaagacccagcagccggaactccctgagcaaagccaaccagccccacaaccgcaggccatgataggacccgtcctgcccagcaatttgacccgggaaaagtctcctactaaggaagcggaagctgaggacgatgatgacctagctggcacctttggtcctctgccaaatgccagtcaagtggctctggaggaacgtgctttggcacttaaactggcagctctggagggcgggggattgggtacatctacagaccaagatgtccgcgaagagtggatgcttgagctgccagatgtgggactgaagagcggccttgccgccctgagcaatatgaagcgcactttctatcagggaaaagagcgacccgactttagcgatcgatcatcctggacgaagaccccgcagagtgaagcggatgctgctgcatcgggcccaaagtcgctcagttcgaaggaactcgagcaaatggcacaggtcaagtacgaacagcagcgggatgacgagcaggagagcatggccaagaggcacaaaaagaagcacaagcgagaggagtccctagtggagctacatcaaaaaaagcttaggaaagagcagagagaaaaggtacgaggaaaaatatttcttaaaaacataatatggatataatattgttataaatttaaggaaaaagaactggctgcatcgggttccaagccagaacgaagaccttttagtagggatgtggacttgaaacttaacaagatcgacaagaatcagaccaagcagattgtagacaaggccaagatattgaacaccaagttctccaggggtcaagctaagtatctgtaggttaaatgaaccataaaaaatccagacgatccgtaccgcatgttaatcttaagcaattatgtaatttaatttagaaataattattataaaggcaaaataatttgtaaatgacatttttgattgcttagtcacctagcttaaactttcgtttaattggcataaatacattggtaatatgagtacaaacacacaattgggcaataccagctaatgatgaatgattatgaagctcttctaacgctgaggcggtggtttcggtttcggaatcttggacagcagcatctgaatctcgtccttttccttccagtccttccacaactcgtacagatttacaatggcgcgcacgatctcctggaccttgtctaaatcaacattcaattctgcgaaccactgcttcgtggcgtccttttgcaggatgacgcaggcgatttgaaggcaggctatagcgatctagaaaaaaataggttcttcaaatgtgaggaagctgtagaaattatcaggatcacaaacctggtaaggaggatagagcaggcagacatcggtgcgcagggaatcgtttacgatacgccagctcagggtgagcaactggtcctcctggcccatgtcctgaaccagctgcagcagcggtctgtacggctggtagacaatcaagcagcaatccaggttctccagcaggtaaaactcgcactccaggatgtgattggtgcggtagggaaactcctgagcgtacgcatagctgaactttgtcttaatggccgactggcagatcgagatcagtcgtgaattggaaatgacaccgaactcctccaccttcgaggccagcaagatgcaagtgggcgccagcagcagaggatcgatgttcttcagggagttcctcgcatagaatctcttgaagtaaaccgtcgccgtggcgatgacctgttgcctcagctttagctgctcgccgagcacctggatcacatttgcgaagaaaataaacaccttttggtattcatcctcgttaagggccaacaaatcgtgctgacgctcccggagcagatcgggtttgtccaaaatccactgctgcgagtgcgaactctgccaaaaattgcccgccatttcgtaactagtaggcctagctgattaggtcggccaatattttcgtgttagctatccaaattaggtgtttatttcaatagcaagccggaaaaccaggaaaaacgaaaaaattgtgttgccgtttcagccagtgtgtgcacaccagggctattttccacgaacagctgactggccgcagccaactttgcgcagcgcagtacattggtgtgtgtgtgtgaatttttcatcagcgccgcggccacagacgaaaaagtcttaaatattttttagtaataggctattgaacgaattaataaaacgatggcgttgcgagttcttggcgtgacgcagaatatgcgctccttcatgcggggcgttgacatgatcaaagtaagtccagacagccatccaatgattacgcttccgaggatttaaattacgtaattgtaaatgattgtgtttttggttgcaattgtggtttattcttgtgagaaaagggataaacaacctcttgttggtcagttattcaagagccatccagtttttcaaacaaatatttgggaaaactgtttggaaaacccactacaagcactttgaggttatgttcgtgttttacttaactctgggctatagttttcccaattttcccgaacttacagcgatacaagtcggctgccaccctacagaagactctgctgaacatacccgccacccaggtgaccaagctggacaacggtctccgcgtggctagcgaggattccggtgcctctaccgccaccgtgggactgtggatcgatgctgggtcgcgctccgagaacgagaagaacaacggagtggcccacttcctggagcacatggccttcaaggttggctcactagcttgatgctttaaatgcgtataatatgcgtttctgccactttttagggtaccgccaagcgctcgcaaacggatttggagctggaggttgagaacctgggcgcccacttgaacgcctacacttccagggagcagaccgtcttctacgccaagtgtttgtccaaggatgtgcccaaagccgtcgagatcctggccgacatcatccagaactccaagctgggtgaggctgagatcgcccgcgagcgttcggtgattctgcgcg

SEQ ID NO: 16256 - DNA, 1123 bp, DROSOPHILA
caacacaattttttcgtttttcctggttttccggcttgctattgaaataaacacctaatttggatagctaacacgaaaatattggccgacctaatcagctaggcctactagttacgaaatggcgggcaatttttggcagagttcgcactcgcagcagtggattttggacaaacccgatctgctccgggagcgtcagcacgatttgttggcccttaacgaggatgaataccaaaaggtgtttattttcttcgcaaatgtgatccaggtgctcggcgagcagctaaagctgaggcaacaggtcatcgccacggcgacggtttacttcaagagattctatgcgaggaactccctgaagaacatcgatcctctgctgctggcgcccacttgcatcttgctggcctcgaaggtggaggagttcggtgtcatttccaattcacgactgatctcgatctgccagtcggccattaagacaaagttcagctatgcgtacgctcaggagtttccctaccgcaccaatcacatcctggagtgcgagttttacctgctggagaacctggattgctgcttgattgtctaccagccgtacagaccgctgctgcagctggttcaggacatgggccaggaggaccagttgctcaccctgagctggcgtatcgtaaacgattccctgcgcaccgatgtctgcctgctctatcctccttaccagatcgctatagcctgccttcaaatcgcctgcgtcatcctgcaaaaggacgccacgaagcagtggttcgcagaattgaatgttgatttagacaaggtccaggagatcgtgcgcgccattgtaaatctgtacgagttgtggaaggactggaaggaaaaggacgagattcagatgctgctgtccaagattccgaaaccgaaaccaccgcctcagcgttagaagagcttcataatcattcatcattagctggtattgcccaattgtgtgtttgtactcatattaccaatgtatttatgccaattaaacgaaagtttaagctaggtgactaagcaatcaaaaatgtcatttacaaattattttgcctttataataattatttctaaattaaattacataattgcttaagattaacatgcggta

SEQ ID NO: 16257 - protein, 267 aa, DROSOPHILA
MAGNFWQSSHSQQWILDKPDLLRERQHDLLALNEDEYQKVFIFFANVIQVLGEQLKLRQQVIATATVYFKRFYARNSLKNIDPLLLAPTCILLASKVEEFGVISNSRLISICQSAIKTKFSYAYAQEFPYRTNHILECEFYLLENLDCCLIVYQPYRPLLQLVQDMGQEDQLLTLSWRIVNDSLRTDVCLLYPPYQIAIACLQIACVILQKDATKQWFAELNVDLDKVQEIVRAIVNLYELWKDWKEKDEIQMLLSKIPKPKPPPQR

SEQ ID NO: 16258 - DNA, 3524 bp, DROSOPHILA
aaatttgtataactttcagttcttatactcagttattccattaatctctaatcccacgacatttaaatacacatacaaattttttatacaaagtttgctttattgactatttttgaagcacatttaccatatctgtattattaaaatacttagcatagattacagaattttcagcttattccatgaaatactgtttgtcaaacaaacagatttcatcagtttttgtttttataatcctttttttttgggaaagattctcatatatttacaattataatttaaaatagtctctactttagcttactacatattcaattaaatctcaggaggctgacttttccgcggacttttatggtggctctgacccaactggatgcatcctgcgcctttcctcgcagaaaagtattttatttcacattttacgggcgtcttggctggctgtcttacctctggctaagatgcttattttatacaaatccgacttttgcgattttaattgcataaatcagcttagttatttaattggtttattaatctacgggagaagcaaccattttattttaggtaagcactaagaaaaagattggatcttaagattccgatattattatatatctttatttacttagtaaaaggatggggatttacgtatattttatttaagagggtatattggcagtaaaatatttattcaaattgtgggttgtacagtttatattaattattaatatgttattagctgtcaaggcaataagaaaatgtaatccatttcagcccccttcagttaaatatattgctaacatatcgatgtgcggttgtacagactcattttcaaatctttgaattttaattctgatctcggtttttattacgtagacacatattaatactgcttagtcttaagttcttcattcatatttggataagaaaggattataaaatcatttaaatgcatactataatattggcttatttaaaggaaattcctacttaaactgggttacaaatctgtctgctgcactgcgcccgatcctcttctcgcggtggtgcaaaatgcctcctgctgctcgctcaaacatataatcaaattctccggcggagctgtcactttgccattggaattgcatgatttctgtgtccccgtggttccggtcttttccgctgtcgtggtcgaggatgtggtggtcgatgaattgttgttacccgcattcagtggcagcagtggaggaatctgcggattgctggtcaacaggcgcttggagccacccctctttttactgccctgtttggtgaaaacactgggctccagctggagttgagcgttgatatcctgcttattcatacaggtaaaggccttgaagaagctcttccggaagttctcacttaggaaggcataaagtatgggattcaccgccgaattcgagtaaaccagtgcccccagaagtaggaaaatgagtatttccagtcgggagaggtccctttgcgcgggattcgagtgaatcagggccaccttggagatccagtggtgtgtaaataaaaaatcgaatatactttataattaattacctgagaaatccagtgagggagccaacatagaatgtatacacttatcacctgcggattgaaaagaaggtgggaatctacaaatgaattgaactgattatttcggcattattaccgtcagtaccagtcgagtgaccttcctgtgagcccgcctcttctccttggacttcgttcctggtttgggacccaccgatcgcagtttccttataaccaagtagtagaaactcaggataaagcacagcggtgtggcgaatcctaggaaaaatgtgtacagtatgaaggtggtgcccgaatgcttcttgtacgcatctggccacattatgttgcacgagtaattgatgccatcctcctgctccacagtgctggcataaaggatcacgggcagcatgaggaccgctgaagttgaccaggcaatcgctgagaccactttggcaatatgcagagttcgatatcgtggcgaggaaatcgggtggcataccgctatatatcgatccgcggacatgatgagcagaaaaatcgacgaggtgaaggaggtgatggatgtgctcaccatgtaggctttgcacataaactccccgaatcgccagctgcaaattcgcattgtgtacagcagaaagggtattccaatcaggaagcactcgtctgccaccgccagattcaggatatatatattcgtgaccgtttgcattttggaaaagcgcaacaccacgtagatcaccagggtgttgccaaataatccgataatgcacacaaatccgtagagcaccacagtgaacaagtcagcaaaggaattccgcgtggctatgcaatgttgataggtgggcaaatcagtgccataaagggactcctctggctgaattgtggaactaccactaatccatctatggttcagttccgtggtatataagctctcgttcgtgttataccaatttgtggcatttgcctctgaatcggctgtcatttcccctttcacaaactggaggacatccatcatcagccacgtaaacatatttccacctaagcgctgtccagttcaaatttaattattttaaataggttttacgcgttgttgctccccgctcgttttgttcttgcattttggcgttgctgcaaaatacattttgttattacgtgaaatattttcagacacagttgttttggccaaacttgattagttactaattgaaatactgtggtgctattaaagaaaaaaacctaaaaccttcactagtctagtcaatattttttattccaacgtaagtttaaaatgtactgtaacaattggtgataagtattcaaatggaattaagttaagtctacaagttttataagatattttaatataactagattgcagctctttaatgcatagtgtatatttttaatatattatgagtttacttttaagtggcagtcaattttatttgctgtcttaacatctttgaatcgtatgtaccccattcgtaatgccacttcacatacagattcttttgcaactttactacaacttttactgactttctgagaaatcccctcgaaaattgaaaactttcctgaacaacttgtagaaaaacaaacctttaaaaatacgacgtatgaaataaatcgtctgtttcctgcttttgaaaagtgagttaccacaaatttggtttgtaaggcgaaggaaattaacatttatatttaaattaaattgctcacagcttgacacgtccaacaaacaagaaacaagaacttttttatattctgacctaactcgacactttctgtaaataaattaggcgtaaggaaaagctgggcagcatttatgcaaatatcaggtgaaaatatttgtcttctcggaagtcggaaaactccagctatacagatccccatggttttgtattaggagattgaaatttaagccgatttgtttgtgcattccatgcacatcaaatattgttgactgagccaaaacacatgtg

SEQ ID NO: 16259 - DNA, 1356 bp, DROSOPHILA
atgacagccgattcagaggcaaatgccacaaattggtataacacgaacgagagcttatataccacggaactgaaccatagatggattagtggtagttccacaattcagccagaggagtccctttatggcactgatttgcccacctatcaacattgcatagccacgcggaattcctttgctgacttgttcactgtggtgctctacggatttgtgtgcattatcggattatttggcaacaccctggtgatctacgtggtgttgcgcttttccaaaatgcaaacggtcacgaatatatatatcctgaatctggcggtggcagacgagtgcttcctgattggaataccctttctgctgtacacaatgcgaatttgcagctggcgattcggggagtttatgtgcaaagcctacatggtgagcacatccatcacctccttcacctcgtcgatttttctgctcatcatgtccgcggatcgatatatagcggtatgccacccgatttcctcgccacgatatcgaactctgcatattgccaaagtggtctcagcgattgcctggtcaacttcagcggtcctcatgctgcccgtgatcctttatgccagcactgtggagcaggaggatggcatcaattactcgtgcaacataatgtggccagatgcgtacaagaagcattcgggcaccaccttcatactgtacacatttttcctaggattcgccacaccgctgtgctttatcctgagtttctactacttggttataaggaaactgcgatcggtgggtcccaaaccaggaacgaagtccaaggagaagaggcgggctcacaggaaggtcactcgactggtactgacggtggccctgattcactcgaatcccgcgcaaagggacctctcccgactggaaatactcattttcctacttctgggggcactggtttactcgaattcggcggtgaatcccatactttatgccttcctaagtgagaacttccggaagagcttcttcaaggcctttacctgtatgaataagcaggatatcaacgctcaactccagctggagcccagtgttttcaccaaacagggcagtaaaaagaggggtggctccaagcgcctgttgaccagcaatccgcagattcctccactgctgccactgaatgcgggtaacaacaattcatcgaccaccacatcctcgaccacgacagcggaaaagaccggaaccacggggacacagaaatcatgcaattccaatggcaaagtgacagctccgccggagaatttgattatatgtttgagcgagcagcaggaggcattttgcaccaccgcgagaagaggatcgggcgcagtgcagcagacagatttgtaa

SEQ ID NO: 16260 - protein, 451 aa, DROSOPHILA
MTADSEANATNWYNTNESLYTTELNHRWISGSSTIQPEESLYGTDLPTYQHCIATRNSFADLFTVVLYGFVCIIGLFGNTLVIYVVLRFSKMQTVTNIYILNLAVADECFLIGIPFLLYTMRICSWRFGEFMCKAYMVSTSITSFTSSIFLLIMSADRYIAVCHPISSPRYRTLHIAKVVSAIAWSTSAVLMLPVILYASTVEQEDGINYSCNIMWPDAYKKHSGTTFILYTFFLGFATPLCFILSFYYLVIRKLRSVGPKPGTKSKEKRRAHRKVTRLVLTVALIHSNPAQRDLSRLEILIFLLLGALVYSNSAVNPILYAFLSENFRKSFFKAFTCMNKQDINAQLQLEPSVFTKQGSKKRGGSKRLLTSNPQIPPLLPLNAGNNNSSTTTSSTTTAEKTGTTGTQKSCNSNGKVTAPPENLIICLSEQQEAFCTTARRGSGAVQQTDL

SEQ ID NO: 16261 - DNA, 3443 bp, DROSOPHILA
tctcccactctgcggacgtcagatgaactgactcaaagagagccagcaatttctaccgaaaagtgtgtggctctggctctgaacttcctggccagcggcgagcggctctctttgattgccgagagattttctctgccccgtccaaggaccatcaagtgtttaaaggtcttttgcaacgccgttatgtccactttggggcgggcgcttcgccaattgccccagaatccagtggactgcaatagtgtggccaaggggttccagcgtgaaagcaacatgcccgccgcactcgtcggcgtccttggcgtctgctccattcccatccgatccactggcgaggccaagaactcgatactgcgcatggagtatctgctcgacgatcgaatgctctttcgggagctgcaattgggatgtggcttgcgtgccaccctgggacccatgttttcccacgcacccaatactcttaccgcaatccctgaattccgcattaattcccgactagttccggcctttgtcttggccccggtgtaccagaattatccactgcgtccctggcttttgcagcgctatactgatccgacagctccgcacgagcacgacttcaacgaggttgccgagcacctgcaggaattgagtgactgcgcactgcatcgcctcatgtcccgctggagcttccttagccaacccctggacattagcttccatacggcctcgtgcatcatcacagcagccgcagtattgcacaatctactggaagaactgagcgaaccacacatgcttgagtggggcaactcggtggacgtgtccaaattccgggcagagccgctgtcagattcagtcagcgaggacgccgagtctcatgcggcgctagaagtgagagatttcctagccagaactataagctccactgaaatataaggcatagaaatcgatgtgcaaccaccgacttctcatatacataaatactgtagagataaggactaaaataaaaccaaattaagttacattacaaaaatgtaggatcttatttatttcaagatgtaagaaaaatgaagtatgcgcatctagtaaagacgctggggcggtcccatggaggacttgacgtgcagggagcgcacattctgccagttcttcttcaacagcgacaccaagaagttgatcgacaagttgacgttttgggccagctcgtcggacttcatgccaacgtggccgacggcgacggacaggcagagcaccttcttcatctggaacttgatggtcgacttaacctcctcgatcttgccaatcatagactcctgatgcgacagcagggcagggaacttgccggccttgttcaagccagggccaagcaaacgaggaatctgcttgatcagcgactcagaggccaggaaggcatcataggacttggccagcttcttcaccagcttcttgttcttgttcagcttcttcagagcctcggcatccatgaagtcgacgttgttggccttggcttcgtcgcaatgctgctgatcgccaaggatgcacaccttcatcttgggacgaggaatgtgcttcaacctgtgggatgacaagaaagtaaccataaattagccagtgctttgtggattcaaatagatgtagatataagtggggcctcatggaaaacttacaaggctctcagaggagcacgttttcatagttattaagaaaatgggggttcggtgtccattgctggagacctactcaaattttaaagaccctgagtgcaggtccgtcgagatgtgacagccacatgtcctcgactacctgatgacgtgatgaactcaactcccatgggagcttctatccaagcacgtgcgcaggtgacttagccaacgtacttgacggtgccggagaaacgcttgtccttctggggatcgtagttcttcaggccgatctgcagttccaccgtctcgaggaagccgcgcttcttcttcgccgaagcctccaggagtccattgacgccctcatacagcgtatcacgcgaaaccttcgacctgcaagattgaaccaattatcaaacaaatggaaggcaaatgaacactgcaagcattggctgtttatctttttttgactgtcggactaatgcgcaaatgaaggcagcccacatattagttgcttatttggcacataaaaccacgtttttcttttgcaatcatttccaaactgatatggacatggaaaaggtctaaaaagctggtttctgattgccactgatcacaggatcgcttagaattcaaatttcattaatgtacccaatgtttagttgctttcttttacatattaaaatctggatttacacttacgccatcttttctgttcaacgtgcgatttagaaaggaagtgaaaatcggtttttagaggtgagaaacctctggcgatagtttcgtgggcgcgtgtgcttgtgcgaatatatatcgatattcattaatagggctattcacgagaaatgctggttaataaagaattataaattcttcaattgtttataaaaatattaaatctaatacccccttttttataagttaacggagtacacatacacagtggcatatttttagaatttcatataatatgttacgcaaaaatcaaaggaacgaacagaaataatggaaaataataaagggatgtcggcagacaatgacgtttcaatacacttattttttactttttatgtgtcacagcttattttttttttgttatttttgttacaaattaatgtataactgacagtagttagtgggagctcctaaattaatagctgccaatgtcacaaatcataataatacaaattgctaattaagaatattaagaatatatatatatattatttgaaggcgtttgaatagcaggaatcaccctaataacaaaatccatttatttggcgatgctttgtgggctgccaactggtttttatcactattagtttaccagccctggaactgcggctttgtttgtagccgagaatattggtattaaaatttgcacttgatctctataaaatctatatatgcaactagttagttactgtgtgtctgaagattctgttgattataggctttcttctctttcttcttttctttctaggtgatatcatagtgtgttcaagagaggcaaagagaaactctcttgcgctctctccttaaaacggagagtgcgtggaaatgaaaacattgctttcaccatctcgccgattagtctgcatatcagtgtttagtcggcttttcgctttcgttagataaaaattaagtgcgtggtgtcgttgcaattcgcggattatataagggatttgagccgcgactgcattgattttccattggccatggcccgcatcgttgaaagcaatgtaagttaaatgcaactaattccgttcgctggtatgtttatataactcctcgattcgcatcaccacctgccccgcccacatc

SEQ ID NO: 16262 - DNA, 766 bp, DROSOPHILA
atgaatatcgatatatattcgcacaagcacacgcgcccacgaaactatcgccagaggtcgaaggtttcgcgtgatacgctgtatgagggcgtcaatggactcctggaggcttcggcgaagaagaagcgcggcttcctcgagacggtggaactgcagatcggcctgaagaactacgatccccagaaggacaagcgtttctccggcaccgtcaagttgaagcacattcctcgtcccaagatgaaggtgtgcatccttggcgatcagcagcattgcgacgaagccaaggccaacaacgtcgacttcatggatgccgaggctctgaagaagctgaacaagaacaagaagctggtgaagaagctggccaagtcctatgatgccttcctggcctctgagtcgctgatcaagcagattcctcgtttgcttggccctggcttgaacaaggccggcaagttccctgccctgctgtcgcatcaggagtctatgattggcaagatcgaggaggttaagtcgaccatcaagttccagatgaagaaggtgctctgcctgtccgtcgccgtcggccacgttggcatgaagtccgacgagctggcccaaaacgtcaacttgtcgatcaacttcttggtgtcgctgttgaagaagaactggcagaatgtgcgctccctgcacgtcaagtcctccatgggaccgccccagcgtctttactagatgcgcatacttcatttttcttacatcttgaaataaataagatcctacatttttgtaatgt

SEQ ID NO: 16263 - protein, 234 aa, DROSOPHILA
MNIDIYSHKHTRPRNYRQRSKVSRDTLYEGVNGLLEASAKKKRGFLETVELQIGLKNYDPQKDKRFSGTVKLKHIPRPKMKVCILGDQQHCDEAKANNVDFMDAEALKKLNKNKKLVKKLAKSYDAFLASESLIKQIPRLLGPGLNKAGKFPALLSHQESMIGKIEEVKSTIKFQMKKVLCLSVAVGHVGMKSDELAQNVNLSINFLVSLLKKNWQNVRSLHVKSSMGPPQRLY

SEQ ID NO: 16264 - DNA, 4221 bp, DROSOPHILA
ccactgattgatgttctttgatatgcttacccattgtttattaccttttccagaaaatccccgagaagagcattgttcttctgcacgcctgcgcccacaaccccactggagtggatcccactctggagcagtggcgtgagatctcggctctggtcaagaaacgcaatctgtatcccttcatcgacatggcctaccaaggcttcgccaccggagacattgaccgcgacgcccaggcggtccgcaccttcgaggccgatggccacgacttctgcctggcccagagtttcgccaagaacatgggattgtatggtgagcgcgctggcgccttcaccgtgctgtgctccgacgaggaggaggctgctcgcgtgatgtcccaagttaagatcctgatccgtggtctgtactccaatcccccggtgcacggagctcgtattgccgccgagatcctcaacaacgaggacttgcgcgcccagtggctgaaggatgtgaagctgatggccgaccgcatcatcgatgtgcgcaccaagctcaaggacaatctaattaagctgggatccagccagaactgggaccacattgtcaaccaaatcggcatgttctgcttcacgggcctgaagccggagcaggtgcagaagctgatcaaggatcacagcgtctatctcaccaacgatggacgtgtttcgatggcgggagtcaccagcaagaatgtcgagtacctggctgagagcatacacaaggttaccaagtaaggaggaccagtggagatcgaagtggagatggagtttctgtagtaccttctaatcggcacttgtacgaattttctagcaccaacgaaattgcgaagtctagataagccaatgcattttgcacactctctatccatatctctgtatataagctaaatgatctgccttttaaaaaataaagcatttaaaatgttagtaaatacgattcgtattttttatgaaaaatgaacagatgtaacagaaagcagaagaactttgtgttcgcatttagataatcatatattactagcatccaatttttatatacaactaggatcacggtttgttataacgatatcttaacttatcgctcggctcgcagtactccttgataatgagcttgcacaggaatatgtggaatactatgattattgcgcacacggaaacccagaagagcgtgggcaatccacccagttggtggccatgccgatgcagtgcgatcaaatgctgctcatgggcgggagctgaatggaataattacataatttacataacttgaatatgattgcccagtgaaacttcttaccctcgaccacttccttcacgtggatggcatggtgcagctcttccatgtgttgcttgtcctcggttatgtataatattgctgttagcggttcagtcagtttgactgggaattgtcgtcggttttgcctgcaaagtgatataatttcaatatgttcccaaaggattatatgtgagttaaaattacgtgagcagcacgggctcatccaggcagccgccatcgcaagcgtagtagctcctgtctgaacgatccagcgcgatgttgatcaccgccttgttgtcatcatccacaatgatggtgacgttgacatgggttttgttgccgtaattgaggcgcctgaagtggaagtccctatgcagaaacttcggatggatgttgcactccagatgctgattgctaaaacgaaagctgccaaagctcaggaccatggcttggatgactcccgaagctcccgctcgaataagattgtggcagccctgtttctccaacgttagcatccacgacgtaaccagggagttaagctgctgaagattagacatctcgcgccaaagattctccgcctgcagagtgtgatacgaatcgtagcagccttcggcgtacgttagcgcctttgctatatcctcctttttggagccacccgcctcctcgaactcgaagctgcgcacctgggagagaactgcatacatcgtggcattgatgcggtcgccgttcaagctattctccgccttggatgtgcttatcgtaaatccagtggcccacaaatcagtccaaacgtcaatgtgctcctggcgatagatgtttacgctgttcaaggatcctgggtttgagggcttggagccaagcttttggagcagcttcgccatcgcctgagtggcctgctgctcgatggtctcgcttataccaccgattttttcctccgccactggttttgagtaatgcactgctgtgggatacacaattcgcactgtgccgcgctttctcagctgcagcttggagtccatctgcggcttcactatgcttataacaatggatttactgggattttctgcctgaagctggactgtgcccgagagcacctccaactctgtgtaggtgaacactcccacggagacgggttcacttaggggaacagttcgcctggtgagcttctggagattgacgcgtggcatgatcagttctatgtcctccaagaggttcctggtgtttgtgatctgcagctcttgcatgaagatattcggctgagtgcgatgggcgtagtaggtgtacgaaacaaagtaaccggcaaagcattggaaccgatgcaccattcccgtcagatattcgacgacagtggcttccttttcgccgccagatgcggatcctcccgaaacggagaccaccggctggaaaggaataggcagctgcatggccctgccattcttgatgttcaggaaagcgtcgtgtgcgatctccaggcccaggtagccgttgccgacgtagggcgtgaaatcgcgttcaccaggcattttcgctggtgacacgtgacggatattggcatcgaattcaaagttctggaggatgaagggcgtcagccggtcatccatgcacatactgtggggatctgcaaggggcgggggttagtccagaacattgaaggcgctccactcacccttctgttctggagcactaaggaagatatagcgaaagatcggcggaatcatatagaagaccacacagacgcagaggagcaggaggaacaagcggcggtacgaggagatcgtgccctccgccaggcgtttcattcgacgcatcacgtcgccggcgtcgaacttgcttttcgctgagcggaacaacattttccagcagtgttttggagcccggaaaatgtcggaaaattgagaaacatttcaattttagaccatttttgtgcttcccagtgaatggcaactgcttttagtgatggcacggctagtctcgctaaatcgatatctttgtatatcggttggaaattctataccctcggattacagggtatagtgcattgaaccccaagtttaaaacgcataatgcagttaatagggtaagccctaatttatattaaattgtatatatcagttacatttctttgtacattttgacgggcttgaatctcactgggttgacacagatggttgaaacttaagacagtaatgaaaaaactcttaattttaaattgcacctctcccgcaactaagcccatatcacagttcccggtcctccaattcccgaatcgcatcactggactgaaagaaggcaatgtgaattagtaaagagtgaggtatgcgatgctccttacctttttgaaccagaatgagggcataaagctgatcttgttgccgaaactcatgtcggcaggcgggaaaatgccgtgcaggtggaggtggcgaaccgagatgaacggcggcaagtggaagcccacaatcgcctccttgggatccacgttctgcgatcgcaggaattccatcatgccctgctccattcgccgcactgggtacgtggcaaatggtcattagtacgtttgcttgctatgcgtaccgtggcttacccaatccaacgtgcgatttgttcagcgctttcaggctgtcgaagtgctccttgggaatcgccagatagtggagtctggctgccggatacttgtccttgaagatcacgtactcgtccgtctccacctccaggatgggcggcggtccttggcggcggtgggcgaagtcgcagaagaagcacttttcgctttccgcctggcgaacctcgccactggcacatttgtagatcgataccaaaactattaagcccaaaccggccagcccggctatgtacattttagccttgtttttcattcggctgtttgactggatcggcacggtcttagcttttcttttcatgaacgtctgtgac

SEQ ID NO: 16265 - DNA, 1960 bp, DROSOPHILA
ggaagcacaaaaatggtctaaaattgaaatgtttctcaattttccgacattttccgggctccaaaacactgctggaaaatgttgttccgctcagcgaaaagcaagttcgacgccggcgacgtgatgcgtcgaatgaaacgcctggcggagggcacgatctcctcgtaccgccgcttgttcctcctgctcctctgcgtctgtgtggtcttctatatgattccgccgatctttcgctatatcttccttagtgctccagaacagaaggatccccacagtatgtgcatggatgaccggctgacgcccttcatcctccagaactttgaattcgatgccaatatccgtcacgtgtcaccagcgaaaatgcctggtgaacgcgatttcacgccctacgtcggcaacggctacctgggcctggagatcgcacacgacgctttcctgaacatcaagaatggcagggccatgcagctgcctattcctttccagccggtggtctccgtttcgggaggatccgcatctggcggcgaaaaggaagccactgtcgtcgaatatctgacgggaatggtgcatcggttccaatgctttgccggttactttgtttcgtacacctactacgcccatcgcactcagccgaatatcttcatgcaagagctgcagatcacaaacaccaggaacctcttggaggacatagaactgatcatgccacgcgtcaatctccagaagctcaccaggcgaactgttcccctaagtgaacccgtctccgtgggagtgttcacctacacagagttggaggtgctctcgggcacagtccagcttcaggcagaaaatcccacagtgcattactcaaaaccagtggcggaggaaaaaatcggtggtataagcgagaccatcgagcagcaggccactcaggcgatggcgaagctgctccaaaagcttggctccaagccctcaaacccaggatccttgaacagcgtaaacatctatcgccaggagcacattgacgtttggactgatttgtgggccactggatttacgataagcacatccaaggcggagaatagcttgaacggcgaccgcatcaatgccacgatgtatgcagttctctcccaggtgcgcagcttcgagttcgaggaggcgggtggctccaaaaaggaggatatagcaaaggcgctaacgtacgccgaaggctgctacgattcgtatcacactctgcaggcggagaatctttggcgcgagatgtctaatcttcagcagcttaactccctggttacgtcgtggatgctaacgttggagaaacagggctgccacaatcttattcgagcgggagcttcgggagtcatccaagccatggtcctgagctttggcagctttcgttttagcaatcagcatctggagtgcaacatccatccgaagtttctgcatagggacttccacttcaggcgcctcaattacggcaacaaaacccatgtcaacgtcaccatcattgtggatgatgacaacaaggcggtgatcaacatcgcgctggatcgttcagacaggagctactacgcttgcgatggcggctgcctggatgagcccgtgctgctcacgcaaaaccgacgacaattcccagtcaaactgactgaaccgctaacagcaatattatacataaccgaggacaagcaacacatggaagagctgcaccatgccatccacgtgaaggaagtggtcgaggctcccgcccatgagcagcatttgatcgcactgcatcggcatggccaccaactgggtggattgcccacgctcttctgggtttccgtgtgcgcaataatcatagtattccacatattcctgtgcaagctcattatcaaggagtactgcgagccgagcgataagttaagatatcgttataacaaaccgtgatcctagttgtatataaaaattggatgctagtaatatatgattatctaaatgcgaacacaaa

SEQ ID NO: 16266 - protein, 606 aa, DROSOPHILA
MLFRSAKSKFDAGDVMRRMKRLAEGTISSYRRLFLLLLCVCVVFYMIPPIFRYIFLSAPEQKDPHSMCMDDRLTPFILQNFEFDANIRHVSPAKMPGERDFTPYVGNGYLGLEIAHDAFLNIKNGRAMQLPIPFQPVVSVSGGSASGGEKEATVVEYLTGMVHRFQCFAGYFVSYTYYAHRTQPNIFMQELQITNTRNLLEDIELIMPRVNLQKLTRRTVPLSEPVSVGVFTYTELEVLSGTVQLQAENPTVHYSKPVAEEKIGGISETIEQQATQAMAKLLQKLGSKPSNPGSLNSVNIYRQEHIDVWTDLWATGFTISTSKAENSLNGDRINATMYAVLSQVRSFEFEEAGGSKKEDIAKALTYAEGCYDSYHTLQAENLWREMSNLQQLNSLVTSWMLTLEKQGCHNLIRAGASGVIQAMVLSFGSFRFSNQHLECNIHPKFLHRDFHFRRLNYGNKTHVNVTIIVDDDNKAVINIALDRSDRSYYACDGGCLDEPVLLTQNRRQFPVKLTEPLTAILYITEDKQHMEELHHAIHVKEVVEAPAHEQHLIALHRHGHQLGGLPTLFWVSVCAIIIVFHIFLCKLIIKEYCEPSDKLRYRYNKP

SEQ ID NO: 16267 - DNA, 2364 bp, DROSOPHILA
ggagtacgataaattcatgaacgaggtgtggatcggcatcgtcttcaccctgatcctcatctcgatggtcttctgcatctgctcctgcttcctgtaccatcagttccgcacctggaaacgcaattgtaagtattccgcattagaaatgggaaaatgttcatatggcatccgtatatatttgttaattgagattaagatcttatcgactgcctgttttgattagccagtactgccaaaaaaaaaaaaaaaaaaacactcacacaattcaagccacataaacaagtcgaaattccaggccattataaacgattttattgctgaaattaggtgacctgacttcaaccgtcatcagggaaatatactccattagaagtggaaatcttttcgtattttattccgtcttaagtgcttccacatctctaatgattcactttgttacgtcaatctatttttttttttttttgaggtcgtaaaagcgaagtatttcgttaactgtcgtcaggttcaagaacaaacaccaattttctgtagttcgtgatgcggcctaaaaagtcacgaaaccttggaaaaaaattagcacatcgccaacgaaatggcagaaaagtgcggcaaaaaatttcagagaaattcgtctacctcgagtttaattcgaaagcggtgccaaggcaattatgaaaaagaatgcagcgaagagaaaatatttaaaaagttaatggaaatgaaagccagcaaatagggcaaaacaaatgcgggcagaagcaattgtaatattgcaactgggtcgaggtcttcattaatctcgcccagtcaactccaatccaacgaaggcaaatactaataaacaattattgttctttgttttgcagatcgcaacaatgcaaatggctcgacgcagtgcaccattgtagatatagaggcgttgaaactgcatccggatgtggaggatccggttccggaatacaccctagtatctggattgcccagctacgaggcggctctggagctgctacaaaaatccccgcagtcatcctgcctgattgtctatccgagtgtgttcaatgtgttcaataagcaggagaggagcagccaggagctgcagcatccaggagttgcaacatcagcacctccagccgcacccgagaatcacctggcaccgcagacaccttcgttttgtgatgccacaatgccgctgctcccagcaacaacagcagcagcagcaacacatgcagcagcaacagtaacagcagtaacagcagcaacagcaacatctgcaacattggcagcttcgcccacgtgcgagtcgattaagccaaactttgtgatgatgccaattgtgcccagttatgcggaggtattcggcagctcgtacaaaaccgtcgacgagaaaaagaaatcgaagtcaaaagacagccagtcgaaagacgatatcaagcggtaaaggtaaaagtgacgagaatacgaatacgaatacctagccaagcaactgagctctgtgatattttcatgttcatgctggaaagacatacccatatgtaattaaactaagcgctgtgattatcaaaaagacgtaactaaacatactactcgctactaaatgtgttagctgaatagtttcgccacattgtacttaatgatatcgtatccagtacttatggaaacgcaaagatgcatattgttactagacttaagtaggccacaaactaattattaataaattatacacctaacaatttaaattatcgttggtttaattattactcgaataacaagctctctcttaaagctagaagcaccgaatggagctcttcatctgccgccagcttctttgattattatttcgccatcaatcagttgacattcaaattgattcattgatgctgcagcaactgatttgattgacgccaggaacagatggcatacaaatcctttcgccaggcggtgccactccccacttccactgagctttgtaaatagcttccagcttcggatgccggagcacaacatcaacaatccggcagattgagatagttgtcgtagatagatagatagatggatagatagacagatagagacagttcgatttgacattgagctaaggacgtgatagcttattcgactgccggtgcttgcagtgcgctcaatgcttttgtgcaattgtaatttcgcattgataagctagtaaacccatgtataggtatgcaaatcgctggcagagacaatagacataataaatgatctcaaacactgttttcctagcatcgatgctaagtcggtggacgtgactcccagttaaccccgtgctggaaaacgtggacgcttccgaaggcaatgcgaattgtggtaggtcttgggttctatcgctct

SEQ ID NO: 16268 - DNA, 364 bp, DROSOPHILA
agctgccgaatacctccgcataactgggcacaattggcatcatcacaaagtttggcttaatcgactcgcacgtgggcgaagctgccaatgttgcagatgttgctgttgctgctgttactgctgttactgttgctgctgcatgtgttgctgctgctgctgttgttgctgggagcagcggcattgtggcatcacaaaacgaaggtgtctgcggtgccaggtgattctcgggtgcggctggaggtgctgatgttgcaactcctggatgctgcagctcctggctgctcctctcctgcttattgaacacattgaacacactcggatagacaatcaggcaggatgactgcggggatttttgtagcagctc

SEQ ID NO: 16269 - protein, 70 aa, DROSOPHILA
MLQMLLLLLLLLLLLLLHVLLLLLLLLGAAALWHHKTKVSAVPGDSRVRLEVLMLQLLDAAAPGCSSPAY

SEQ ID NO: 16270 - DNA, 2309 bp, DROSOPHILA
caccatgcccaaccaggatacgcaaaaggatacctaatctcttaccgccttgcagatgctagtcgttggctcgatagcccttctcctggccctggccagtgcccggccgcaaaatgatgtggaagttcttgagtacgaatcggagaacaccggcctcggcggctacaagttcagctacaaactgagcgatggcaccagtcgaacagaggagggcgtggtcaacaacgcgggcaccgacaacgaatccatatccattcggggatccgtcacctgggtggctcccgatggccaaacctacaccattaactttgtggccgacgagaacggttttcagccggagggtgcccatctgcccaagtagacctccgctttcgaggagatcctgtaaataccaccttcccgaatgaacccacaattccaaccaaccagccatacagtgaggtgctaaggtcctgtccggaggagctgtcccttgtcccgtggcagccaatcggtcagtcagttagtaagtcgatcagtcagtcaagtcagtgtcgtgcattgttttctattttccttgttactcgcattaaagccgaactttcgattctcgaaaaaaatatgttttctttgtggaacccataaagtaagtcaccagttctgggaagggtcattcaaaatatgaaactgcactagataactttcctttataattataacgaagtaccagagttattttctattttatcgtatttagctatgaaaattcacacttttatttcttttgattcaaaatgatcaatatacaagatgttccatctaaaaaatttacgaaggtactaatcttaaaaatatttttaaggaacataacaattggttttattctttatttaaactgagctacgataaaaggttattcagtattatggtttctgagcctatttcgatttaatgacttgtttttccaattgatttctagttttcaactagaagacctttttaattaccatcatacaccgatttataggtggggaatatcctcgccctggggttggaatccgttctcatcggccacgtagctgatggcatgcgtctgtccgtcgtctcctacgaagctgaaggatccggccacctgcaaggcatcctcctcgggaccaaggctcttcagggagccgtgctgctcctgcttggtgccatcgcttgtctcaaatttgtagctatagctatcggcattgacatcggacaccaggtcaacaatctctgcatccggagcggcagcagctaggcacagggcacttaaaaggcaggcgagcacaaggatggatttcatcttgaatagtcaaaaattactcaatattcaaaatgccagattgcaggagtcttttatacgattgctaagacagcttatgcaattagcactttgggacaagtcgttaacattatatagccgacgcgatctgaggacagcaggtgttaattgaacttctgttcaatttatttattaaaaatctaatactcaaaaagaaaattcaagattttttaataagcggaataaagttgtaaaacaattaaactctaaagattttctccaaacgcctttcagacaattacaatatattaaaattaaattttgcatataaaccaggcttctaaacttttcgtttaaatttcgatccacatatttattagctcaaactatagatttcaagttttaagcttagcttagccgaaactagttttgattgctgtagcgcgtgcttttgcccaaagagttgaactataaataaactgagaatacgccctaaacagtatagtaatcattgagtcttcaacgatctaccacgtcttcaatatgaaattcgccatcgtcctgttcgccctctttgccgtggccctggctgcccctactgtcgaggtcctgcgatcggatagcaatgttggaatcgataactactcatatgcgtaagttcttaaagcgcatagatggcaattcgagtatgtaattccgatgcaacccccttctccgacagagttgaaaccagcgacggtacctcgaagagcgaggagggtgtgctgaagaacgccggcaccgagctagaggccatctcaacccacggctccttcagctacgtgggccctgatggccagacctacaccgtcacctacgtggccgatgagaacggattccagccccagggtgctcatctgcccgttgcccccgttgcctaagttaaggagttgaaataaattgtttataaaagaatactctttgtttggctttcaaaaaagcctggacatgcagtgggggaaaatcatttactatgtctagt

SEQ ID NO: 16271 - DNA, 309 bp, DROSOPHILA
atgaaatccatccttgtgctcgcctgccttttaagtgccctgtgcctagctgctgccgctccggatgcagagattgttgacctggtgtccgatgtcaatgccgatagctatagctacaaatttgagacaagcgatggcaccaagcaggagcagcacggctccctgaagagccttggtcccgaggaggatgccttgcaggtggccggatccttcagcttcgtaggagacgacggacagacgcatgccatcagctacgtggccgatgagaacggattccaaccccagggcgaggatattccccacctataa

SEQ ID NO: 16272 - protein, 102 aa, DROSOPHILA
MKSILVLACLLSALCLAAAAPDAEIVDLVSDVNADSYSYKFETSDGTKQEQHGSLKSLGPEEDALQVAGSFSFVGDDGQTHAISYVADENGFQPQGEDIPHL

SEQ ID NO: 16273 - DNA, 4301 bp, DROSOPHILA
catcagggggactggttcctctactgcaacgacgataagtaataatggcgaattttgaatgaaaaactaatactctgagtgctaataaattcgcttttcagctttgtagtcgtagacaatcttcgtcacatgctaaagacgtatagtcccaaagagctcatctactttggatgcaaactgcgaacgaccaatggtctggtgagttagtttattttttatttcctaactaaattaaaataaatcttccgttcatacttctttaatcaagttacacttttattaccctgcttacatatattttaatttaatttataggtctttatgctagaaggttctgggattgtcttcagtgcagctgctctcaagcgatttgcactcacagccctgaccaacgagagtatttgcagttcggagacgaaaggaaatgatttcactaaggaactgggtcgatgtctgacaaatgtcaatgtgatagccggggatagtcgagatgagtttcagcggcatcgattccttcctttcgacgcggatttgcatttgggatcatctatgaatgaatccttagaaaaccacaagtattttctggatcattcatattatccagtgaatgatgtgagtttttaaaactgagtttatttattgattagttcattttgtgtttttttttttttgcgaattaatttcagatgaacttgccggtctctttgcattcaatatgctttcatgttccgtacactttgaacatttatgatctgtactactttgcatataaaactcgaatttttggagtaccgctcaacttgggctttgaaaatgaaaggatgggactcgaaaataaaactgcgtgaaggggtctttatataaaggcaaatattcttaagttattccacttattttagaaatatactcttacatgctctttcctaaataacaaagtatgtatttacaaataatattcggcagttatagacatagctgttgacaatgccgcaaatttctcctattgcgtcttaacattatcccaaaaatgttgcagtctttggctattcagatatccaaatttccactgttgcttatggttcttcggatcacagacactcgaagtaaccgcatttaattccggctgggcctccaggcaatgtctgaagttttgctgttggccggagatcacctgatgggtcttggagtcgaaggaccagaactgatttccactctgaccatggcactggtatatatgaacgtttactccgtgattgcgcacctccaagcaatagaatccagatcgcaactccctatgattagttaggctccaatactgctctggacttgggaatacgtggtccgaactacaaggagctaatttgggttgaccatgactaggatctttgcgatccaggcagagtttcggtgatgatatactttgtaacactcccgaagcgtattctgcgggatctaatatgggatatagattgaggaaatccgtagcgaggttatccaaaaaccacttgaaaggcttgcagtggaggcggttcttaaggtctcgttgctcggcaagattgcccaccggaatcactgttaaatgtggcatgttggcaaataacttgtccttatattcatctaaccaaatctcagcgactcggcggtagttctaaataagagtttagttgtacacaaaccattattttatattcatactattttataatatttattatggtactgaaaataaatggaactcacccttgaaattaatttcttctcactatttttatccttgttggtatagcgaatttggaaatttccgtctctaaagagatggccaaccctagagcagggaacttctaggatttgtcctccgcacaaccacagcttaagactcagctcgaactgctcggctccccagatcttcaagcccttgtcgtagccaccgagctcagagaaccactcacgtccaatagcaaagaggccaccattcattatgggattcttatgcggagccggcatggctaccgcctcctctttgagaagtggaagctgaatataattgaattcccagttgaagaagcccctcgacggcttcccccttctgtaggcaaagttatcaaagtcaatggtgtctataataggagtagtgcaggtcctgttgtcctctaaaatgggagcaatgagcggctccagccagcctttggtgacttccacgtgggagtctaggaagacgaggacatcggccagggcgagttccgcgcccacgactctcgcatgcatcagacccacctgggttgtgatcctgcggtgctgcaccatatttagaaacttgatcttaatgaagtcgttgagcttctcgtccgcttgggtgctcccgtcgtccaccaggataacctctcgaagcagctggatcggagttcggctcctcaagctgctaagcgttcgaagcagcacgcttgcctcctcattgtgatacgttatcaccacactgactgatgggagcttttccatcgggtacttgagctttttgcagctgtggaaagatcgcaacattcagagagtcttatcatattaacagtgatgactagttagctatttaaatgaacaaactacgaagtaaagcgcgtataggatcctaaccataagtactttaaataataagtaatataaataatatattaataataatttattctcttaatattgtaaatatgactaaagaaaatattagttgtttttataaatatactaagatataaagtgtgtccagttatatcgctttctaatatgattaaaaatgtaatttctattaaatttatgaatctgaaatttgcatgaactagatatgaaatgtgtttgattgagaaatgtatcttcaaagcgccggcagtactaaatcgaatgccactcttatattgctaccgattttcgctctgcaagctcttgaagcttattctctcgccactcacctgcgatgtcgcatatcgtagagcgatcgctcaggtgagatgcgcttggagagccaagcattgtaacccgtttcccgctgacttttggcgatggcctccagctgctcctcagtccaattaccccttgccgggcgacccaaagctcccagatccggtatgacctccgactcgaagaccgcttgcagatctcttatgtcacgctccaagcgagaagttgtcgaagttgcactttcatcacgctccccctccaatttcagggtatatagatagtagataatactgccgatggccattagcagtagcagcggcaacaccttcttcttgtgccgccaaatgtccaggcacatcgtatcacagaaacaaacacagccctccggaacgaatagtaaactttcggcttaaaccgcacagcgttttggccaagactgaagctggccaactgagagcatgacgagagcggtctgggtcttccacaccagtaatcccatcttatacgctgagaaagtttttgattcgatggctcaatgagcatatcaggggcatattgaaatttctgaaggccattggagtgggttttattcgttttaccataaaagctagcgacaaatgactttaataaatcctgccttaagacaataaaatgtactgatgagtagataccaaacgcctttatgtatacacagttagttatgttagcccaaacgaatatgaaaagggttggagatccgatagtctttacttctcctaatactatatcaaatgaatttgttccatccaaatcgtattaacgaaggcctttaagagtttttgtaatacttatttcagtcttattttaatcacaatgaaatcattactatttggtacaccgtgtagctgtgcaatcttcattttagtatattgtataattactctatttatctggtttttgtatacagataacttgtcaaacgccatagttgactttgaatacttttcaataaaaaatcttggcgaacttggaaaagaagcacatttacaaatgacagaaactgatttagttgatgctcaactacagaatgagaaatatcaatacaatgcctggctatcagaaagaatcccgctgaaaagaactctagaagactatagggatccacagtaagtacacttagcaaaccaatataatttcatgcactaaatccttgtttaaagatgtctcaagatcaactacagttcagaaaaaacggttactgttagcatagttatagccatccaacaggagcatcctcacactctgctgagaggcatctatagcgttattacgcaaacatcaccctatttactcaaagaaatagtactggttcatgatgg

SEQ ID NO: 16274 - DNA, 1773 bp, DROSOPHILA
atgtgcctggacatttggcggcacaagaagaaggtgttgccgctgctactgctaatggccatcggcagtattatctactatctatataccctgaaattggagggggagcgtgatgaaagtgcaacttcgacaacttctcgcttggagcgtgacataagagatctgcaagcggtcttcgagtcggaggtcataccggatctgggagctttgggtcgcccggcaaggggtaattggactgaggagcagctggaggccatcgccaaaagtcagcgggaaacgggttacaatgcttggctctccaagcgcatctcacctgagcgatcgctctacgatatgcgacatcgcagctgcaaaaagctcaagtacccgatggaaaagctcccatcagtcagtgtggtgataacgtatcacaatgaggaggcaagcgtgctgcttcgaacgcttagcagcttgaggagccgaactccgatccagctgcttcgagaggttatcctggtggacgacgggagcacccaagcggacgagaagctcaacgacttcattaagatcaagtttctaaatatggtgcagcaccgcaggatcacaacccaggtgggtctgatgcatgcgagagtcgtgggcgcggaactcgccctggccgatgtcctcgtcttcctagactcccacgtggaagtcaccaaaggctggctggagccgctcattgctcccattttagaggacaacaggacctgcactactcctattatagacaccattgactttgataactttgcctacagaagggggaagccgtcgaggggcttcttcaactgggaattcaattatattcagcttccacttctcaaagaggaggcggtagccatgccggctccgcataagaatcccataatgaatggtggcctctttgctattggacgtgagtggttctctgagctcggtggctacgacaagggcttgaagatctggggagccgagcagttcgagctgagtcttaagctgtggttgtgcggaggacaaatcctagaagttccctgctctagggttggccatctctttagagacggaaatttccaaattcgctataccaacaaggataaaaatagtgagaagaaattaatttcaaggaactaccgccgagtcgctgagatttggttagatgaatataaggacaagttatttgccaacatgccacatttaacagtgattccggtgggcaatcttgccgagcaacgagaccttaagaaccgcctccactgcaagcctttcaagtggtttttggataacctcgctacggatttcctcaatctatatcccatattagatcccgcagaatacgcttcgggagtgttacaaagtatatcatcaccgaaactctgcctggatcgcaaagatcctagtcatggtcaacccaaattagctccttgtagttcggaccacgtattcccaagtccagagcagtattggagcctaactaatcatagggagttgcgatctggattctattgcttggaggtgcgcaatcacggagtaaacgttcatatataccagtgccatggtcagagtggaaatcagttctggtccttcgactccaagacccatcaggtgatctccggccaacagcaaaacttcagacattgcctggaggcccagccggaattaaatgcggttacttcgagtgtctgtgatccgaagaaccataagcaacagtggaaatttggatatctgaatagccaaagactgcaacatttttgggataatgttaagacgcaatag

SEQ ID NO: 16275 - protein, 590 aa, DROSOPHILA
MCLDIWRHKKKVLPLLLLMAIGSIIYYLYTLKLEGERDESATSTTSRLERDIRDLQAVFESEVIPDLGALGRPARGNWTEEQLEAIAKSQRETGYNAWLSKRISPERSLYDMRHRSCKKLKYPMEKLPSVSVVITYHNEEASVLLRTLSSLRSRTPIQLLREVILVDDGSTQADEKLNDFIKIKFLNMVQHRRITTQVGLMHARVVGAELALADVLVFLDSHVEVTKGWLEPLIAPILEDNRTCTTPIIDTIDFDNFAYRRGKPSRGFFNWEFNYIQLPLLKEEAVAMPAPHKNPIMNGGLFAIGREWFSELGGYDKGLKIWGAEQFELSLKLWLCGGQILEVPCSRVGHLFRDGNFQIRYTNKDKNSEKKLISRNYRRVAEIWLDEYKDKLFANMPHLTVIPVGNLAEQRDLKNRLHCKPFKWFLDNLATDFLNLYPILDPAEYASGVLQSISSPKLCLDRKDPSHGQPKLAPCSSDHVFPSPEQYWSLTNHRELRSGFYCLEVRNHGVNVHIYQCHGQSGNQFWSFDSKTHQVISGQQQNFRHCLEAQPELNAVTSSVCDPKNHKQQWKFGYLNSQRLQHFWDNVKTQ

SEQ ID NO: 16276 - DNA, 5349 bp, DROSOPHILA
acaatggaaaagccttcggaaacccgaacaaggatcacttggacatattggcgccactctaccaatgctgcctgtaagtcttcgaccaatttccaaatacctataactatttacgtttataccttacagtctgcgaaagtccacgtgggatcgcctgcaagtcttttccggcggcgtactcacggaaatcatcgatcgactatccaagcaggatgctctctatcccctgattacggataagcataaaaaaggagtggagcgacgacttctggtggtctatgctgttgtggagcactgcatggacatcgagggcgacaaaatgttcaaaactctgtagtttcagctcaagattggggctaatggccagcactagagctttaggaactcactttccacatcctacttaagctaaagttagatagagaaattatcgtattattttagtccatgttttacttctgtatttcttccaaatatttaaatgcccgaaacaggttttttcctattttaaattaagttcttttgtcctttcttgtattggtttgaatgctagaaaagttttcgaaaaattgagatgccatccaattaggaattaaatcatacaaaattcgttgtgacgaaataagtttgaaatttaaacctattaccatgacatttcccacgtcccaattattatttggttttcccatattttttcaatgaccatctcttaaaactgttcttaaatattgaactacaaaccgatccataacaacatatccgatagtctagtttaatgaatagttacggttgttatttaataggtaatattttagaaaattgcaaagctcagaaaaaatagttttgtaacttgaaaagaatttataaacaatcaaaaataaacacttgtttatttcttcatcagtttcatcaatcagttttcgtgttgctcgcattcttactattgaattcacatatataccagttatgtatattttacagacttcgtcacgattgcagttcattttttgccctcttttcttacattactaaatgtaaaaagcttgttgaactgcttgttgttccgattgttgggacggttctaaaaaaaaaaacaagcgttataaatgtttagtgaagagatcgtttcagtaaaagctaagccagcttgttaatacttttcatagcactcaccttgccgcgaatttgctgcttgatttctgtgccccgggctctttgcgctcctcccttgaattgccggaagtccacgttcttgtagtcaaagttgcctgtacccttgtgctgcggaacctgctgactggagctctgcgggtggtttcctcgattcttggccttgaatccgcgctggaactgatttttcttttgcttgcggttgttctgtgccggtgatggtttcggtggctctgtggcttgcctttcgataggaacctcaacgacctcatcatcgctttcgcctaaagcctgctgaactttttcgactggttcgatctttaccggcggtttggtttgtgaattctcgtccttgcgaggtcgcttgctagcagtcggctgctgttccggatctgttttcacgttcgcttgtgggtgcttgcgcttcagttgttccttcagcgggacggagtacatgtcatcatcctcctttccgatggcgtgtgcctccagcttaatgttttgctccacagttggggctgctggacacaattgcctcttttgcaactcacttcgctccctggccaactgatcggccttcagctgcaccatcagaggtaggatggcgagatagcgtttgtagggcatacgcattgtctggctctccttgcgaagatgggcccagcgctgttcctcttcttgtgtcggcttggactgcttttcgaacagagccatggctggtgccgctaaggttggatctactttggcaacctcctccttattgggcacctccagttttcctgtagttgaattacgtttcaacagcgttggcaggtcgtcgcgaatctcctccagttgcgaaaaatcgtgcggacagtagagcttgctgctaaagtctttggtcgacggaggcaacgctgcctgtgtactactgtgggcttccaggatcggctaaaatcgtaagtaaagtcaagaacattaaacattagatataccaccccaacacttggtaacattaaacctattttagttgacctgcggttgtgaaatgaattgaactataaggtgaattcagaacatgttcttcatttcaatgttagttacagttaattggtaatgaaaaattatcggtataggcgccaacgttgatcgagttgcaagcgctgcttgaaaccgccaagaaactcactttgaccagcggctgatcgcgcgccttgaggacaatctggtgaagcgtgtgcagctgttggcgcaccagcggcggaatgggattgcagcaggcgaggattccctgcatctcccttggaagactctcagcgatttgcagcatcatgtgattgggcagcacatagccgtaactctcgtcctctgaccgcgccgtcgcatcgcgccactcgaagattccgcgaagtgcgtacagttgccggttgtcgaaagagcgcttcgtttttcttactaaatccaaatgggattctggtccgatgtgaggcttattataacgcttcttgcagacatccgtgctctgttgatagacactgcccagcagacctggttcggcatgctgctgcagcagatcgtttgtcatccgtccgtaaacgtatatcaaaaagtgggtatcctgacgagcgtagtccaccagctgctggggaagcggtctcatccgccaatcggccagttgcaggctcttgtccacatccaagtccagatagtgcttaagcaaatatgccaacgataaccttgccatattcaaggctttggcagcccgatgcgtgtcgaacatgttgacgatatacaacgataagtcccgctgaagccactcaatatccaaatcggcgccgtgcagtatcttcagcttcttgggatcggtgagtaccaaatttagtatatgcatatcatcgcgtaggatcagggtatcaaaaatatagtctttgctgcgagtagacatctggaccaggcaagtgatgcccatgaaggtgcgatacgagtggtgctccacatctatggcgatctggggcgcttgtctcagttcctccaatgcctgcttcagtttttccaccgtgtcaaccaccattagttcggtttctgccatcagagctggaagcactggcttttgtttttggaactgctcctccggaggctgaaacttaagcagctcaaactcgtagggatgcaaataggattggacattgccggcatcatcgtattcgggcagcagggccagcggtttaagagaattaggtttctccttgagtcttggaacaaacggattctgggcactgttatccaccggctccctaaattgcgtctgcggccgaacgatgttcttggcggtgaagagacgagccgaaaccatgctgcgttggggtgttcctgtcgttctgttccagctgcctgcctttggagtcccttgggtttgtggggaagctactgcgggctctatggatgtggagctgctcatcacgtccacctgggcctctacgacctgttgtgtatttcttcgcagaccacctttaatgtctagattagtcgtaatgcgctcgaacagtacgtcgttgcactcctgcaccatctcaaactgctcttccggttggcgtctgtttaaagaataaagatctattgttatttacagatacaggtaccaactttgatttcaatggctgtgctgtattttcaacatttcgaataatgtcatggttagaagcttactttttgatgtcgcccttgatgtccttggagtgcagcacgttcccgatgagcgccaccacccgttgggtcaggtcttccataacacgtgcgtagcctggatagcttaggtaaagggcgcgggctgttccttgtgggaaagcattagcggcttttgtggcggcgattgcattcttgaaccctttctggaatgtcagagcagaacacgtagggattggattgaaatatacttatgtacgctggctgaattgctacccacgtttgtgaatgcctcaacatcttctgaagcggatttctttggcggctggtctgcttgggccgattcctctttggcctcctggtgaactcttttcggggttcgcggcatgtctgtatagtgtttccttgtcgaatgtcttgtgttattttcgtacaaattttttgtcgttttacagattgtggaaaatgtgcgtgttttctcttcttcttttttgagaataacaacagcttgaatttggagtttgtcaacactaccggcggcgaaatttgatcactatatagcactaaaacggtgctgaccgcaatcgaattaaatcgatatgaaggtgtattttacaaatgttagccaaatttggaatggtgatatttcgttatgttaaaccgtaaacagaacctgctttgatgaacaatactttacaaattctttttaaaagcaaaatgttattattatattgaactaaatatatattcctttcaatataaattaaactgaataaatattttctttgttaaatatttggtcttttcttttattttttcaagagggcgctaaattgttcaagtgaaaccctgaacaaaattttcagccagctgattgccagtgtgtacacccctccggcgccggcgaaaagcgaggagcttgaccgagaagcatcaactccatccagaagaagtggagttacgtgctaaaaaaaaagtaattataaagcctaagtttagtccaattaggaggtaaaacacgcacaagatgctggacctatacagacgcacggtggcgcggtttcctctgggcagtgtcagctatatgttcgcctacggatccggcgtcaaacagcaggaaggctatggaaaagtcggcaatggaaacaacctgcgtcctccgccgggaaccgttgtggatctggtcttttgcgttcgtgatgctaggggcttccatgcggagaacctgcaccgtcatccggaccactattccgcccttaggcacctgggaccgaactttgtggccaagtatcaggagcgtttgggtgcgggtgtctattgcaacacgttggtgcctctgccagatgtgggcattaccataaagtacggcgtggtgtcgcaggaggagctgctggaggatctgcttgactggcggcatctttacttggcaggaaggctgcacaaaccagtgacgaatctggtcaatccttctgataatcctcccctcaaggctgcgctggagaggaatcttgtatccgc

SEQ ID NO: 16277 - DNA, 2833 bp, DROSOPHILA
ccaaattcaagctgttgttattctcaaaaaagaagaagagaaaacacgcacattttccacaatctgtaaaacgacaaaaaatttgtacgaaaataacacaagacattcgacaaggaaacactatacagacatgccgcgaaccccgaaaagagttcaccaggaggccaaagaggaatcggcccaagcagaccagccgccaaagaaatccgcttcagaagatgttgaggcattcacaaacaaagggttcaagaatgcaatcgccgccacaaaagccgctaatgctttcccacaaggaacagcccgcgccctttacctaagctatccaggctacgcacgtgttatggaagacctgacccaacgggtggtggcgctcatcgggaacgtgctgcactccaaggacatcaagggcgacatcaaaaaacgccaaccggaagagcagtttgagatggtgcaggagtgcaacgacgtactgttcgagcgcattacgactaatctagacattaaaggtggtctgcgaagaaatacacaacaggtcgtagaggcccaggtggacgtgatgagcagctccacatccatagagcccgcagtagcttccccacaaacccaagggactccaaaggcaggcagctggaacagaacgacaggaacaccccaacgcagcatggtttcggctcgtctcttcaccgccaagaacatcgttcggccgcagacgcaatttagggagccggtggataacagtgcccagaatccgtttgttccaagactcaaggagaaacctaattctcttaaaccgctggccctgctgcccgaatacgatgatgccggcaatgtccaatcctatttgcatccctacgagtttgagctgcttaagtttcagcctccggaggagcagttccaaaaacaaaagccagtgcttccagctctgatggcagaaaccgaactaatggtggttgacacggtggaaaaactgaagcaggcattggaggaactgagacaagcgccccagatcgccatagatgtggagcaccactcgtatcgcaccttcatgggcatcacttgcctggtccagatgtctactcgcagcaaagactatatttttgataccctgatcctacgcgatgatatgcatatactaaatttggtactcaccgatcccaagaagctgaagatactgcacggcgccgatttggatattgagtggcttcagcgggacttatcgttgtatatcgtcaacatgttcgacacgcatcgggctgccaaagccttgaatatggcaaggttatcgttggcatatttgcttaagcactatctggacttggatgtggacaagagcctgcaactggccgattggcggatgagaccgcttccccagcagctggtggactacgctcgtcaggatacccactttttgatatacgtttacggacggatgacaaacgatctgctgcagcagcatgccgaaccaggtctgctgggcagtgtctatcaacagagcacggatgtctgcaagaagcgttataataagcctcacatcggaccagaatcccatttggatttagtaagaaaaacgaagcgctctttcgacaaccggcaactgtacgcacttcgcggaatcttcgagtggcgcgatgcgacggcgcggtcagaggacgagagttacggctatgtgctgcccaatcacatgatgctgcaaatcgctgagagtcttccaagggagatgcagggaatcctcgcctgctgcaatcccattccgccgctggtgcgccaacagctgcacacgcttcaccagattgtcctcaaggcgcgcgatcagccgctggtcaaaccgatcctggaagcccacagtagtacacaggcagcgttgcctccgtcgaccaaagactttagcagcaagctctactgtccgcacgatttttcgcaactggaggagattcgcgacgacctgccaacgctgttgaaacgtaattcaactacaggaaaactggaggtgcccaataaggaggaggttgccaaagtagatccaaccttagcggcaccagccatggctctgttcgaaaagcagtccaagccgacacaagaagaggaacagcgctgggcccatcttcgcaaggagagccagacaatgcgtatgccctacaaacgctatctcgccatcctacctctgatggtgcagctgaaggccgatcagttggccagggagcgaagtgagttgcaaaagaggcaattgtgtccagcagccccaactgtggagcaaaacattaagctggaggcacacgccatcggaaaggaggatgatgacatgtactccgtcccgctgaaggaacaactgaagcgcaagcacccacaagcgaacgtgaaaacagatccggaacagcagccgactgctagcaagcgacctcgcaaggacgagaattcacaaaccaaaccgccggtaaagatcgaaccagtcgaaaaagttcagcaggctttaggcgaaagcgatgatgaggtcgttgaggttcctatcgaaaggcaagccacagagccaccgaaaccatcaccggcacagaacaaccgcaagcaaaagaaaaatcagttccagcgcggattcaaggccaagaatcgaggaaaccacccgcagagctccagtcagcaggttccgcagcacaagggtacaggcaactttgactacaagaacgtggacttccggcaattcaagggaggagcgcaaagagcccggggcacagaaatcaagcagcaaattcgcggcaagaaccgtcccaacaatcggaacaacaagcagttcaacaagctttttacatttagtaatgtaagaaaagagggcaaaaaatga

SEQ ID NO: 16278 - protein, 900 aa, DROSOPHILA
MPRTPKRVHQEAKEESAQADQPPKKSASEDVEAFTNKGFKNAIAATKAANAFPQGTARALYLSYPGYARVMEDLTQRVVALIGNVLHSKDIKGDIKKRQPEEQFEMVQECNDVLFERITTNLDIKGGLRRNTQQVVEAQVDVMSSSTSIEPAVASPQTQGTPKAGSWNRTTGTPQRSMVSARLFTAKNIVRPQTQFREPVDNSAQNPFVPRLKEKPNSLKPLALLPEYDDAGNVQSYLHPYEFELLKFQPPEEQFQKQKPVLPALMAETELMVVDTVEKLKQALEELRQAPQIAIDVEHHSYRTFMGITCLVQMSTRSKDYIFDTLILRDDMHILNLVLTDPKKLKILHGADLDIEWLQRDLSLYIVNMFDTHRAAKALNMARLSLAYLLKHYLDLDVDKSLQLADWRMRPLPQQLVDYARQDTHFLIYVYGRMTNDLLQQHAEPGLLGSVYQQSTDVCKKRYNKPHIGPESHLDLVRKTKRSFDNRQLYALRGIFEWRDATARSEDESYGYVLPNHMMLQIAESLPREMQGILACCNPIPPLVRQQLHTLHQIVLKARDQPLVKPILEAHSSTQAALPPSTKDFSSKLYCPHDFSQLEEIRDDLPTLLKRNSTTGKLEVPNKEEVAKVDPTLAAPAMALFEKQSKPTQEEEQRWAHLRKESQTMRMPYKRYLAILPLMVQLKADQLARERSELQKRQLCPAAPTVEQNIKLEAHAIGKEDDDMYSVPLKEQLKRKHPQANVKTDPEQQPTASKRPRKDENSQTKPPVKIEPVEKVQQALGESDDEVVEVPIERQATEPPKPSPAQNNRKQKKNQFQRGFKAKNRGNHPQSSSQQVPQHKGTGNFDYKNVDFRQFKGGAQRARGTEIKQQIRGKNRPNNRNNKQFNKLFTFSNVRKEGKK

SEQ ID NO: 16279 - DNA, 7786 bp, DROSOPHILA
gatggcgatgttgatgttgccgccgttgctgctgctgttgttgttggtaatgacgccgctgctgctgctattgccgatgttgttgtgattaccagcgctgttgttgctgctgctactcgcagccaccgttgttgtcttgcactcagctgtggccgatgtccctgccgccgccgtcgttgtcgccaatgttgctgttgccactgccgtcatcagattgcaggagtcaagtctttgtcatttggagttgctctgcagggccgcattgatctgggtccacagctcctttttgcatgatttcgatctgcaacaggaatcgaccacatagtaaacatacttcaaagtacacatttcaggatctcttaccgcttgatagactgcagccagtccttgaattgcgcgttcccctccggcgtgatctggaaagcggcgcgtgccgccactacaatgctggcaaactcctcatagtcgccctgggtcagatgatacagcttctgatggatgcattggatgtacctgcgacaatggaaaaggtccacattatcttgatatcattcttcgtacaacatcacgatgagtactcacatctgctgacacttctggacgagaggcgtgagcgcagaacgcaggtgctgcatcaccatctggtggttgttcctgcccagatagtgggcggactcaatggccacgtcatgcagcacgaacggactcacgatcgagttgaccgcacagatgcagaactggtgcagatactgggtgcccagtttcttgctgatccgtagcaaccatttcacatcctcgccgtacggcggattgcgggcatacttcgcctgcggccgatcgtcgtgaacgcgtcgcgccagtgtttccatggccagcatgcccacattgtaggcagccagcagatatcgcagctgggtgggtctacataaaagaagaagtaatttaattagtatatgacgcccataagctgaccacaaatgagtctcatggttgggatcactcacgtaaactgatgtggttgtcgttgtcgcacgggtggctgcgagggcggcggttgttgctgctgcggtggctgcggcggcgcctgctgcatgaatgggtaaacgggatgttggtgctgatgctggcgcattggcatcacgcccactccaacgccgactccgacgcccacgcccacgccaggcggaccgttcggaggcggtggtggtggtggaccatagtagccctgaggcggacccatcggcgggcccgggggacccgcttgcattgcctgataggcctgcggcggcagcgcctggaatgctcctggcggtggttgcggctggaagccagagggcggttgacctggatgtccttgctgcccagggtgacctggtggcgcctgcccggccatctgaacctgctgctgttgctgttgcaccacctgctgctgctgcacctgctgttgcacaacctgctgctgttgctgcggattcggcggctgctgtggcggcggctgctggtagccgccgtatgcttgaggtggcggcggcggccctgccgaaatgaacatctgcatctgcccgggcggatagctcatgttgtggtggtgcgcatacaagccctggcagaagctgtacggtggatactgcgccagtccgaggggagccagtgaggcgacgcccacgggttggaattgggcctgtggattctggacagaaccaactacgggtggctgcactgctacgggtagtccggggccggggccaacgccgcctggcaccacggaattgggcatgccaagctgttgttgctgctgcaccacttgctgctgttgctgcaccacctgctgctgctgctgaaccgcctgttgctgctgcactgcctgttgttgttgctggagctcatgctgctgctgggactcaatgagggcgctcagactcacggccgaatggtccatggtgtcatcgtgcggctcgaactcgctgttattcggcgtgttccgcatgtacagctcgtaccagtagcgggccacctggaatagcacctccggatagacgccgccgcccttggcagctgtctccacggtgagacaggcccgctccagcatcagatcgctttgctccttgcactgcagaatcgcacgctggatctcgttgggattgagggcagctgcgtggggcagaacggacagagccagctccgccgccggatagaccatgttgctgtcccatccgcgcgacgcacgatcggccatgccagctgcttcgggaggcgttagatgcgcctcccaagtgtctatcagaaagcttatcgccggcgcaccaatttccatagcttgccccaggatccaggagacgtgcgacgagtacgtcctcgatagccaattgggactcacacagttgtgcagaccgagggcatacagccctagttggaaggcgcacatgtggagggcacggtgcggtccatggtgattttggctcgtgctcgcctgggtgaagagcgatgtggaactattgccgccggccttggtcagcacattcttggccaactcgaacatgaagtgggcactggcttccgatggctggttgggtatcgagggatatgctctctttcccttgtaccggctttccttgcttcggctactggtggagcctccaccaccaccgccaccgcctcctcctcctccgttaccacctccgccatttcctcctccaccgctgccactgggattaccattgggattctggctcccactgaccgtcgtgctgctggaactgggtgttcccgtggttcccgctgcattcgttgtgggcaccatgccttgaacgcctcccgactggctaccactgctggccatgctcagggcacacatgcttagttccagttcggcactcgtggagctgtgtggtcgactgtttccacccacactgccgtagtccgccggcaaaagttcacacaaattggctaccggattgcagttggaagaggcgcatccagagccaccgccataatcgtgatcctccctacgcgtgggctgattacttcgcgtcctcacaggcgggttactcgagtagtaagcgggcaggagtggcgcatttagaagcgtatgtatgtccctgtccagaagcttctccatgatcttggctatcttgcggggctcatccttgtagtgtgaaagcaatgtcagagcaagatccccgcgctgccggcgggttccttcgcacaacaacggatgctctgcctccgacacattggcttttagtccgagagcagccactgcagcatcgaatcccagactctcatcgctgttgtgcttgtagagcagcaaacgtgtgcctgtattgaccatagacttgccggccgcacttgatacaccactagtggatgccacgccagggacaattgtggatccacctaaggggctgagtgtaactagggcatcgaaaataaacgtggccaggttaataggcaatagagcctctcctcgcgtcttaaaggttccgctgcgcagttgctcagctcgctctcggattacttgcagttccgcggatcccagcggcaggcgctttagtagagccagtatgtccgcctcctggttggccagcttgacttccaggggcttggtgcttgctggcggtcgcggcatctccaaggcgaataggcatatccgaaagccaatgtgatagtgttcagagttctccgacagcactgtgcacagaaaagcgcacttggacagcgttgcagaggccacaactgtcagctgatgcgagatgggattcacgttttgcttcttgccctttcttttgggtgcgggtggcagttccagaagtaggttaggcggattcgccagcatctgttcggccagacggacggccaggatgcaagcctcggctccgtgaccgtgggcatgcaaaccctcggctctggccagcagtatatcccaggcgtcctctgtgggccggacattggagaaaacatgcggcttatcgctggaagcagccactgcagctgccagtgctcgggctgcatgcgcggatgaggtgcaaggctggtctgcacccacacccagcactcctaagcctccagcggcgctagctgcgagatgaggtgaagcagaaatcaccggccctgtcgagctggcggccaaggcagcacgggcagctgccgacgtgctgggcaccggcgtcagatctccgccagctgttgatcccgatcccaccgctactgtgtcgccagcacccgatccgcttccactggaggccatagccactcgacctgctgatccacccacgcctccctggttgaactcgtcgctactgctactaaaggattcatccttgctgaggcgacgagttgtttgctgcacagcgccaccaacaccgacagtagcctcctgtccagccataagcatagaggaagtggaactattagagctccctgaagctgtagaagcagatgacgatgaggaggaggccgacgaagtgtcagatgtggaaagggcttgttcaacacccactgccacacccactcccccgactggtggctcatccttgctctgatgcgacactgcatcgaagctgctctgcgaatccgactccgtgagggctgatttctggccaggcacaaccgcctgtccaggtggacagtagttgtgactgctgctggtgtcgccgccgaaatcgtcgttctcgcagaatccctcgctgctggcactcgaacgattgccatctgttgctaccacaaccttggcatttgtcacagaggcaccgactcccgccgagccactgggaagctgctgctgcacgggattcacttcggcggccgctgatcctccaacagagttgttaactcctccgctcatctgacccaagcctcctgcaccagctcctccaacggcaacggagcccagtcccgtggaaaacctaccggatcctccgcccgccaacgctgctcctccgtccagatcggccggattcgtatagaatcgcgactcacgaaaaggccggtccaacctctgcttgaaggctcctgcgtgcatgccatgatcgctggatgaactaaagtaattgtagtgcttgttgttcgacatcagcgcttgggtggcattcagctggccgggattgttagactcgcccttgaggtccgtgtgcttgaagcaagtgaacggcgagtagtagatgggattcgtgtcgtgggtgtgcgtcactcccggtatggggtagccctcccagtccaagtagcacgcctcgatggccggcttgaagccgataaacagctccgtctcggatcgcgagttctgctggtgcttgttggtgtacgacggcatcattcggctcttgaccacccggtcaagaatctttagatgccaggccgtgaactgagcgtgcagcatatctcgctcatccggcgccaggccgggattgagcgctgccaatcgccacagtgccacgatttcgtcgcacagcgaactgcaagcatgctgcagtgccgtggagttggagtgagtgttagaatgcttaccgccggagtggccgtgggaccccatcatcagtgccaacttcgtctggaaccaccagatgagtatctgatcgcagtacaagcactcctccgtgatgatctccagcagacgcactgcgttccgatcacagcgcctgtacatctcgcgtacgatcgaaagtagattccacatgccctccggctcacgtccccgcagcggtcggagtagcgagctccattcggccgccgctgggggagccgagttcgtcagatagtttacgtcgctgtggcgataataaaggccataaattacaaaggagtcaagatagaaggctcaaaaagattactcacctaaacacaatcggggcgggcaaacagaacttgatgaggattcgtttaatgttgttatgcaacgtcttctcgtccagataccagctggtctggtcgttgatcgaggccccagccgtgggatcaggtgcaccgcacacagtgttgatcgccgtgggttgcgcactgagcaactcatccaggagccgctgagccgtcggcaagatctgctgaggcagctcgctgatcagatactgggcaaacttttgcaattggtcgcgttgcaggcgagtcaatgattccgataccggggcacgcagacagacctcctggggctgcaagacaatagaattgaagttgtatgaacatgaacatgattccaaattgtgtgataccactagggagtgttaacaaaagccatttaatacttctgcacacgccatacttacgcaatggatgcgatgcagacaaacggcgactacgtgggagcaccagtaggcggacgaggtgcaggtgcagttgcaagaggagatgcgtcggcggtcaaaggtgacggccacattgaaataggcacgcggcgtctgattgacaacgctggccgagaggtgaaagcctgcaagtggatgggttagagttgttgcgtctagcatttataacctggcgctgaacaaacttacctatctgcagcggatccttgacagctcgcaaccgaaacaacgagtcgccgcgattgaactcgtccgccgagctattggccagacaggagtagagccggatgtcctcctcgttgtccggaaagctccagaacgcaatgcgcagctgcagctgctccggcaccggcggatacacgtgctcaaccagctcgaacggtatgtaggaggccacacagcgggctgccagttcggccaatgtggatacttctggaagaaggcgaacggaatatagaaggcatctggatactggataatgcagtggtaacatcaaattattctgctcagtttatattgattgataatatgccttctatgttctaaaaacattggtaacctgtcttattgtattatattcttcacttgttaaacattcgaaagtgtagcatggatttgagcccaggttaaagcaaccaatggcaaaactatgacgatgttaattaatcgaagaagctgccaaatgactaatgtcatatttctactaccataattaaacacaaacaaagcgcggaaaaaccacatgcatgtcacacagacaccacttacacatgtcgggcattttattaattaaagaactttttctggagccaacggccaatgaccagcgaaagggaggtcaaccacgaggtttttacggggtagaaaccagcacacagcccccaacaggtcaacaaaatgtaaattagattgtctggcaaaataagcgtaatcatattaagtttttgccgcatcagagcacgaataaatattttaggataattcgattagtgcaaggtgataaggattcggattaatcctatatccacatatcaccatccgcaaattatccgcaaattttacgtggttctatcttatatttacattttaaactcaaatctttccttaataatttccaagttatcttggattcaattacaactgtagtcatgaaatcgatgccacattccagatccaataaatgtttacacgaactcgattattgccaaagccaaaaaaaagtggatgtttaggtaattaagtttcttatctccaattctattaaattccccaatgccactatccacaaattggtgcactcatatttccgaacagatatcgcctttataaacatttaggattcagacgatagattatctttcgatctgaaacgtaatacctcttgcaaggcaactgtgtaaataaaccataggttttctgcgatgtggttgtcgtgggaaaacattggaatcatggccacgcaattttcccctgcgtaaaccaatgtcattatc

SEQ ID NO: 16280 - DNA, 5541 bp, DROSOPHILA
atgttaccactgcattatccagtatccagatgccttctatattccgttcgccttcttccagaagtatccacattggccgaactggcagcccgctgtgtggcctcctacataccgttcgagctggttgagcacgtgtatccgccggtgccggagcagctgcagctgcgcattgcgttctggagctttccggacaacgaggaggacatccggctctactcctgtctggccaatagctcggcggacgagttcaatcgcggcgactcgttgtttcggttgcgagctgtcaaggatccgctgcagataggctttcacctctcggccagcgttgtcaatcagacgccgcgtgcctatttcaatgtggccgtcacctttgaccgccgacgcatctcctcttgcaactgcacctgcacctcgtccgcctactggtgctcccacgtagtcgccgtttgtctgcatcgcatccattgcccccaggaggtctgtctgcgtgccccggtatcggaatcattgactcgcctgcaacgcgaccaattgcaaaagtttgcccagtatctgatcagcgagctgcctcagcagatcttgccgacggctcagcggctcctggatgagttgctcagtgcgcaacccacggcgatcaacactgtgtgcggtgcacctgatcccacggctggggcctcgatcaacgaccagaccagctggtatctggacgagaagacgttgcataacaacattaaacgaatcctcatcaagttctgtttgcccgccccgattgtgtttagcgacgtaaactatctgacgaactcggctcccccagcggcggccgaatggagctcgctactccgaccgctgcggggacgtgagccggagggcatgtggaatctactttcgatcgtacgcgagatgtacaggcgctgtgatcggaacgcagtgcgtctgctggagatcatcacggaggagtgcttgtactgcgatcagatactcatctggtggttccagacgaagttggcactgatgatggggtcccacggccactccggcggtaagcattctaacactcactccaactccacggcactgcagcatgcttgcagttcgctgtgcgacgaaatcgtggcactgtggcgattggcagcgctcaatcccggcctggcgccggatgagcgagatatgctgcacgctcagttcacggcctggcatctaaagattcttgaccgggtggtcaagagccgaatgatgccgtcgtacaccaacaagcaccagcagaactcgcgatccgagacggagctgtttatcggcttcaagccggccatcgaggcgtgctacttggactgggagggctaccccataccgggagtgacgcacacccacgacacgaatcccatctactactcgccgttcacttgcttcaagcacacggacctcaagggcgagtctaacaatcccggccagctgaatgccacccaagcgctgatgtcgaacaacaagcactacaattactttagttcatccagcgatcatggcatgcacgcaggagccttcaagcagaggttggaccggccttttcgtgagtcgcgattctatacgaatccggccgatctggacggaggagcagcgttggcgggcggaggatccggtaggttttccacgggactgggctccgttgccgttggaggagctggtgcaggaggcttgggtcagatgagcggaggagttaacaactctgttggaggatcagcggccgccgaagtgaatcccgtgcagcagcagcttcccagtggctcggcgggagtcggtgcctctgtgacaaatgccaaggttgtggtagcaacagatggcaatcgttcgagtgccagcagcgagggattctgcgagaacgacgatttcggcggcgacaccagcagcagtcacaactactgtccacctggacaggcggttgtgcctggccagaaatcagccctcacggagtcggattcgcagagcagcttcgatgcagtgtcgcatcagagcaaggatgagccaccagtcgggggagtgggtgtggcagtgggtgttgaacaagccctttccacatctgacacttcgtcggcctcctcctcatcgtcatctgcttctacagcttcagggagctctaatagttccacttcctctatgcttatggctggacaggaggctactgtcggtgttggtggcgctgtgcagcaaacaactcgtcgcctcagcaaggatgaatcctttagtagcagtagcgacgagttcaaccagggaggcgtgggtggatcagcaggtcgagtggctatggcctccagtggaagcggatcgggtgctggcgacacagtagcggtgggatcgggatcaacagctggcggagatctgacgccggtgcccagcacgtcggcagctgcccgtgctgccttggccgccagctcgacagggccggtgatttctgcttcacctcatctcgcagctagcgccgctggaggcttaggagtgctgggtgtgggtgcagaccagccttgcacctcatccgcgcatgcagcccgagcactggcagctgcagtggctgcttccagcgataagccgcatgttttctccaatgtccggcccacagaggacgcctgggatatactgctggccagagccgagggtttgcatgcccacggtcacggagccgaggcttgcatcctggccgtccgtctggccgaacagatgctggcgaatccgcctaacctacttctggaactgccacccgcacccaaaagaaagggcaagaagcaaaacgtgaatcccatctcgcatcagctgacagttgtggcctctgcaacgctgtccaagtgcgcttttctgtgcacagtgctgtcggagaactctgaacactatcacattggctttcggatatgcctattcgccttggagatgccgcgaccgccagcaagcaccaagcccctggaagtcaagctggccaaccaggaggcggacatactggctctactaaagcgcctgccgctgggatccgcggaactgcaagtaatccgagagcgagctgagcaactgcgcagcggaacctttaagacgcgaggagaggctctattgcctattaacctggccacgtttattttcgatgccctagttacactcagccccttaggtggatccacaattgtccctggcgtggcatccactagtggtgtatcaagtgcggccggcaagtctatggtcaatacaggcacacgtttgctgctctacaagcacaacagcgatgagagtctgggattcgatgctgcagtggctgctctcggactaaaagccaatgtgtcggaggcagagcatccgttgttgtgcgaaggaacccgccggcagcgcggggatcttgctctgacattgctttcacactacaaggatgagccccgcaagatagccaagatcatggagaagcttctggacagggacatacatacgcttctaaatgcgccactcctgcccgcttactactcgagtaacccgcctgtgaggacgcgaagtaatcagcccacgcgtagggaggatcacgattatggcggtggctctggatgcgcctcttccaactgcaatccggtagccaatttgtgtgaacttttgccggcggactacggcagtgtgggtggaaacagtcgaccacacagctccacgagtgccgaactggaactaagcatgtgtgccctgagcatggccagcagtggtagccagtcgggaggcgttcaaggcatggtgcccacaacgaatgcagcgggaaccacgggaacacccagttccagcagcacgacggtcagtgggagccagaatcccaatggtaatcccagtggcagcggtggaggaggaaatggcggaggtggtaacggaggaggaggaggcggtggcggtggtggtggaggctccaccagtagccgaagcaaggaaagccggtacaagggaaagagagcatatccctcgatacccaaccagccatcggaagccagtgcccacttcatgttcgagttggccaagaatgtgctgaccaaggccggcggcaatagttccacatcgctcttcacccaggcgagcacgagccaaaatcaccatggaccgcaccgtgccctccacatgtgcgccttccaactagggctgtatgccctcggtctgcacaactgtgtgagtcccaattggctatcgaggacgtactcgtcgcacgtctcctggatcctggggcaagctatggaaattggtgcgccggcgataagctttctgatagacacttgggaggcgcatctaacgcctcccgaagcagctggcatggccgatcgtgcgtcgcgcggatgggacagcaacatggtctatccggcggcggagctggctctgtccgttctgccccacgcagctgccctcaatcccaacgagatccagcgtgcgattctgcagtgcaaggagcaaagcgatctgatgctggagcgggcctgtctcaccgtggagacagctgccaagggcggcggcgtctatccggaggtgctattccaggtggcccgctactggtacgagctgtacatgcggaacacgccgaataacagcgagttcgagccgcacgatgacaccatggaccattcggccgtgagtctgagcgccctcattgagtcccagcagcagcatgagctccagcaacaacaacaggcagtgcagcagcaacaggcggttcagcagcagcagcaggtggtgcagcaacagcagcaagtggtgcagcagcaacaacagcttggcatgcccaattccgtggtgccaggcggcgttggccccggccccggactacccgtagcagtgcagccacccgtagttggttctgtccagaatccacaggcccaattccaacccgtgggcgtcgcctcactggctcccctcggactggcgcagtatccaccgtacagcttctgccagggcttgtatgcgcaccaccacaacatgagctatccgcccgggcagatgcagatgttcatttcggcagggccgccgccgccacctcaagcatacggcggctaccagcagccgccgccacagcagccgccgaatccgcagcaacagcagcaggttgtgcaacagcaggtgcagcagcagcaggtggtgcaacagcaacagcagcaggttcagatggccgggcaggcgccaccaggtcaccctgggcagcaaggacatccaggtcaaccgccctctggcttccagccgcaaccaccgccaggagcattccaggcgctgccgccgcaggcctatcaggcaatgcaagcgggtcccccgggcccgccgatgggtccgcctcagggctactatggtccaccaccaccaccgcctccgaacggtccgcctggcgtgggcgtgggcgtcggagtcggcgttggagtgggcgtgatgccaatgcgccagcatcagcaccaacatcccgtttacccattcatgcagcaggcgccgccgcagccaccgcagcagcaacaaccgccgccctcgcagccacccgtgcgacaacgacaaccacatcagtttacgtga

SEQ ID NO: 16281 - protein, 1846 aa, DROSOPHILA
MLPLHYPVSRCLLYSVRLLPEVSTLAELAARCVASYIPFELVEHVYPPVPEQLQLRIAFWSFPDNEEDIRLYSCLANSSADEFNRGDSLFRLRAVKDPLQIGFHLSASVVNQTPRAYFNVAVTFDRRRISSCNCTCTSSAYWCSHVVAVCLHRIHCPQEVCLRAPVSESLTRLQRDQLQKFAQYLISELPQQILPTAQRLLDELLSAQPTAINTVCGAPDPTAGASINDQTSWYLDEKTLHNNIKRILIKFCLPAPIVFSDVNYLTNSAPPAAAEWSSLLRPLRGREPEGMWNLLSIVREMYRRCDRNAVRLLEIITEECLYCDQILIWWFQTKLALMMGSHGHSGGKHSNTHSNSTALQHACSSLCDEIVALWRLAALNPGLAPDERDMLHAQFTAWHLKILDRVVKSRMMPSYTNKHQQNSRSETELFIGFKPAIEACYLDWEGYPIPGVTHTHDTNPIYYSPFTCFKHTDLKGESNNPGQLNATQALMSNNKHYNYFSSSSDHGMHAGAFKQRLDRPFRESRFYTNPADLDGGAALAGGGSGRFSTGLGSVAVGGAGAGGLGQMSGGVNNSVGGSAAAEVNPVQQQLPSGSAGVGASVTNAKVVVATDGNRSSASSEGFCENDDFGGDTSSSHNYCPPGQAVVPGQKSALTESDSQSSFDAVSHQSKDEPPVGGVGVAVGVEQALSTSDTSSASSSSSSASTASGSSNSSTSSMLMAGQEATVGVGGAVQQTTRRLSKDESFSSSSDEFNQGGVGGSAGRVAMASSGSGSGAGDTVAVGSGSTAGGDLTPVPSTSAAARAALAASSTGPVISASPHLAASAAGGLGVLGVGADQPCTSSAHAARALAAAVAASSDKPHVFSNVRPTEDAWDILLARAEGLHAHGHGAEACILAVRLAEQMLANPPNLLLELPPAPKRKGKKQNVNPISHQLTVVASATLSKCAFLCTVLSENSEHYHIGFRICLFALEMPRPPASTKPLEVKLANQEADILALLKRLPLGSAELQVIRERAEQLRSGTFKTRGEALLPINLATFIFDALVTLSPLGGSTIVPGVASTSGVSSAAGKSMVNTGTRLLLYKHNSDESLGFDAAVAALGLKANVSEAEHPLLCEGTRRQRGDLALTLLSHYKDEPRKIAKIMEKLLDRDIHTLLNAPLLPAYYSSNPPVRTRSNQPTRREDHDYGGGSGCASSNCNPVANLCELLPADYGSVGGNSRPHSSTSAELELSMCALSMASSGSQSGGVQGMVPTTNAAGTTGTPSSSSTTVSGSQNPNGNPSGSGGGGNGGGGNGGGGGGGGGGGGSTSSRSKESRYKGKRAYPSIPNQPSEASAHFMFELAKNVLTKAGGNSSTSLFTQASTSQNHHGPHRALHMCAFQLGLYALGLHNCVSPNWLSRTYSSHVSWILGQAMEIGAPAISFLIDTWEAHLTPPEAAGMADRASRGWDSNMVYPAAELALSVLPHAAALNPNEIQRAILQCKEQSDLMLERACLTVETAAKGGGVYPEVLFQVARYWYELYMRNTPNNSEFEPHDDTMDHSAVSLSALIESQQQHELQQQQQAVQQQQAVQQQQQVVQQQQQVVQQQQQLGMPNSVVPGGVGPGPGLPVAVQPPVVGSVQNPQAQFQPVGVASLAPLGLAQYPPYSFCQGLYAHHHNMSYPPGQMQMFISAGPPPPPQAYGGYQQPPPQQPPNPQQQQQVVQQQVQQQQVVQQQQQQVQMAGQAPPGHPGQQGHPGQPPSGFQPQPPPGAFQALPPQAYQAMQAGPPGPPMGPPQGYYGPPPPPPPNGPPGVGVGVGVGVGVGVMPMRQHQHQHPVYPFMQQAPPQPPQQQQPPPSQPPVRQRQPHQFT

SEQ ID NO: 16282 - DNA, 2776 bp, DROSOPHILA
ttcctcccacccccaggacgaccaccccgccccgcatcccaccactataatgctaatgccataatatattggcgtgtatcgtttcactatttgcggtttggggtgggtcgtgatttctgggctcgacggttgcttcgtcggccagtggtgcggatttcgcgagtctaggggattcattggtgttaatcgatggtacgaagcaataaaaatagttggaaatatttagtaacttttgaaagaaattaaagtaaaaactttgaaagttaaactatgtttgaaataaattttctatgaaaggaaacataaaaatggtactacattttaattttcatttataattaagcttaagttgtatagaaaaaattaaatttaatttaacaagtcatcatatattatttgattaatttctatttattataatatttattaaagacatttcactattaaagtggtgcttcagttggttttttctagcgccccttttccgtatttccgtaaccctcatttaatgcagctccgctcctgtcggctgacaaatatgctacgaggctaatgttttcattattgcgacacaatcccctcgtcgagcgatcaacaggataaacttgggctagcgattcgcagaacaggggaaaaaaacatgtgttgccagtcacacagccgccgctcctggtccagagggttggatgggtattggcggccaaagaggacatgccatcccagccaaatgtaaggtgtacccggccaggaccaaatcttggcttggtgtttgctagtcctcagtaagtaggccgccatggggttttcatttaaagcattttaattggcaattgctttacaaatggattgcagttaaaattgcgataaaatggttttctcatttgtaacttaatattttagtgcataaatgtgatccatcaccatcgagtttttagcattgcaatacaaagatgaatattattttgagatcaagagttttcttaaagatggttcaaatattttactttcgtcggtagacatagccacctccaccgccatcatcgttgcctcccgtctcgttgtcatcgcatccatggcatccacctccggcggccagcttatccaacgcttcctgaatctcgatgggaatgggtggcggtgtgggcaggtgatcgccctgcggctggaatccgttttcgtccgcaatgtaggtcagtgaaatttcctggccctcgggactggtgtacgaaaaggaaccctccgccgtctgtgcctccgccccttccactccggcgttcttcaagtagcccatctcctccgccttaattccgtttccagtctcgtactcgtactgccatatagattatttaaattataattaaatatttaattatatagcttactcaccatataagaaccatcggtgttgaccttggactccagcttaatgatgggtatatcctcaccaccaccgccgcctgctcctccgcctcccgaagatcctccattgccattgcctggtggcaagtatgcgttactgggcgggggttttccattgccatttttgggtggtggcccatagctgggtttgggtggagcaggcggtggctttccatttcccttcttgggaggaccatagctgttggccggagccggaggagggggtcgaggcggtggagctggtggcttgactggcagataagtggccggaggacgggcactcggatagcccgccggttgggaccgaacgtagccaatggcgatgcaaatcagggaaaacaatgtggtcagcctcatctcgatttcaaatgtggactgctggtcaacggcactctgtggttttatatgagcagccacaggtggttcttcgaccgccaccccaatgaccccagtggagcagtcacgtgccacggcttccgattggaattgaaaacacaatgaaaacgaaaacagaaccaaagaactgggccacagcaagtgcaagtgcagaaatccccagagccatccgattagttgagagactgacaaagcgctaataaattgagtgtgcaatctcgatttccaaatcccgcagccttcaccccttcagctaatcgctaaaaacaacaaaacccgcccggccacaagcaaaaacttttaattcaaaagcaattttcaacaggatcgggcaacacctgcatgcccaactcatctcagctcaaaaaaccgaacccaaccccgcaggatcccttgtctaatgcactttgcctgttgccaaggggtgctaagacctggactcaggactcagcgctcaggaatcaggaccttcgagtacaacaccccactgaaaccgaacggcagggatgtcggctttagtcaatcgtctattaactttttgccagctagtgcacagtggcgctaggttaatataaagtgggaatgattaatgaatgagttatcagaataaaaataaacttaccttaacataactgattaacataaactgacttacttatatttcattgttggatatataatataacataacagacatagcaattttatcttgtaactcaacatattttctaatcaaagttaaaacattttttcttattattcttatttgtctatataagccttaatgcttctcacagctgtaatgccaaattttgtaatttgttattaacaataaatatttctttaatgcttttcaattttttttatcaattatacttttcaaaaatggtaccactgtgctccttgttgcggctgctgatgtgtgtgtttatcatttggtagctcagcttgtgcctgtcgt

SEQ ID NO: 16283 - DNA, 720 bp, DROSOPHILA
atgaggctgaccacattgttttccctgatttgcatcgccattggctacgttcggtcccaaccggcgggctatccgagtgcccgtcctccggccacttatctgccagtcaagccaccagctccaccgcctcgaccccctcctccggctccggccaacagctatggtcctcccaagaagggaaatggaaagccaccgcctgctccacccaaacccagctatgggccaccacccaaaaatggcaatggaaaacccccgcccagtaacgcatacttgccaccaggcaatggcaatggaggatcttcgggaggcggaggagcaggcggcggtggtggtgaggatatacccatcattaagctggagtccaaggtcaacaccgatggttcttatatgtacgagtacgagactggaaacggaattaaggcggaggagatgggctacttgaagaacgccggagtggaaggggcggaggcacagacggcggagggttccttttcgtacaccagtcccgagggccaggaaatttcactgacctacattgcggacgaaaacggattccagccgcagggcgatcacctgcccacaccgccacccattcccatcgagattcaggaagcgttggataagctggccgccggaggtggatgccatggatgcgatgacaacgagacgggaggcaacgatgatggcggtggaggtggctatgtctaccgacgaaagtaa

SEQ ID NO: 16284 - protein, 239 aa, DROSOPHILA
MRLTTLFSLICIAIGYVRSQPAGYPSARPPATYLPVKPPAPPPRPPPPAPANSYGPPKKGNGKPPPAPPKPSYGPPPKNGNGKPPPSNAYLPPGNGNGGSSGGGGAGGGGGEDIPIIKLESKVNTDGSYMYEYETGNGIKAEEMGYLKNAGVEGAEAQTAEGSFSYTSPEGQEISLTYIADENGFQPQGDHLPTPPPIPIEIQEALDKLAAGGGCHGCDDNETGGNDDGGGGGYVYRRK

SEQ ID NO: 16285 - DNA, 2637 bp, DROSOPHILA
tgtgttttggctgaaaaaggaatggaaattgagaaaacgaaatggaaagctctgctgctgttgatttgtgtttttacttgccttcagctgctgccacccataccacccactacccactgccaaccacttcgcctatttctgctgtttctgatgtttcagttgtttttggcgtcttatcaggctattctttgttcagaagaacggagagcagaaaacgagaatgcgaatgcgaatacgaatccgaatgcgaactgtagaccgtaatcgaaaccaaaacactgacgagcattgttttcgattccgattgagcagctggctcattatcaacgccatgtcggtgagaagtcgtcccaagagctgggatatcaatgtagttgactaacaggagggcgagaagataagccatcgggtcaagttccaggattgcaagagtatcgcatagtcatcttgcatttcccatcgaatgcaatgcatggaatcaaggcgttcagttcatatttcaaaatgatgaatcacatttgtagcttaagagtatgatatcactgcctcttgcgccacagtaaaatatatatgtttctttcagtgcaccgaaattaacccactgatatcaacttatcgtaagcacaaagaaagcaatttttgtgctcgagggtcgatcgaattgttggttgttcatccatttctcccctcattttcaacaaagcggaagaagcaatcaaagcaaataaaaggaaataacaataaaaagcctacaaaaagagcggctcgaaagattatatcaaattagattacaaaagaggagaaaattctgaacttgaagcttccgctcagagattgcagatcatttagcagattagtcattttacatgctaactacaactgtaataaaagttatatctcagaaaagcttagttttctttgattactaatattttaagtcaagcttagcttgaagatttcgagctcaaaaaactactgaattaagtgtaaatttatttattttaaattagattacaatggagaggaaaatcaggagtgctcagtgcgctctccccagtatttcgaggttaatttagagggtgactgcctactgaattttagcgggaatctcgacgcagatgatgtccgctccgtcctgatcctgcagctcccacttgaccagcacggacactttggggtaggatctcagcaccggcagggtggccgtgtagcggtacgactcgtccttctccaacgggcacttcagaccactgtccacacaggcatcgggattggccagcgggaagggcatctcgatgcccaggaccttgccgtggacgactgtcttcaccgccgttgcctcctcggccagggcgaagtcgatggagaagctgaccgtggtgttcctcttgaggatgcactccgccttggtggtgtcgcagccctcgatggccacccgggtgaacttgcccgtcttcgatccgcaatcgctgaactcgagggctccggcgaagaccaccagtgcagcacaggcaattaccgcgtacctcagcattttcttccacttaattgaattacaaggtaaacgtatcgggtggcttttccgctggctctcgcctctttctgcctcttcacagcgctacgaatctactaaatctggagagagtccgaagacaacgcaaagctttcgtatgaacggaaaacagctgcgcgcggcgactcagaagaaagctttcttcgacgattgacgggagtgctgcgaactatcgcttgaagggaataaatattatatatattatagcttatataacaattataaaatatagttattttagaaaagtaagtataatgtttcctggcaaccatatattaattaatggggatcgcggagaataaatatttcattgcctacttatgggcatgtgctcgaatactgaagcatattttcaaaattcaagtaattaaacttacaaaatgtaaatttttccaaatattcagtatatgaaagccataaattaaactgattttaaatagtttttattcactcagtcatattttgcacagaagccaagagttcggttagaaaaagtccaaaaggggagcactggcgagctttcgcccccgcgataaatatcgaatgcagaccggcaaaagcttcagctcacgaccttttgcgcttgccgcttttgtctttagtattctcttgaggccggcggcgattggcaacgtttattacagtttctaattgttattaacttaaagcttagtacaaccaccgagtgcatttagcaatgtcgcagatctgtaagcgcggtttgttgatcagcaaccgattggcgcccgccgccctccgctgcaagtgagtaagcgggacggagagagggctcccagcggccagcgtgcgtgctggaaagagacagcaggccgacgaacacgttgcagatgcagcagtgtcatttgccaaggtcattgcagttgccggtcgagctgcagtgacacatttgtgtttgttttccccagcactgcataatttgtttgtccttgcgggctcgttctccagttttagcactatactaaatctgttatacggatttattgttatatcagcacaggggccttttatttaatcatctttcgctctgggcaaatgtaaaacaa

SEQ ID NO: 16286 - DNA, 637 bp, DROSOPHILA
agatttagtagattcgtagcgctgtgaagaggcagaaagaggcgagagccagcggaaaagccacccgatacgtttaccttgtaattcaattaagtggaagaaaatgctgaggtacgcggtaattgcctgtgctgcactggtggtcttcgccggagccctcgagttcagcgattgcggatcgaagacgggcaagttcacccgggtggccatcgagggctgcgacaccaccaaggcggagtgcatcctcaagaggaacaccacggtcagcttctccatcgacttcgccctggccgaggaggcaacggcggtgaagacagtcgtccacggcaaggtcctgggcatcgagatgcccttcccgctggccaatcccgatgcctgtgtggacagtggtctgaagtgcccgttggagaaggacgagtcgtaccgctacacggccaccctgccggtgctgagatcctaccccaaagtgtccgtgctggtcaagtgggagctgcaggatcaggacggagcggacatcatctgcgtcgagattcccgctaaaattcagtaggcagtcaccctctaaattaacctcgaaatactggggagagcgcactgagcactcctgattttcctctccattgtaatctaatttaaa

SEQ ID NO: 16287 - protein, 148 aa, DROSOPHILA
MLRYAVIACAALVVFAGALEFSDCGSKTGKFTRVAIEGCDTTKAECILKRNTTVSFSIDFALAEEATAVKTVVHGKVLGIEMPFPLANPDACVDSGLKCPLEKDESYRYTATLPVLRSYPKVSVLVKWELQDQDGADIICVEIPAKIQ

SEQ ID NO: 16288 - DNA, 2793 bp, DROSOPHILA
ctttcgcttctgacccaccccaaagtccacaactctgcccttttcggttcccctgtgtaagtgggtgtgtgtgtgtttgtgtgtgacattttggcagcagttcaacggaaaaacgtttggcagcacggccagaaaatgataagcctggccagcgagaaagaaaagcgggtggaaacaaccgaggaatcggttcactgagtaaaataaaaattggaaaaagtgtaattgaaatgcaatgcacgagaggagcgaagggttgccatggtggatttcaaggaagcaattcggaagagactttcttcaatgccaccataaggtttcctgccatcaaggctgcgggttaaggtgccacgaaataatcgtaaccatctagttatgttcttagcatttaatttatacagctaagaatataagaaaagaaaaaagaatgtacgctctttaaaggatccttgactaaatgttcagttcttgcatggaatttagtatattctgaatctaagaacgtcatctcatatccttgaccagaggcgtcgtatgaaactggaaattatttctaaattataagtgtcgaatcgagaggcgccaggatggagagaagggcacaagtgtcctggctccataccacggctcacccactcgatcccgcccatcgcccaattatccagcggactacaaggcgacaaggagcagttattcatgaggacaacgcgtcactggggacagcagttggcaacaagcggcggtggcctatggcgatgccactcaatcccattcaatgtcgatgtggcaatggggcgtatgagtgatggctgcttagccaagcgggagccgggtcgccagtaatattggcaccagcgttgtgctatttgtcaatgggcggaaaataagtccgacaccctttacgaaaaaagaacatttatccgctgccttgcgcgtttcaacgagtgggcaaacccaaatggcaggacactgagccaaggagtgattccaaaaggagctgtcagacgctggggggcatgggattgggtacaactctcaccttgttgctgcgaagcgtcaccttgccgccgcaccgggcgcagcagcgtatgttgcagtagtggcagatgtggcccactccatcggcgaacttggtcttaaggcatatgtgacaggtggcatccagctcgacgccggcctttttctgctgctcggatcgctgtctgatttgcatttccagcgtcaccacctcgtcctgtttgcgcctgcaggaggatcaagatgcaaggatgcaattggtattagaaagagatttggatgaggaaaacatgtgcagggcttagcatgtaaggctttaaacaaatttaagatgttacagaatgatataaacaaacaagttcattaagattcatcatcataataagattttgtaaataatgtgtatttaataagcaataagattcagcgttgcgtgctttaatgaaatcatttaagaaaatctaaataatttcagaaccttcgtgattattaatagaaatgaataaatacataaaattgagacagagagactccttttgttcttttaacaaccaaagagcacatgcttgttagttgaaagccatttctgtctcgaaacgaaatgtatctcgagagttggaagatctgaatgtatctgaattcactgtatatggctaccgaactcaccgcatgatctcattctgcttctcctcctcctgcttttgtcgcataaggacattctcgatctgcatccgctcgtggggcgtgaggtgcgacaggtcgggcatttcgtccatggctccggtgtggcgatgtcctttggtggaattgtggttgtggtcgaagtatgttttcgagtaacgttagctggtctaattagtcgcagtgtaataaactttgcttgataatatttatagaaattgttgatttacgttttcgattgagtttaaagcttttcttgggggatttgataaacttttctatggtttggttgcttggaatgcagttttgcagtatttataaatacgttgttattaaatagtactattattattattattatttggattactaaaccatttccgatagaaaatcacagagcaaatttcaaatattatggtttcctttgttattcgtaatgaacgcttgttagttattttactttgtagacttttggaaattcgttgaaaattgttcacaatgcactcttcgtccttctgtgtccgtgtgttgaatgtgttttgtgttttatgcgctccttatgcttgtatttgtgttgcggtctgctcctgtgttgttttttttctttcttccgagtcttttgtgtgtgtctgtgtgcgtgtgtatgccctctgaccccttttcactggcgactttcttattgtgctgcgtttgtttgttggtttgttggtttgtgtcggttccttcctccttccttagacctttgtatttctttggctgaatgcaaatttgagtggaaaactcgtttctggtttttgtttcattttcccaacgctctatatcgttgccgggccttagttgttgtttctaattgctgttgttgttgttgttgctgcagcccgtgtcgagttagtttcgtcctttgttgctgttgctgcccagtgcgttgcagtgccatttttgcgttgagatcgtttcgaattgcaggccactcggttgaaagggagttagtagcccacagctgtttagcactgcaatgaagagaagagaggaagagggaatgagctatatcaattaaagggaattttggtttaacttcctgaaagatttttttaa

SEQ ID NO: 16289 - DNA, 354 bp, DROSOPHILA
atggacgaaatgcccgacctgtcgcacctcacgccccacgagcggatgcagatcgagaatgtccttatgcgacaaaagcaggaggaggagaagcagaatgagatcatgcggcgcaaacaggacgaggtggtgacgctggaaatgcaaatcagacagcgatccgagcagcagaaaaaggccggcgtcgagctggatgccacctgtcacatatgccttaagaccaagttcgccgatggagtgggccacatctgccactactgcaacatacgctgctgcgcccggtgcggcggcaaggtgacgcttcgcagcaacaaggtgagagttgtacccaatcccatgccccccagcgtctga

SEQ ID NO: 16290 - protein, 117 aa, DROSOPHILA
MDEMPDLSHLTPHERMQIENVLMRQKQEEEKQNEIMRRKQDEVVTLEMQIRQRSEQQKKAGVELDATCHICLKTKFADGVGHICHYCNIRCCARCGGKVTLRSNKVRVVPNPMPPSV

SEQ ID NO: 16291 - DNA, 3994 bp, DROSOPHILA
ctttctaattaggataataaatttgccagcatcgcacttgacaacgtcgccggcatctttcaaaacatgaagagcagaaggaagccgagtgtaccaacacaccccctccccctccacagtaggaaatgccaccccctctttgggacagaaaagtccccgaaccatctcgacatcatcaggcaagtgcagctgcttggccaacttcttgatgttttgtggtggctgccaaataggaaaggctctgctcactcggcctttttccgcatttttcccattttaccaattttttcgccaagctgccttcgcttgccttccccgttggaaaatgtgttttcgggtcagctgtgtgcaaccttcctgccttgcactggcatataatttatgctgattgcatttaacggccagtgaaaagcaagtgaaagtatgcggcagcgtccaggagtgcgcacttgtctcgctggcggtggctcttttcgccttttctctctgtaaacaatttatttttactttcgccgcttcctcggcaccttcttgtgcactcgaccaccagccaccacccaccgaccaccgacaaccgcccatcgcctaccagccaccgacagcgcttttccgccacctcttttcagattttcccttccattcgctgcctgttgtcgagcgccgaatcaagtgcccccgagataagcgcaacgaaatgtttccgctacaaaacattcctcaccattcgcctttcgctcttttttgcccaagattttcctcagttttcctcgcttttccaccaaaacggcatgagtgctactgtatgtgtgtgtagtgtgtgtgtgtgtgagtgggcgtgtgctctctatttttatagctcccggcatgcaagttgcgtttctccctttgcggggaaaatgtttggcaaaacttttccagttttagcagcttaaactttcattttggagcaaagcgcacattttgggggtttccttatccagcttaaatcgaacttaaggccttaaattaagcttaacgctaacatataagatgagtttaatagacattgaaaaattaagtatgtacaccgataaacgaaacacagaaatgtgaggcaaacagaagttaaagaatttttgaattggcttggaaaaaacatcgaatattgaatctcaaaaacgagttaaagaaaaagacaacgcaccaatgtgagacaagatatagtgctacattttcgaaagttagcttttaacgatttttttttttttttggatttggatattggattttgtagagcgagcgagtcaaagatagttttacattgagagagagagagagatagtgaattatataggaaaatttaacttggatttggaagttggggcattgccttgcgggatactcagagcggaaagtatggaagcgatagatacgaatatatagatatacagacagggagacagggatcgaaggatagagacattcagagatctcagagggagatagagcagagatagagaagggaggagctggatgcgaattggacaaaacgtctcaactcaccgtcatagtccgatcccgcggtcaccgtcaccgcgccctgggcggccaacagctggtgctggaactcctcctcggagctgctgaatgatctctgttgctgcgaggcgtactgcgatcctgcgagagcgcgcctctgctgctgctgctgttgctggctgtaggcactggagtccatcgcatgaccaccgctgatggtcaggttgcgagtcagaggtggtggcttctggtagccgcccatctgcggcactgactggccatgctgatgttgcatctgctgatggtgctgctgctgctgcgagtggggatgcggatgttgctgcggctgctggtggatctgggcgtggtacgattgctgcacctgctgctgatgctgttgctgctgatgctgctgctgcctggccgcaaattgctgcgagtgttgttgctgctgctgctgctgctgggaatgttgctgcggcgatgggcgatgttgttgcggcataagatgttgctgctggtgctgagattgctgctgttgcgaatgcgactgcggcgtatgctgcggctgtacctgactgggatgcgccaagtggggatgctgcctcatcaggccatcgagttcaccctgtaataaaacaattttacgtgttaataccatagtgaattatactaatatcctctgtctgtatgatttagtgagtttattttcggagcactcacctgatagtatctggggtcatcatcgggataggcgccacctgatctgggctgttgctgctgctgcatgccgtatccctgctgtgcctgctgcggattcatcggctgcatccgagctcgctgctgctgctgatggtgctgcatctgctggccaggactcataacgggatccattccactgtcggacgcggagaggcgacgattcgtgggctgctcctgctgcgagtactgacgcctcagcatgctgcccgcccgctgcatcggtaggttctccttctcggcggcactccgcgtcctctccagcttaggccgcttatccgtggtgtcgtgcggatccacgatgggatgctgcgagatgtcctgtcggatacaataaaaccttcaagtaggaaacttgtccatggcgggcacatctactcacgctgctcccatccggctcgatgcgtcggatgaaaccatcttgttgtgccgccgtcttgttgatccactggccagtcttggagagcagctcctgcttcttgcgacacagtatgcacacccaaatgacctggaatgtgggaaggacattagaattacattaaggcacaattaagaagcatgatgtctttgtatcatattaaaaatttaaggccatgtacagggaggacaactaatattcttgaatttatttatatctaaaaattatagccgagatgaaagggaaacattgaacttcacatgaaattcctttttttaacgtaccattttctgatacatcttaaagtttaggtcaatctagtctacccaggtgcttcaatcatttgaacacacatacacaactccagcactctccggggaatttacacgtgcacttgcaacgctttcaaatttgcgaccaggctttgccatggacgagttactaaatctgggtctcaacggcatacagtttgaactggaggaatctgcggcggatagcgacgaggacagtgaaggaggaggagcactgggcggttctgataccacattgctgtactattttagaagattgtaccatgttctcagtgggaatatcttcatgaccacctacgtggagcgcgggcagagagaatactttgcaggattcagcaacgtggaattggtggctccgttccagggtgaacgacagagccagcggtaccgctggatccacctgtcgctcatcttccgcgccttcagatccaagacagagtcctggtgaagataccccaccgtgtcacagccaaattgaaattccatttggcatttgttccgagttgttggcccatctagtttcattttgcgtcctggctttcgcttctgacccaccccaaagtccacaactctgcccttttcggttcccctgtgtaagtgggtgtgtgtgtgtttgtgtgtgacattttggcagcagttcaacggaaaaacgtttggcagcacggccagaaaatgataagcctggccagcgagaaagaaaagcgggtggaaacaaccgaggaatcggttcactgagtaaaataaaaattggaaaaagtgtaattgaaatgcaatgcacgagaggagcgaagggttgccatggtggatttcaaggaagcaattcggaagagactttcttcaatgccaccataaggtttcctgccatcaaggctgcgggttaaggtgccacgaaataatcgtaaccatctagttatgttcttagcatttaatttatacagctaagaatataagaaaagaaaaaagaatgtacgctctttaaaggatcctt

SEQ ID NO: 16292 - DNA, 1119 bp, DROSOPHILA
atgtatcagaaaatggtcatttgggtgtgcatactgtgtcgcaagaagcaggagctgctctccaagactggccagtggatcaacaagacggcggcacaacaagatggtttcatccgacgcatcgagccggatgggagcagcgacatctcgcagcatcccatcgtggatccgcacgacaccacggataagcggcctaagctggagaggacgcggagtgccgccgagaaggagaacctaccgatgcagcgggcgggcagcatgctgaggcgtcagtactcgcagcaggagcagcccacgaatcgtcgcctctccgcgtccgacagtggaatggatcccgttatgagtcctggccagcagatgcagcaccatcagcagcagcagcgagctcggatgcagccgatgaatccgcagcaggcacagcagggatacggcatgcagcagcagcaacagcccagatcaggtggcgcctatcccgatgatgaccccagatactatcagggtgaactcgatggcctgatgaggcagcatccccacttggcgcatcccagtcaggtacagccgcagcatacgccgcagtcgcattcgcaacagcagcaatctcagcaccagcagcaacatcttatgccgcaacaacatcgcccatcgccgcagcaacattcccagcagcagcagcagcagcaacaacactcgcagcaatttgcggccaggcagcagcagcatcagcagcaacagcatcagcagcaggtgcagcaatcgtaccacgcccagatccaccagcagccgcagcaacatccgcatccccactcgcagcagcagcagcaccatcagcagatgcaacatcagcatggccagtcagtgccgcagatgggcggctaccagaagccaccacctctgactcgcaacctgaccatcagcggtggtcatgcgatggactccagtgcctacagccagcaacagcagcagcagcagaggcgcgctctcgcaggatcgcagtacgcctcgcagcaacagagatcattcagcagctccgaggaggagttccagcaccagctgttggccgcccagggcgcggtgacggtgaccgcgggatcggactatgacgcgttaagcttaatttaa

SEQ ID NO: 16293 - protein, 368 aa, DROSOPHILA
MVIWVCILCRKKQELLSKTGQWINKTAAQQDGFIRRIEPDGSSDISQHPIVDPHDTTDKRPKLERTRSAAEKENLPMQRAGSMLRRQYSQQEQPTNRRLSASDSGMDPVMSPGQQMQHHQQQQRARMQPMNPQQAQQGYGMQQQQQPRSGGAYPDDDPRYYQGELDGLMRQHPHLAHPSQVQPQHTPQSHSQQQQSQHQQQHLMPQQHRPSPQQHSQQQQQQQQHSQQFAARQQQHQQQQHQQQVQQSYHAQIHQQPQQHPHPHSQQQQHHQQMQHQHGQSVPQMGGYQKPPPLTRNLTISGGHAMDSSAYSQQQQQQQRRALAGSQYASQQQRSFSSSEEEFQHQLLAAQGAVTVTAGSDYDALSLI

SEQ ID NO: 16294 - DNA, 2557 bp, DROSOPHILA
gtctaataaatcgaagatattttttcacaaatgaagtccgacgtctcttgatatattgtcaagcttcttaaaactcgggtttgcaatatttaaatttgcaaattatcaacatctggataagtttctacgtttacggtagccaaacctttccgaaataaaactagttttataccccttaatcgtacagtaatagggtatgctaggcttattagaatgtatgaaacagatagaaggagcattttcaatctatattgcattcagattttagggacgttgcacttttgaaaaatgcttttgatatttttttgtttaattaccattttttcctatctattgatgtgccaaatgaactagttgagtaacgggtatcagatagtcgaggaactcggctatagcgttttttctagtttttaattctagctaaattatctacatattattatcatagttaatttttgcactaatcaaagcacacagtctgcatatcaatgatgttttcgaaatgtctgttcttttctgttgctctagaaagtggaacacacattataattataatttgtaaatctaaagagtaaaatatttttctttgtttattccaaaaagactacaaacatttttacaaaatacgctttcaatgtatgaattgtaattttatcagcctagaacaattttgcgactgaatcatttcatttatattttcataatagaaatgcataaattcgaaataaaatattatcaaaatattcttgacaaagcattcccctggaaaaaaaaatgtaattggatgtgtgcaaaaatgcacatgttctttttatgcacattcaatttagtggatctatacttaaaaaggattctgtgttagttttccttgtttgcatggacctcattactgtgatgacatgcctttcaagaattacaaatgttcatagttttgtgttttttatttttatttttataaatattaaaaatctactcagtgaataaattcggatctgttggcttatttgcggaatgcgttggcgacggcattggcgttagcattagcactgccacctcgggtgttggcattggcattggcgtttgcattggcattaccaccgccaaatcctccgtcagagttggcgacagcattggcattggcgttagcttcggagttaccaccgaatcctcctggtcctcctggtcctccgaatcctcctggtcctccgaatccaccctgtcctccgaatccaccctgtcctccgaatccaccctgtccgccgaatccaccttgtccttcaaagccacctggtcctccgaatccaccttgtcctggccctccgaatccaccctgtcctccgaatccagggcctcgttccccgaatcctcctccgaatccgccttccttctggaaaccaggtccgctgaatcctggtcttccaccgccctcactctcagcatttgcgttggcatttgcgttagcattgccattattaaactgcggggcggcactggacacggccaggattacggcgagaacgacaaagaccttcatggtgatctgcttgatcggagtgactgaacaaacttaatggccaatgccccagggcctggtttttatagtggccagacggcaggcagacgcaaacaaacaaaaaaaaataaaaaaaaaaaacaataatctaatctagcctccgctttcggataaaaattagcatgcaaacaatagtcactgccgaaaaataatttcaatattatcggagatcacagatagattcccccgatctggacagcgctccagagtgggacggatagcgagtgaaagagtcagatagtgctctgatcgaatgcaatggtttaaggaaagtttgcaaatgtctttagaccaacacgagccgtgttcgtggtggtttactaaggaaccggtttgatgatatcaatatttaaacgattattgatatttgtgtttatatttcattaagccagtatatttcttactttcggcactatcatcgcatcgctttcagacggaaacgacatagaagcagttaattgtcagggaattctctttattagctattagctattaacactagaatgtgttatatgtttgttttttttttttttatcagcatagatatagaagcaaagtggttcctgaaatctaaatctaccttaatatagaagcgttattacatgatcattgtgaaaagaaccgtttcagaatccttagcggtattagtccaatgataatcaaattggaatcaacaaatttggcaagcttaaaaacattaccctaatatatttaaatattttcggtcgcttactaccaatatattcttacaaagtcgcacatgtggttttaattaacacttttctatgagtttccttgttctgctataaatccaaaattattccatatttggaagcaaacccacatctggttcttatcaatatttttgtaatttaccggcaaccgttcaagcccctataaaatttacatattttttagcgatgaatatatgtatgtttgtattcaacttcatttacgcgaaataaaaatgataatttaaactgc

SEQ ID NO: 16295 - DNA, 557 bp, DROSOPHILA
tcactccgatcaagcagatcaccatgaaggtctttgtcgttctcgccgtaatcctggccgtgtccagtgccgccccgcagtttaataatggcaatgctaacgcaaatgccaacgcaaatgctgagagtgagggcggtggaagaccaggattcagcggacctggtttccagaaggaaggcggattcggaggaggattcggggaacgaggccctggattcggaggacagggtggattcggagggccaggacaaggtggattcggaggaccaggtggctttgaaggacaaggtggattcggcggacagggtggattcggaggacagggtggattcggaggacagggtggattcggaggaccaggaggattcggaggaccaggaggaccaggaggattcggtggtaactccgaagctaacgccaatgccaatgctgtcgccaactctgacggaggatttggcggtggtaatgccaatgcaaacgccaatgccaatgccaacacccgaggtggcagtgctaatgctaacgccaatgccgtcgccaacgcattccgcaaataa

SEQ ID NO: 16296 - protein, 177 aa, DROSOPHILA
MKVFVVLAVILAVSSAAPQFNNGNANANANANAESEGGGRPGFSGPGFQKEGGFGGGFGERGPGFGGQGGFGGPGQGGFGGPGGFEGQGGFGGQGGFGGQGGFGGQGGFGGPGGFGGPGGPGGFGGNSEANANANAVANSDGGFGGGNANANANANANTRGGSANANANAVANAFRK

SEQ ID NO: 16297 - DNA, 4043 bp, DROSOPHILA
attaccaccgccaaatcctccgtcagagttggcgacagcattggcattggcgttagcttcggagttaccaccgaatcctcctggtcctcctggtcctccgaatcctcctggtcctccgaatccaccctgtcctccgaatccaccctgtcctccgaatccaccctgtccgccgaatccaccttgtccttcaaagccacctggtcctccgaatccaccttgtcctggccctccgaatccaccctgtcctccgaatccagggcctcgttccccgaatcctcctccgaatccgccttccttctggaaaccaggtccgctgaatcctggtcttccaccgccctcactctcagcatttgcgttggcatttgcgttagcattgccattattaaactgcggggcggcactggacacggccaggattacggcgagaacgacaaagaccttcatggtgatctgcttgatcggagtgactgaacaaacttaatggccaatgccccagggcctggtttttatagtggccagacggcaggcagacgcaaacaaacaaaaaaaaataaaaaaaaaaaacaataatctaatctagcctccgctttcggataaaaattagcatgcaaacaatagtcactgccgaaaaataatttcaatattatcggagatcacagatagattcccccgatctggacagcgctccagagtgggacggatagcgagtgaaagagtcagatagtgctctgatcgaatgcaatggtttaaggaaagtttgcaaatgtctttagaccaacacgagccgtgttcgtggtggtttactaaggaaccggtttgatgatatcaatatttaaacgattattgatatttgtgtttatatttcattaagccagtatatttcttactttcggcactatcatcgcatcgctttcagacggaaacgacatagaagcagttaattgtcagggaattctctttattagctattagctattaacactagaatgtgttatatgtttgttttttttttttttatcagcatagatatagaagcaaagtggttcctgaaatctaaatctaccttaatatagaagcgttattacatgatcattgtgaaaagaaccgtttcagaatccttagcggtattagtccaatgataatcaaattggaatcaacaaatttggcaagcttaaaaacattaccctaatatatttaaatattttcggtcgcttactaccaatatattcttacaaagtcgcacatgtggttttaattaacacttttctatgagtttccttgttctgctataaatccaaaattattccatatttggaagcaaacccacatctggttcttatcaatatttttgtaatttaccggcaaccgttcaagcccctataaaatttacatattttttagcgatgaatatatgtatgtttgtattcaacttcatttacgcgaaataaaaatgataatttaaactgcggacgtgcggatagtcgagtcagatctaacaagaaaggaagctcagccgaagcttatatacccttctactacgtgtatttatttgtttatctatataaatttaaatatgtacatatatatttaaaaaatacggatgcttaccgagttacaacattgaaactatgatttcttttttattattttcgaataattttccaaggcagttgtggtcgttcgatttttactaagcaaaatacaaagttattgtactcaaatacgaatttacaccgaataagagtgttttttatgatcaagcgaaaaattgtttgccgatccggttcgttccgagttatatgctaccctatattagaaaaaagcttttggggaagattcatgcagatagcttcaaacctaaggggctcatttgcataaaaacaaacagaatgatcaagaatttaaacatgtatatacttcttttggtcgcaaatgtgtctggcaaacttctggatataatcgagatgccctctgaaagcgtataaaaagtcaaccagtgttttgtcaatttccaatgcctgacaaaagcttcttgctatatatttgaaccaagattttataactctcttgtactactgattcataaaataatatcaaatttttccagttcttaagaactgtgttttaaaatgtattaatgttagattagattttcattatttgtgtcttaaaattaaattggttttcgtaaacttaaaatataattcaaagattttagcaatgatcttttgtataagcacgcctacaagagccaaaaatataacatctcctttcaataaatgcgtttaaaatttgtcgttagttttctagcaaatagttcaactttttttatttctcactccgcgtctattcgactattgctactgttgaatttttagcttaacacgtttacctataatatgtttacaaataactccttaatgataaaaatgattgaatgacaaatacttgtatataattttaatttatttaggttttattcacagtcatttcttatcgcttaactccaaataccagtatagtttggatcggtctaaccgtacagtccacctccggaggcattggcggatgacgatgcagaagcggatccagcgccaccacgtccgccaccactagccgatgccgaggaagaggctgaggccgcagatgagccaccgactgcaggacgtccaccaccgaatcctgagccaccaccaaatccaggacctccaccaaatccaccgccgaatcctgggccaccgccgaatcctgggcgaccgccgaaaccttggccaccgccgaaacctgggccaccgccgaatcctgggccaccgccaaagcctgggcgaccgccgaaacctgggccaccgccgaaacctgggccaccgccaaaccctgggccaccgccgaatccaggacgacctccaaggccgccctgggcattggcattagcattcgcgttggcgttggcgtttccgccgaattgaggcagggccgatgccacagccaccagaacagagagcgcgatgaaaagtttcatgttgagttgttgcttcctcgaaggtgatccaaacacttgtccaatgcaccgccggacccggcttttattccgttgcccgttggcgaatagattcgttgactgctcggtgatctaccctggagctcactctcctaagcggcaaaagtagatagaaatgagaaaaagagaaaaaacagaacaaattatcaatatttatggctcaactcattagcaagttcggagcgtacgaccgtcggaccctacacacaataaacccggtctgctcgatctcccgctgcaaccggttagtcccaatctcggtagcacctgagacgcgccccctaatctatacatccactggagaggcagcataacgatgggcttgataccagtgatgtcatggaccgagtagttaatggagcttaatggagggtgacgaaaaatacatcttatcgaggggggccaatattgaaaatcagcgcaggtagatttcgaacaaggggaattctagtcagatgatccgaaatagatgtcgcattaaatgctagtcaaaatctatatatttatcctcggaacatagaaaaatgtaattacttattgtttagccatttaaaaatatgtaaataataatattaagcagtaaacgtaaaacagtttaccatagatattatagatattagatagaggtagatcttattagcggtaactggttagatattagtacagtcatcaaattaaattaataaataaaaataatgaactagttctctttgagcatctctgtgccgctattaattaagtatcacaaacatatcaaaaacagttgactgattttactgttcgccataataaatgcaaattttttgttgcctttctgccacctgtttagctttaaactttttcgcgtcgcgcagatttttaattgtttgtttatttaagccttttaaagccgaatataattgaaaacgttataaaaacgtgtatttggctaaattctaaacgttaattattcaaattaatacacgagagtcatcatcatgtcagg

SEQ ID NO: 16298 - DNA, 603 bp, DROSOPHILA
ccttcgaggaagcaacaactcaacatgaaacttttcatcgcgctctctgttctggtggctgtggcatcggccctgcctcaattcggcggaaacgccaacgccaacgcgaatgctaatgccaatgcccagggcggccttggaggtcgtcctggattcggcggtggcccagggtttggcggtggcccaggtttcggcggtggcccaggtttcggcggtcgcccaggctttggcggtggcccaggattcggcggtggcccaggtttcggcggtggccaaggtttcggcggtcgcccaggattcggcggtggcccaggattcggcggtggatttggtggaggtcctggatttggtggtggctcaggattcggtggtggacgtcctgcagtcggtggctcatctgcggcctcagcctcttcctcggcatcggctagtggtggcggacgtggtggcgctggatccgcttctgcatcgtcatccgccaatgcctccggaggtggactgtacggttagaccgatccaaactatactggtatttggagttaagcgataagaaatgactgtgaataaaacctaaataaattaaaattaaaaaaaaaaaaaaca

SEQ ID NO: 16299 - protein, 142 aa, DROSOPHILA
MPRAALEVVLDSAVAQGLAVAQVSAVAQVSAVAQALAVAQDSAVAQVSAVAKVSAVAQDSAVAQDSAVDLVEVLDLVVAQDSVVDVLQSVAHLRPQPLPRHRLVVADVVALDPLLHRHPPMPPEVDCTVRPIQTILVFGVKR

SEQ ID NO: 16300 - DNA, 4678 bp, DROSOPHILA
gtctggagttcaaagctcttctatacaactccgtcttaaaacctatctggacttatggctccgagctgtggggcaacgcatccagaagtaacatagccattattcagcgagcccagtcaagaattctgagaattatcactggagcgccgtggtaccttcgaaacgaaaacatacccagagacctaaaaatcaaattagtaatcgaagtaatagctgagaaaaaaacgaagtataacgaaaagctgaccacccatacaaatcccctcgcaagaaaactaatccgagtatgcagtcaaagccggctgcaccgcaacgacctcccagcccagcaataaacttattagggcattaatgaaaaaaaaaaactatcactaagtgaaagttaattaagttagattaagatttgaacacttattgttagtctcttaacacaaagggaagattcaataaataataaaaaattaataaaaaaaaaaaaaaaaaaaaaccaaaactaaaaacattcaataggcaaacaaatatttaaattgatcgatctatttgcatattgctgcaattggaaatgcaatatttgagaaaattttctatttttacgtttgattgaagatgaaacgtgccgaacaaggtgatcagatcagatcagccatgtggaaacaaatgccccaataaatcataattgcaagtaaaatcgatttattttcgatgctttaccacttaaagagcttactctaaaaatgcttttatttattgctcaaaaaaaaaatccgtagatgctcatgaggaagaaatcgaagaaatctatttttatttcaagcaatgcgaccctcagtgacctcagtaaattgaatttcattcattaaatactttattctccctttcaaaaaagcaaactgttaccaaaaaaaaaaaactaaaagtcatttttatgaaaagtattgttttctaatctgatctaattaaccagtgagcccccattttcactttcatccataactttttaactttgcaactttttattttgttaccctgcgctgaaagtattttttctttatttagttttcatatattatttaaattttctgttggttctagtggtgcgttggtgtcacttttattgtccactacgaaaattaattggcttggcattgatctttttgccattgtggcacaagtttgttatgtttatggctaaaggcgattagtcaatttgatgctgcagctttggggaatacaactagcagcacatttgccgtatgagatcatcggctgccacagggaaaaaatcaacgcaaaaatatctcttgaaattgggaactaattgatgacagattttattcagaccctgccgaaaatacttattacttgtattactcacaaagatgaaatacttggactaactcaagttttgatttcaaccaacagatggcgccagctcagcagtattgggcgttttgaaggtcgatctgtgcctggaggacaaccatgaggagcaccatacgagtcacttctatgcggcagctgccaaggaagcgttggtcgtgcgacgaggagaacccttccggctgaagatccacttcaatcgagactacagtcccagcaaggatgccatcagtttcattttcacagtagcggatgacaccaagccgagtcccggtcatggaacactcaatgccctggtgccgcacgatggcatcgattatctgggcgacactttggaatggggagccggcatcgaatcgcatgagggtcaaacgcttacggtgctaatcaagccaccatccacctgtcccgtaacggaatggaaactggacatcgacacgaagctgctgggcgatggatcgcgaagctatcccctgccgttgcccatctatgtactctttaatccctggtgtccggatgatcaggtgtatctggaggatcgtgatcagcgcaaggagtacgtgatgcacgataccacgctcatctggaggggatcgtacaacagattgcgtccatcggtttggaaaatcgggcaattcgaacgacatgtgctcgagtgcagcctaaaggtattgggtacggtgggcaggattccgccagcctacagaggcgatcccgtgagagttgctcgcgccttgtccgcactggtgaattcggtggatgatgacggtgttttgctgggcaactggtcagaggacttctccggcggcgtggcacccaccaagtggactgggtccgtggagattcttcagcaattctacaagacccagaagtcggtgaagtttgcacagtgctggaatttcagcggtgttctgaccaccattgccaggagtctgggaataccgtctaggatcatcacttgctactcctccgcccacgatacacaggcctcactcaccgtggacgtgttcatcgacgcgaacaacaagaagttggatgcagagaccacggactcgatctggaactatcacgtgtggaatgagctctggatgcagagaccggatttgggcgtgggtgagcacgggaccttcgatggctggcaggtggtggacgccactccgcaggaggcctccgataatatgtatcgcgtgggacccgcctccgttgcggcggtgaaaaacggtgacatcttgcgaccattcgatggtggtttcgtcttcgcggaggtgaatgcggataagctctattggcgctacaatggacccagccagccgcttaagctgctcaggaaggatacgctggccatagggcatctcatcagcacgaaagcggtactcaaatgggaaagggaggacatcaccgatacgtataagcatgccgagcgctccgaggaggagagaagcaccatgctcaaggccctcaagcaatcccgacatgcgttcagtagatactatctgaatgataatttcaatgatattgaatttgatatggagctaaaggacgacattaagattgggcagagcttcagtgtggtcctgaaggtgagcaacaagagcgagagtcgcacacacatggccacgggtcagatcagttgcgatgccgtgctctacacgggagtgggtgccgtggaggtgaagacactgggctttgaactggaattggagcccaagagcagcgattacgttcgcatggaggtgatcttcgaggaatactacgataagttgtcctcgcaggcggcattccagatctcggcggccgccaaggtcaaggacaccgactatgattactatgcccaggatgatttccgtgtgcgcaagccggacattaagttccagctgggtgaggctgccattgtggcccagaaggagctggacgttattctgcgactggagaacccgctgcccataccgctgcacaagggtgtgttcacagtggagggtcctggcatcgagcagcctctcaagttcaaggtgagttcagattaagtccttcaaggattttcaactaactaacataacattaaaatttttacagatcgctgaaattccagtgggtggcactgcggcggctaccttcaagtacactccgccctacgcggggcgtggcaccatgttagccaaattcacgtccaaggaactggacgatgtggatggctataggcactacgagattgagccacgaccggaggatctgctgcagccgaatggaagccaccgaagcagcaacatcatacgcaggcgcaccgatgtaatagcttaggctatttcttttgtatttcgtagttcataagttatttgttgtaaataatactattaatacgtaaacattttttatataaaaaaaattcaaaagattctgcgtgatatttttccacggcttctaaacaaactcactgattttatagcatgtgcaatgcacggtttattttatgggatatattataatattgttttgtaataaacataaactattagtatgctgtaagagaagtcggctcaattactccataaatcatcgatacccaaggcgtagctcggtttgttggccgtcttcacaaagaatattccgcgagcttctcgaggaactggatcacccattaggatcttgccgccggtgcaattttttcccttgagttcatccagtccagagcagggaacaccgtaaaatcctttgggcgagttaatagactccgcgtaatattcatatgaacgtccatgactgcaaccagctgaaaatgaaaaagaaatttcccaattctgcttgtaagaaattgaaaccaattcccaaaacttactgaaaatctgcgacagctccttgcagcctggttgcggtggtccaccgccattgggatagaaatccaccatgccgatgggtttgcgaaagcccaggtatccggcacagctgtgtatgacatccacaaagttggcgtccgtgtcgtccaagtgattctccggaccaatgcaatcctcgaaagcgggacgagctggatccaagccagtgatgcggtttaccctgtacttagtgtacgaaccagcatagcccatgatgtgcgcgcccagactgtggccaatcagatggatcctattcggatccgcatccttctcctccaccagcagatcaattagcttggccaccgcccgtcccacctgaaccgtatatcgcgccggtgttagatagtatatattatccgcctgatccttccagttgatggcgaacacgttcacctggccacgttcgatataggcaccacgaatcgatt

SEQ ID NO: 16301 - DNA, 2211 bp, DROSOPHILA
atgaaacgtgccgaacaagatggcgccagctcagcagtattgggcgttttgaaggtcgatctgtgcctggaggacaaccatgaggagcaccatacgagtcacttctatgcggcagctgccaaggaagcgttggtcgtgcgacgaggagaacccttccggctgaagatccacttcaatcgagactacagtcccagcaaggatgccatcagtttcattttcacagtagcggatgacaccaagccgagtcccggtcatggaacactcaatgccctggtgccgcacgatggcatcgattatctgggcgacactttggaatggggagccggcatcgaatcgcatgagggtcaaacgcttacggtgctaatcaagccaccatccacctgtcccgtaacggaatggaaactggacatcgacacgaagctgctgggcgatggatcgcgaagctatcccctgccgttgcccatctatgtactctttaatccctggtgtccggatgatcaggtgtatctggaggatcgtgatcagcgcaaggagtacgtgatgcacgataccacgctcatctggaggggatcgtacaacagattgcgtccatcggtttggaaaatcgggcaattcgaacgacatgtgctcgagtgcagcctaaaggtattgggtacggtgggcaggattccgccagcctacagaggcgatcccgtgagagttgctcgcgccttgtccgcactggtgaattcggtggatgatgacggtgttttgctgggcaactggtcagaggacttctccggcggcgtggcacccaccaagtggactgggtccgtggagattcttcagcaattctacaagacccagaagtcggtgaagtttgcacagtgctggaatttcagcggtgttctgaccaccattgccaggagtctgggaataccgtctaggatcatcacttgctactcctccgcccacgatacacaggcctcactcaccgtggacgtgttcatcgacgcgaacaacaagaagttggatgcagagaccacggactcgatctggaactatcacgtgtggaatgagctctggatgcagagaccggatttgggcgtgggtgagcacgggaccttcgatggctggcaggtggtggacgccactccgcaggaggcctccgataatatgtatcgcgtgggacccgcctccgttgcggcggtgaaaaacggtgacatcttgcgaccattcgatggtggtttcgtcttcgcggaggtgaatgcggataagctctattggcgctacaatggacccagccagccgcttaagctgctcaggaaggatacgctggccatagggcatctcatcagcacgaaagcggtactcaaatgggaaagggaggacatcaccgatacgtataagcatgccgagcgctccgaggaggagagaagcaccatgctcaaggccctcaagcaatcccgacatgcgttcagtagatactatctgaatgataatttcaatgatattgaatttgatatggagctaaaggacgacattaagattgggcagagcttcagtgtggtcctgaaggtgagcaacaagagcgagagtcgcacacacatggccacgggtcagatcagttgcgatgccgtgctctacacgggagtgggtgccgtggaggtgaagacactgggctttgaactggaattggagcccaagagcagcgattacgttcgcatggaggtgatcttcgaggaatactacgataagttgtcctcgcaggcggcattccagatctcggcggccgccaaggtcaaggacaccgactatgattactatgcccaggatgatttccgtgtgcgcaagccggacattaagttccagctgggtgaggctgccattgtggcccagaaggagctggacgttattctgcgactggagaacccgctgcccataccgctgcacaagggtgtgttcacagtggagggtcctggcatcgagcagcctctcaagttcaagatcgctgaaattccagtgggtggcactgcggcggctaccttcaagtacactccgccctacgcggggcgtggcaccatgttagccaaattcacgtccaaggaactggacgatgtggatggctataggcactacgagattgagccacgaccggaggatctgctgcagccgaatggaagccaccgaagcagcaacatcatacgcaggcgcaccgatgtaatagcttag

SEQ ID NO: 16302 - protein, 736 aa, DROSOPHILA
MKRAEQDGASSAVLGVLKVDLCLEDNHEEHHTSHFYAAAAKEALVVRRGEPFRLKIHFNRDYSPSKDAISFIFTVADDTKPSPGHGTLNALVPHDGIDYLGDTLEWGAGIESHEGQTLTVLIKPPSTCPVTEWKLDIDTKLLGDGSRSYPLPLPIYVLFNPWCPDDQVYLEDRDQRKEYVMHDTTLIWRGSYNRLRPSVWKIGQFERHVLECSLKVLGTVGRIPPAYRGDPVRVARALSALVNSVDDDGVLLGNWSEDFSGGVAPTKWTGSVEILQQFYKTQKSVKFAQCWNFSGVLTTIARSLGIPSRIITCYSSAHDTQASLTVDVFIDANNKKLDAETTDSIWNYHVWNELWMQRPDLGVGEHGTFDGWQVVDATPQEASDNMYRVGPASVAAVKNGDILRPFDGGFVFAEVNADKLYWRYNGPSQPLKLLRKDTLAIGHLISTKAVLKWEREDITDTYKHAERSEEERSTMLKALKQSRHAFSRYYLNDNFNDIEFDMELKDDIKIGQSFSVVLKVSNKSESRTHMATGQISCDAVLYTGVGAVEVKTLGFELELEPKSSDYVRMEVIFEEYYDKLSSQAAFQISAAAKVKDTDYDYYAQDDFRVRKPDIKFQLGEAAIVAQKELDVILRLENPLPIPLHKGVFTVEGPGIEQPLKFKIAEIPVGGTAAATFKYTPPYAGRGTMLAKFTSKELDDVDGYRHYEIEPRPEDLLQPNGSHRSSNIIRRRTDVIA

SEQ ID NO: 16303 - DNA, 2951 bp, DROSOPHILA
cacacacgcatccagtggcggccaattccacccagcatgctgcagcattcgccacttggcacgggcgtatattgaatttgtatttatgatgtgcccataaaatacaataacaccattaaaatggctgcagcaagcaggggaagtgccgagctaaaatggtcgaattcgcaataccctacagtctcgctacattgatacataaaccaaggctttctgaatagtagcaaacataattacactcatgtgtaatgcatagttcacctttgtaaggatacgaagactgaagtttacgtaccccttgtttgctgtgcactttgctggcaaacgcatcttatggctacatttgtgttcactctgcacgttccacggacatcagcatccttggagcaggagcaggagtctcatgtagcacatcccgtgtcctgttccactggccatgtcctgttgcttgcggtttactattttatgccattatagagccgagttcggtttgccgtttggcataaatttatttggcatcgaccgcatcgacgacgacggcagtgaacggaaattaccattttattattgcaggcgggcgcccaatcaacccgccccctgcagcccttcgcagagccttattgaattcgcattaaaattggtaacggatatatgcgggagcacgaacacatagccgcagggcgtacactgcgagaaaaatattcacaagaaaaaaaaaacaaagagaacactaacaccactgacacgttaaccctttcattacatagcaatacattaaaaatccctattaaatctttagctatacatgatttcggaatgcgcataaagcattggttacagtgtaagtgctgtgaatgcagatacacataaaatccgagaggtattcatttgtgcttgtgttattacggctaagagcttaagttcatatatgggggcttatgatgggttaagtgccacttttgactggatttcgatgggcggcgtacgaagatgaggatgtttaaacactggcaatcatcgttacatctgtgtcattccatatggtgtcgttaagagtcccatctgttatgctttcattcttcctgggactggcactggcactacgatccccctggccaacttcatcccaggtttcctcatcatccacatctcctttattctcatcgtcatcttcgtcctcttcttcgttcgcgcgatcatcgtgacctggtggaaaatcataagcagtgcgaagagaatcgcaatcagagtttatgggatcatctgctgtgcccaagtgtagctcagggatttcgggaatcagaacctccagtttagaatcaagctcgtttgccggctctctttccggctccatcttctgctcctcatgaccacttttatcatctccctcgcttgattcttcaactattgagtccattttatccacaacatcagtagtcagatttttcttttcaaagtcgataagtgtaccagccggatagaagaagtcttccagaatcattttccattcctcgaaattggagttagtgtcacgcattaagaatatggcttgtttttttatgaaatccgaaatttcggttcccgttagcttgtcatgctcgccaccaggcccaaaaatatgctcggcactcgagacatcgaagatcacttcgtggagagccaccaagtaaattttatccggatgcgctgagttgtatttggccagctgcttccggttgagacgaagtccagttagtggattcggcagcttgcgatgaccttcgttctcgtagtcctcatcgtcgtaggttccacgctggcgcctggtattcatataggccacatatcccaggacacaggtcagcgcgattatgacgtagggcgagttgaccacttcgcgaaactggatgccccacgacttgaccggcacagaggacattgtgggtttctcagcttacagggttggatgacctacctatagcttggcgaattggtactgagaaaactaaagggtgacagcgagaagtgtgttctgaaagcttactgggttacttttaaacggatagggatagggatagggatagggatagggatagaatgtcgcagtaaataccttagcaatgttttcacatatcctaccgcttgggtgcaaatacaatgagccaagcttactggaagctcaaacaatcgatgtaaagaatccgagcaaatgttcagggatgcatggagcctttgctatcccgcacttgcacaaatcctttacccatttctaatttccaatacattctcttgtctcttttttctccggcattttactccgcaggtctggtggtcgccgtgtccgagtcgtgagtgtccggaggagccggagctggaattggccgtgcatcagtgcgtcgactattgtttgatgcaggagcaagttaatccccagctttacacgaataccccggcgtatgatgtgcgcccggcagccaccacgtccaccacgcagagatcccagctaacagcaaccacagcaaggacgaccacaatggaaccctcctcggaatcgagctcatcgccggccccaaccacatcgaccaccacatcgccggcgtcatcattgccagcattattcgcaacgcaaacgaggagcagataccaagaagtacttaatatgtcatcgaccatgttcccgccgatgtcccagttgaaggacgcgttggaggagggtgtggagcccgggcagtcatcgtcagccgaactgtctgccatgtccatgcagggattgaattgtaagtgacgtgatgaacccgtccacaacggactccccttgcccgaccaccgactgaccacagcgttattatcacggccagttggacgtgcacttcaagaaactctaggcagattgtggtattcaaaaacacattagcggttctttcatttcattcgctccttatattattaagaaatgtcctaatcatttcatg

SEQ ID NO: 16304 - DNA, 951 bp, DROSOPHILA
ggtcatccaaccctgtaagctgagaaacccacaatgtcctctgtgccggtcaagtcgtggggcatccagtttcgcgaagtggtcaactcgccctacgtcataatcgcgctgacctgtgtcctgggatatgtggcctatatgaataccaggcgccagcgtggaacctacgacgatgaggactacgagaacgaaggtcatcgcaagctgccgaatccactaactggacttcgtctcaaccggaagcagctggccaaatacaactcagcgcatccggataaaatttacttggtggctctccacgaagtgatcttcgatgtctcgagtgccgagcatatttttgggcctggtggcgagcatgacaagctaacgggaaccgaaatttcggatttcataaaaaaacaagccatattcttaatgcgtgacactaactccaatttcgaggaatggaaaatgattctggaagacttcttctatccggctggtacacttatcgactttgaaaagaaaaatctgactactgatgttgtggataaaatggactcaatagttgaagaatcaagcgagggagatgataaaagtggtcatgaggagcagaagatggagccggaaagagagccggcaaacgagcttgattctaaactggaggttctgattcccgaaatccctgagctacacttgggcacagcagatgatcccataaactctgattgcgattctcttcgcactgcttatgattttccaccaggtcacgatgatcgcgcgaacgaagaagaggacgaagatgacgatgagaataaaggagatgtggatgatgaggaaacctgggatgaagttggccagggggatcgtagtgccagtgccagtcccaggaagaatgaaagcataacagatgggactcttaacgacaccatatggaatgacacagatgtaacgatgattgccagtgtttaa

SEQ ID NO: 16305 - protein, 305 aa, DROSOPHILA
MSSVPVKSWGIQFREVVNSPYVIIALTCVLGYVAYMNTRRQRGTYDDEDYENEGHRKLPNPLTGLRLNRKQLAKYNSAHPDKIYLVALHEVIFDVSSAEHIFGPGGEHDKLTGTEISDFIKKQAIFLMRDTNSNFEEWKMILEDFFYPAGTLIDFEKKNLTTDVVDKMDSIVEESSEGDDKSGHEEQKMEPEREPANELDSKLEVLIPEIPELHLGTADDPINSDCDSLRTAYDFPPGHDDRANEEEDEDDDENKGDVDDEETWDEVGQGDRSASASPRKNESITDGTLNDTIWNDTDVTMIASV

SEQ ID NO: 16306 - DNA, 2527 bp, DROSOPHILA
tatcacaaacatatcaaaaacagttgactgattttactgttcgccataataaatgcaaattttttgttgcctttctgccacctgtttagctttaaactttttcgcgtcgcgcagatttttaattgtttgtttatttaagccttttaaagccgaatataattgaaaacgttataaaaacgtgtatttggctaaattctaaacgttaattattcaaattaatacacgagagtcatcatcatgtcaggagaaaaacaacatcccaaaagcattagaaattcaaatgaatcgagttgattaattttgtttgatcggcgtgggggctacgaaagagctatcatcgaaagagtggaccaaccaaacggggagtcccaattgaaagtgtgccaagtaatgttatgtgattcacacagccatataaaaatgcaaaagggtgctcaaaagcctcctacatacgatgcccgcatcactggccatctatgtcagaactttgacaattgaatgtgcaactatttttatttatcctcccgacttatatgtataagccaacggcaattttatgcagattagtactcatcggatgagaaatcgaaccatattgtgcactgcacaagtttgaggagggtaaaattcaaaaacaaaaaaagtaagagtacggtaaggtaagtactctcactaaaatgattagaagtaataaatcttttaatctgctcacaaatctatcccaaattattatactaaaaatataatttcttataatagccaaccctcgaccgtagaataatcattcacttcgctgataagacttaaaatcaattagattgcttataagatttaaaataaaaattacattacacatagaactcgacagataaatatttttcgcttttagcgaaatgtgtaaatatttgttaattaaaaactgcacataaatccgtttattgaaccttaataatttctgaagagataaattattgatttttttttaatttcaaaataatgctttttgtgggttttaaaatttttttatttcagacttttttaacattaacaataacttaacttctagataatccgctctctggcagcttatccgtagaaaccaccaccgcttgcggaggcggatgaagaggcggatgaggaggccgctccgccaccaccaccagctgcagaggctgacgaagatgcggaggcagaggcagcaccaccgccaccaccgcgtccaccgccatgacgcctgccaccgccgaatccgccgccatagggattaccgaatcccccgccgtatggaccacctccgaaaccgccgccataaggaccaccgccaaagccgccgccatatggaccaccgccaaagccaccgccgtagggtccgccgccgaatccgccaccaaatcctggtcgtccgaatccaaattgcggtagggccgaaacggcggccaccagaagagcgagaacaatcagagtcttcattgcgagaattcttctgtgagtttgatagattctatctgtgcgatcgctgggttgtctgggctggaactgacggactctcagctgagtcgctaaagtatttatacctgctgcattttttcgaaaagtcgtcacatacctggagagtcaaatgtttataatttcggctcatgggccgatcacctaccggttttcttttgattgtgttccatctcatatctaattacactgggcaacatacatattgctcttgagaaaatcgatgacgaatgatattttgagtttaaatgtacaattaataaaataatgctaaattaataaaataatgctacatttaataatatttttattgatattggtaataaaaacaacgcttggattttttaaaattcattatcaaaacggtagcataaacgaggaattataaagaagtattatatacttagccgatttttgctattattactagcagtattttaaattctgttaaatatatcgatgatttcctattttaaaaataatataattttttaagttttacatgcttggtgcgtagtgctgccgtgctaagcgatgactttgtttgccgggggattcccacacacactcccacgaagacacatgattgtcgacccccactcaaaagatgacccaggtggtagtgtttgaaaaatgacagccagcttgtttacatgtagttcttcctgatctgcgtagttccccaccaagatcaagagtactcctcggcggttgatttcgatcgcctaatgccgatcatctgacaagttcatcttgaagagtttattccccctatcttgctttgttcgtcgaaagcggtttcgatggcgatgttttcaataaacaccggtcgattggagtgggccagttggaggtggtgagatcactgactgatcgccggtggctattgggcatttctccaggtttcgcgaccattctgctcaagagaaggttcagtctgccacagaaagtcttcagttccgatcgcgcatcaattattaaaatatacccgactaatcctgaaattattagaataaaacca

SEQ ID NO: 16307 - DNA, 527 bp, DROSOPHILA
agacaacccagcgatcgcacagatagaatctatcaaactcacagaagaattctcgcaatgaagactctgattgttctcgctcttctggtggccgccgtttcggccctaccgcaatttggattcggacgaccaggatttggtggcggattcggcggcggaccctacggcggtggctttggcggtggtccatatggcggcggctttggcggtggtccttatggcggcggtttcggaggtggtccatacggcgggggattcggtaatccctatggcggcggattcggcggtggcaggcgtcatggcggtggacgcggtggtggcggtggtgctgcctctgcctccgcatcttcgtcagcctctgcagctggtggtggtggcggagcggcctcctcatccgcctcttcatccgcctccgcaagcggtggtggtttctacggataagctgccagagagcggattatctagaagttaagttattgttaatgttaaaaaagtctgaaataaaaaaattttaaaacccacaaaaa

SEQ ID NO: 16308 - protein, 127 aa, DROSOPHILA
MKTLIVLALLVAAVSALPQFGFGRPGFGGGFGGGPYGGGFGGGPYGGGFGGGPYGGGFGGGPYGGGFGNPYGGGFGGGRRHGGGRGGGGGAASASASSSASAAGGGGGAASSSASSSASASGGGFYG

SEQ ID NO: 16309 - DNA, 3366 bp, DROSOPHILA
atcgtttgctagttgaacattcaaaataaactgctcagcgaagaatttctagtgcatcgatgggttttcgtgttggatattgaatgttgttggtcaaataaatttgaaaatcctaaaaaattgcttaaccaccggtattaatatgtatatggtatataaaccgttctttttttactcatacttaagactacaaaatatatatatatatatagaagaagatgggtattcttacgttttgcgaagctgatgttagtgaaaattatttaaagttaggtctagggatcgtaagcatatatgtaaaagtccgagttctttttcatatagctgtcggtgtagaaaactatttgatagatcatctctataaatacgttagtttaactgaacacatttttgaaaaatcaaacagagcttttccaacttccatgcttgtgggtgttgttgttgttgttgttcttatgcgtgggtgtgtgcctgtgtgtgggcatcggtatttgttgttgttggcagatatctcagtctaaaatgctcacacgcacacacacacacccacgcctgaaaagtgtctccatcgtgtatctaagtgtagctaaatacgaaaaaaaaaaaatggctaacgaaaactgaagatacaaataagaactatgtttaacatgaactaagtgcggtggttctcgggaggggactggctccggatgtggaggcggatcagaggagcatcatcaaaagcagcggcaggcccaggaccaacagcagcaccagcaacactagcagccacagccacagccagagccaagtggcgatggttccctggttcccagcctcatcgccgacaggcacagccaccgctggctgctgcagttgcgcgtccatctcctcttccacttcgttcgccgccgccgttttgttcttgcggccgccaaagcgacgacgctgcagcaggagcagcaggcgcaccagccgctggtagcccgtacccatgggcagtgccagcgacacgttgttaaagttgctgatggtagtggcttagcgactgcagttggtactgatggggatgtgggtgcggatgcggatgcgcgtggggatgcgagtgtggctggggttgctggtggggatggggttgaccgtgctgtggtgggtgcgcatgaccccgggcatggccatgcatgtgcagctgccgcgtgctgggataaaagttcggcatcagcgagtgatacgcgatcgctgcgcccgatcggccgttgttattgctgaccgtggacagcgcaggtggtgctcccagtagtgggggtcttcgctccgatcgctcgtagctggccacgctgcttggtgctgctgaagctgcagcagctgcagccgcagctgcaactgcagctgatgctgatgacgatgctgttgctggtgtattgctaaccggtgtggctgctactgggattgctgctgctgtccctcctcctcctgctgctgtagctgttgctaatcccacagagctgctagccggcgtgtccagcaaatgatgatgcctgtggtgatggtggtgatgatgatggttgtgtccgttcactgagtcgctgatggcgatgttgatgttgccgccgttgctgctgctgttgttgttggtaatgacgccgctgctgctgctattgccgatgttgttgtgattaccagcgctgttgttgctgctgctactcgcagccaccgttgttgtcttgcactcagctgtggccgatgtccctgccgccgccgtcgttgtcgccaatgttgctgttgccactgccgtcatcagattgcaggagtcaagtctttgtcatttggagttgctctgcagggccgcattgatctgggtccacagctcctttttgcatgatttcgatctgcaacaggaatcgaccacatagtaaacatacttcaaagtacacatttcaggatctcttaccgcttgatagactgcagccagtccttgaattgcgcgttcccctccggcgtgatctggaaagcggcgcgtgccgccactacaatgctggcaaactcctcatagtcgccctgggtcagatgatacagcttctgatggatgcattggatgtacctgcgacaatggaaaaggtccacattatcttgatatcattcttcgtacaacatcacgatgagtactcacatctgctgacacttctggacgagaggcgtgagcgcagaacgcaggtgctgcatcaccatctggtggttgttcctgcccagatagtgggcggactcaatggccacgtcatgcagcacgaacggactcacgatcgagttgaccgcacagatgcagaactggtgcagatactgggtgcccagtttcttgctgatccgtagcaaccatttcacatcctcgccgtacggcggattgcgggcatacttcgcctgcggccgatcgtcgtgaacgcgtcgcgccagtgtttccatggccagcatgcccacattgtaggcagccagcagatatcgcagctgggtgggtctacataaaagaagaagtaatttaattagtatatgacgcccataagctgaccacaaatgagtctcatggttgggatcactcacgtaaactgatgtggttgtcgttgtcgcacgggtggctgcgagggcggcggttgttgctgctgcggtggctgcggcggcgcctgctgcatgaatgggtaaacgggatgttggtgctgatgctggcgcattggcatcacgcccactccaacgccgactccgacgcccacgcccacgccaggcggaccgttcggaggcggtggtggtggtggaccatagtagccctgaggcggacccatcggcgggcccgggggacccgcttgcattgcctgataggcctgcggcggcagcgcctggaatgctcctggcggtggttgcggctggaagccagagggcggttgacctggatgtccttgctgcccagggtgacctggtggcgcctgcccggccatctgaacctgctgctgttgctgttgcaccacctgctgctgctgcacctgctgttgcacaacctgctgctgttgctgcggattcggcggctgctgtggcggcggctgctggtagccgccgtatgcttgaggtggcggcggcggccctgccgaaatgaacatctgcatctgcccgggcggatagctcatgttgtggtggtgcgcatacaagccctggcagaagctgtacggtggatactgcgccagtccgaggggagccagtgaggcgacgcccacgggttggaattgggcctgtggattctggacagaaccaactacgggtggctgcactgctacgggtagtccggggccggggccaacgccgcctggcaccacggaattgggcatgccaagctgttgttgctgc

SEQ ID NO: 16310 - DNA, 1235 bp, DROSOPHILA
aggatgtgaaatggttgctacggatcagcaagaaactgggcacccagtatctgcaccagttctgcatctgtgcggtcaactcgatcgtgagtccgttcgtgctgcatgacgtggccattgagtccgcccactatctgggcaggaacaaccaccagatggtgatgcagcacctgcgttctgcgctcacgcctctcgtccagaagtgtcagcagatgtacatccaatgcatccatcagaagctgtatcatctgacccagggcgactatgaggagtttgccagcattgtagtggcggcacgcgccgctttccagatcacgccggaggggaacgcgcaattcaaggactggctgcagtctatcaagcgatcgaaatcatgcaaaaaggagctgtggacccagatcaatgcggccctgcagagcaactccaaatgacaaagacttgactcctgcaatctgatgacggcagtggcaacagcaacattggcgacaacgacggcggcggcagggacatcggccacagctgagtgcaagacaacaacggtggctgcgagtagcagcagcaacaacagcgctggtaatcacaacaacatcggcaatagcagcagcagcggcgtcattaccaacaacaacagcagcagcaacggcggcaacatcaacatcgccatcagcgactcagtgaacggacacaaccatcatcatcaccaccatcaccacaggcatcatcatttgctggacacgccggctagcagctctgtgggattagcaacagctacagcagcaggaggaggagggacagcagcagcaatcccagtagcagccacaccggttagcaatacaccagcaacagcatcgtcatcagcatcagctgcagttgcagctgcggctgcagctgctgcagcttcagcagcaccaagcagcgtggccagctacgagcgatcggagcgaagacccccactactgggagcaccacctgcgctgtccacggtcagcaataacaacggccgatcgggcgcagcgatcgcgtatcactcgctgatgccgaacttttatcccagcacgcggcagctgcacatgcatggccatgcccggggtcatgcgcacccaccacagcacggtcaaccccatccccaccagcaaccccagccacactcgcatccccacgcgcatccgcatccgcacccacatccccatcagtaccaactgcagtcgctaagccactaccatcagcaactttaa

SEQ ID NO: 16311 - protein, 259 aa, DROSOPHILA
MTAVATATLATTTAAAGTSATAECKTTTVAASSSSNNSAGNHNNIGNSSSSGVITNNNSSSNGGNINIAISDSVNGHNHHHHHHHHRHHHLLDTPASSSVGLATATAAGGGGTAAAIPVAATPVSNTPATASSSASAAVAAAAAAAAASAAPSSVASYERSERRPPLLGAPPALSTVSNNNGRSGAAIAYHSLMPNFYPSTRQLHMHGHARGHAHPPQHGQPHPHQQPQPHSHPHAHPHPHPHPHQYQLQSLSHYHQQL

SEQ ID NO: 16312 - DNA, 20604 bp, DROSOPHILA
cctttatcattgcaataggttaacaaaagagctaggcctagaaaattgctatattatgtatgtatgttggttacctagccagaatttgccattttatgtttcgaaatgtagttattgtgggtgtgttataccaaagctaagtcaaattgtggtgttagagcaattgaaagcaaaatattacgcatacgtagtgtggatcgtaaataataatgattcaaaatggatcaactggatacttagttacgcatgcactaggaaaatgctaagcaaaacagtttagtgttcggttcggttctagtaaattgattttgattgggtagttggggatagagaaacatacctatatgagtattatacgagtctatgtgaaaactacgttgaagtaacggtaactttaacggtaacggtgatttatggtgacttgcgaaaggttattttcgtattaatttggtattgcagtttggtatttttgatttggtttgctttcgatcaactctccattcaatgtttcagttttagtacacaatgcgaattggttcattctactttgcctcatgggagtagtgttcttgtgagtttccgtgagtttaataagcttttcatttacaggagtgcgtatgtatattgtatattgctaacaaaaaacaacaaatgctttgatgttcagtattgtatcggtttaatttcaaattggttggctggacctttgaactgatcttttgagctggggatttctttttacaggtgttttaagactgattacactacaaagctaaacaacttttgttctttgtaacttgctatgaacaaaacgttgagctaaatactatataaatatatgttctgtgtgttgacttatataaatatatgcaagtgttatttgtttatcaaatttgcgatttgcgaaatttctattatacttttgtttttgtaatcttgtacgatttgagtttgaaataatctggtttttagtcgagtttcagtttagtttagtttagatctagagtttgagtgagtcgagtgaggctatggatgagcgcctagagcctaagcctatattagtgggacaactgaccagtgaggtggtgccaaagagcttgtaccagccgatcacgatattcgacagattcagatcgtcgagcattatctgcgccacgcccataaacaccttcttctcgatgcggccatagtcgccccacacggtaatctacaacataaatgatgtaagtatatgatcaaaactttatccatattaatgagaactcacctgtagtatgcaaccggtgtaggactgcttgaataccaactgctgctgatacagtggatccagggtgcgtcgagccgaggaagttttcatcttgtccacacagcgctttcccgacactaggtacaccttaacatatggagcaggcaacatttttgattgggctttttgctggggatcacagatagagtgttagaaaatcataagatgctataggaatgcgtcctacgtacctgtaagcccctggcccgtatgacctccacctccagacagcctttttggtggcacagcgatagctggatgtcgcccagcgagggagctcccagcacctggcgaccaaccagttgaccagggcccaggccatccacgaactcattgagggctccatcgttgcgcaacgaaggggagaatctatgtgaggggattttgaatgggtacgggtgggggtacagtaaagaaagcactttagtacagcgtcgttggtgatatttctttgtatcatctctcatctcaatttcttgtttaaaaattaggtaacaaaatttacacaaagaaaggaatttggttttcagagaaagaaataactctttatacacagggagttgtagaaagacagtatatgttgtagtttcagttggtggttgcgatcgcaactgttctgtggtctgaaatggatcagtgtggttggttgagaggtggtttcggtggtgaaggtgatactgaaggtgatactggtggtggtgggtgcagtggagagagactagtggaatcacagttcgatgttggcatgcaagtgtctttcgtttcgcggagcaaaagtgcagagagggtaagactagggacaagaagtttctagccgaaacctaggttatctaaatagagagaaacaagaagaatggtttttgtttttacgatttacaaagctttgttcggtgatcgactttatataatcccttcatttacacacacatcgataagtgaggatatcttgttatatacatatatatatactatagatattgctgaaaattatagttaaaattaagtttaaaaatcacaatttatacacattacaagacagaaaaatacacaaacaagtcgaagaatcaaacggaactcaaggtaggaaaagtggaatacacttagagaaaaaatgtacgcaaatgcaggctcgctttcagcggtttctttttttttacgttcaaggcgcacgcatatagacatcgataaaaaaaagttgcaggatgaaattgttttgttgtattgtaggaaaattggagatgggatcgccacacagattaccatatacaaaagccaatggatagagagttttatattgagctggacagtcggagtgtgagagaatagagtcagagattcagagttacagagacaggaacaaagacaaagacaaagacagaggcaggcaagatagaggtccttcggccggaaaggtgatactatgcttgataatagacttgctatggccaagcggccaggcggatgcgatcgggagacttacgatgagccctcggagctagtgatcgagtgaatgctgccggcactgtaacgtgtcaccggaggcaccggcggtacctccaccgaccgctggatgctgcccgccgagccgcgcgactgccgctggtggtatggatgtggtggtggtagtgtgatatggtggtgaccagcggagctggtcgagctgcctgctattgcgaactgtgcctggtattgctcttgttctgccggagacaacaagacatatttatacagatgtggtgtgtgtgcgcgtatatacagggggtgatcttaatcgggtatgatcaattgtatgatcctatcatgtggcaatatctagacattcaagagttatatggtcgaaatatataggcccactatgtacaactatattatggtttatcaatgaaatatgatgtatcaagagacttctggatgtttaactagatattttgtatatctctggtatattacacaagaaagttttcatctagaaactcaatagcgacgatgtaggattggtgagattgcgacgttgggctcttggaaatcacaaatctcgaacagcgaaaccccaaaaggagaacgagacagagtagagacgtaaacggaaatcggaatacaaaattaggggtaaaatcaagcgagaactccaactgaataaccataagaacaaattattatagagaacacattatatgtatatatatatatttatatatcagcgaaaattcatcgaaattagtggcgtaaatggcaacaacaattgcgatgtataactagaaatcaacctgtctggttgtgtattacacatctagtttttatagtatgttaaagctttcttatgatttatatatatttactatgcactttttgttccactaatattgtgtgcaatgcgaatttggtttgcgtcttgatttttggccaattttctgatgatgtttctggttgttgataatgcagctgttgtttgagctacttgttgttgaatttgtggtgtgttggttgttgattgttgttattgttgttgttgttgttgttggatgtcttttgactttctgtgacagagctccctgtatacatacttagttatccgaatcgtatttgcggtaaaacataatcgaactgaaggagaatcttgcgggaggcagatgataaacattagttcgtcggcggaactcaaccgatctacggttccttttttacttttttttaatgtaatattctttgaaaggggggagattctgcgcggctgtgtggttgcactccgtgttggggatgtagactcttaccgcttacaacaaagagccgtagctgaacccaagtatctagctttaggctttaactatggcaataacttattgagaggctgcaatagagtggtagtagcttggtatgtcgagtacgagtggttacgagagagagagagtatataagtaggtataggttggcttaactcaatgcatgcaaatcgaatagaacgctaggataataataaatgttgtgtgttttggttatataaaaatggcattagcaatcggtacggcttaggttagtaatagtacatagagtatgctgctacgaaagtaaaatgcaattggggcgcagccacaccgacgcacagtgcgtgcgaaaagtgtgtgccacgtgtgcgcacaggcgaaagctttgctcaagagccggcattttccggaaaaactgcggatgggcaaagctttcggtgtgccccgcttcgttttgaagggggcttccccatttataggggttaccccttgtaagcctaaaaatacgtatcgactttggattggtttgttggttcttggtttattggtttatttgggttggttgttctggttctggataaatttgtattgctgcgcctgcgctttaaaaggatatcgggggaaataataaatcaagttaacttgggaaaggcgggttacgttaaaagttacgttaaagttggtcatgcctgcgaaaaatatagacaaagagagctttggctgaagctttggcaagagagcgcgcgcgaaaagtcagagagcaaagtgaatgaaaagctcttatatctagggattgaaggactaacatcctgtgtgctgaacgggaatttgttttcgggttggggatatctgttaccgttactgtactgttactgccttacggttactgatacgactaatgtttatcatctcaatcgatagcttgactggcattagcttcactcgttaaacatattcgctttcctcctccaaataggcaactcaaaacttaaaaagaaagtcacaaaacgataatcaaccgaaaaaaaaaactgatagcatagcatagtagagtagaagtttagagtagagtagaagagagtagagagagaagatagtttggagtagaaagtgcgcacctttccccgccggcaccatcgccgaagaactgctcgatggcgtccacctccgaggacgagccgcgggacaggccgcccccgccggcaccacctgacccaccggcggcaccaccggcaccgccgagactgacgcccaatccgccaccggttcgcagttcccgcgttatatcgccgggcagcacttcttcgctgcggtgcaccgtgaacgagttcttacccttctttccaaagcccatacgtcttttacgaccttcgagtatggcattttacacaattttagtatgcttagtattactatataattggttagtttggttagcttggctatatggctatggttatggttatgagttgggttactggttagttgttagttgggcaaaagcaaaaacgaatggcaaagcaatggatcaaaataagaatatatatatgggctgctcctgatggaaatcaaattccaaactgagcctacaaataactgggcaaatgacgaactgattgattgattgattgattgactggctgactgagcaacacaaggcaacggaacgagaacggttaacgagcgcaaacagagaacggaacaaaatcgccctacctgtggccgaaagctgcgacgtggagttcgatttcttgcccatgccgctgcctcctttcggggatcgctcctggtcgacgccgccgcccttcttccgatcgttcgcggtgtccgagaggctgccatctgtgaaaggacattagttgcatatacaagttgaatacatttgagaaattatggattcttaagggcattgtaattacatcaacgatgttctgtttttattaacattgtttttggctctcttaggctgtttactgcctactgcttactgaatattagtggaagttttcccccattccccactgggtgtccttttactcaccgactttatcttcggcacctgcaccctccgctgacttggagccaccagcctcttcggcgccgttcttgtccttgtcgtactcgctaaagtcgtcgtccagcatagcatcgatggcatcccagtcgatggcgtccagcggagcatcagcgtccgcgtcagcatccgcgtcagcattagcgttcgttgttgtggttgttgttgttgcgtttggttcgttcgtgttattcgttgttgttgttgttggatttgtggcagttgttgtagcatttgttgcatttgcggttgtcgttgtcgcagcattcgttgcattcgacgatgttgtggttgttgttgttaatgtggttgttggattcgtgttttgatttgtgcatgtatttggtggttgttgtagttgttgttgttgtgattgttgttgtgtggcgtcgagcgtcaggttgttggcgtcatttatggtgttcgtgttttgttgtggtgttgatgatggggcacgtttgttattgttgttgagattgttgggtgatccatgaagttgttgttgttgttgtggtggtggtggttggggatttgcaaaagaggaagaagaagcattattagcattagtaccaccgacgacaagatgcccagcagcggcagcagatgttgcaccaccgctcccactactagatttcgtcagctgctccgatgccatcatcgatccgctaatggcggtggtgccttctttccctttttgcctaactgattgttgttgtaattgttgttgttgttgaagttgttgattgtgactttggctaacactaacactactcgcttggctattgtggtggttgctattgtgtgtactggtagtgttgtgtgcaccaccgctacccattccgttgccctgttccaccattcccgctgccgcagcatttagcccatccattcccgatcccggctccattggtgaaaagttatgggcattctgcgcactgggcggatgcggcagattccttcggcgcttcaaatacggtgccgccggtccgtacaatttttgttggctggttcgctgcaaatccagcgacatgtgattcctgggatccgccagtccacgttgtcggtgcgctccgcgaaagagggacggagccacgccccgtcgcgtccagcccacatccgagtcgtaggtaatggtcactatcttgtcatccgttaccaggaaatgcgagtggctcagcggatgattggcatccacatttgcacccatataactttgtcgaatattggtctccgatccgtagcgtcgcgacattgccgccgtgggtgagtagctggaatacggattcgaatggggatacggatagtctccagacgaaggcatcacctcgtcctcgtaccgaattcgacgtcgaccccagctcttcgtgtgcagatcatcgtagtctagcgaccgcgattgtccttcgtgaaagagtcgccttcgctccagcttcggtttcttcaggatcgaagttggttgcgccttggcctccgaaatgggaacggctgccacgagggcatcttcgctcaattggcgcgaaaggcgtagcactgattgcgtgggcggaggtgcaggagttgccatttgtcccctggcacgccgatgggcatttggagtgggcgtgtgaacatggtaagtgggaaccacaccaagattcagttgcggtcccgttaatccacccaggaagtgctgatccacacactcgccgcacatcgcaggatccgaagagggtggctccccatagcccatcggctgatgctgtgggtgcggatgggcatccgccagacagcacggatcctggcaagcgccgattgccagaccggcggcggtcaggtgaagggtgtggtgcgtcgatagcaccaccggctgacttccattctggcagtggctgcagctcttgtcctggtggtcacgtacatagcccaccagcgaactgggcgtcgtggaggtgtggtcgtgggcgtgtggatggacgcccgcgggcgaggagctgcggaagaaattcgtgatgggcgtggtaatgcgcttgaattgctcaaagctcggcagcagcggcagcggataggcagcggcggtggcttgtacgttcggtttcagtccgttggaccgtcgtggtggatatatggtatcgatatcgatgtcgaatggctgtggtggcaaatggggcgatggcgagtagaagacggaatgtggatgtaaatggggatcgagtggctccatcatctcctcggccattgtgccgggctcaacgtagaattgttccaccaattggccgctattggcatcggtaaccaaaacttggtgaggtggctgtattccaattcccgccgaaatgggtggggaatctgctgccgcaagagcggccagctgctgcagttgctccagctgctccagcaacaccaactgctgggcaccgccaaccggcagatagtcgcagtcatccacctcgatggtattggcccttccgggctccgagtggtgcagccgcagtccggtaatgggttcgcctcctgctcctccgaggaagctgttgcggacgccaaagagattgcgccagttgcgggggaagctaacggttattgcggacaacggtaacgggtggtatcgggtggtaacggttggcagcggtggtaagtggtttgtggtaaaaacatttcagtttcgaggcatgcaagagtttagaaagggatcggatatgttggtagtaatgccacatattattaccaaatgatcgtgatttatcaatagacagcgctcgtcatgtggtgagttttgagagtgtggtgggttggtggttgttgttgaacaattaacaatgcgcattcgtgggggaagatagaacgattaacgtccgaggtcagcgtttgtttcgaggtgagtgtgtggttttttcgattgttgtggtgagttgtagttgagtgttgttgagtttggtggtgagtagttgccgtgtaagcgtgtggtgagcacagcacgcgagagaagcatttaaacacaaacacaaagagagtacgcgcgacgatagcggcgttgttgattgttgttgagattttcatagagatttgatttttattttaagcggtttggttttgtcggttggtttggcaaacgcaaaaagtaaatgcagaaaagaaactttatgttttcgctatcgtttttcgttggtttcagtgtgcccttcaaggtgttagtgtatctgtgttagcgagatactggtgcgtgtatatgtgttcaagtcaaagagagagagttgggcggtaagcgctccgattctgataccaatactaatttagtgggattttaactcgcatctaccacgcagaaagttaatatgtgttaaaggaagaccaatgagccagagcggaatttcagcataattttggcagcgtagcttggcatagttggcttacttaactaatagctaatgacttgggctcgactggcactcctccatacacctcctcctctcctcagtctgccgcccacttacctgagtccgcgcgacgtgcgcggtcgctccgactgcgtggagaaggcgctggaggtcacgctgaccaccgactccatgtccgagtcgccgaactcgcccataaagtccttgtccggcgataacgagtgccttggtcgcatccgtgcgtccatagagtgcaggtcgctgtccgacagacccgtgtagtggcgctcccaaccgcccattccggtgctgcggtaggtggcctggtggtgcggctgccgtgtgcggtgccgcccgaagcgaccacccgaggccagccgctcgtcgaagtcctgacccagtcgatctcgcagcatcgcactgcgtgaggtctgcggcacctggagtagaaagagcggatgttgagttgtctgcagattttgtaaaccagttataatccgaaatgctaggagttttttgggtatttgtattgtgttgcattagaaaaattaaacatactatttgtaaaacggtgtggcatatataaccatcatatattatatcctttcatttttgacaaatcatcccatattgttggttacctgtggtagctgcctcttctttggagatcccgtgggcgtggctgtggccgatcgcgactggaatcgctgttgctgcgaggcagatgccgccgctgaggacacaccacccggtccctggtagaccgatggggcgttaggcgaggagccgtgtactggaagcactggatagtctatgtagcggtcgtcgggtggcgacaaggagccccgtctgggactggtgctccgatagccgtaggcgggtccgccggaggccgctcctcctactccgctgctgtggtaaccgtcgctgggtgccgccgagtgactccgctggctgaggctcatgccaccgggaccgatggcggagccgacaccattaccacctccgcgacgatagtagccggtggcagaggcctgctcgtggtgcatcagatggtggcatggaaagtagagtgtggtttagtggtgcacccttggaccgaagctcagtgatccccgcacgggggatcccgcagggattctgacaaacattcggattagagcttactgactaggtttgagtgagtggtatctgggtggttcatgtggttttgtggttttgtggcaggcattaaaagtgtgtttggtcttttgtgtgtgacagtttttcgtgtaattgattaactgttactgcaacttctactggaacaaaaacacaggtaagttcatatagatatatatgataaaacgtaggagctgagttaagagagcaagagatagagagccaaacaaattggttaaaaatacactttcgaaacgaaatcaatcaagatacatttagagccgcacacgacttgttagcttattagtgggttataagtataattagttaggtttagtaaaagattagcataaactctgaactgaaagtgcagtaagttggcagtggttttggtctaactaagacactagctaaacttgtgggaatggtcaagatatgttaggactgattttacgattgagtcgaaatgtgactttcgaatataggtttgtttaatgtctaagcccaacagggctgaaagttatgatgaactatttattatcttttaaaagcaaaatagtatttacatttaatgagactgtaaaccgtttgaactctggtcctaggaatttttttcagaactctaccccaaggtagttcctaagttaatatatacccaattgcagtgttttctttgtctgtactgttctgtttcttgtttggccttttggccattttgttgggtggttcgttaatttagcttgggtgcaaacctgattgtggtaactttgtccaatgccagatacagtgcggtagtcgcgggccaccatcccggccacccgtttgcggccctggggcgacatgtcacgtcgggaccgacgctcgtttagatcgagctggatcgtcatgtttgggtttcggattggaggtcggaacgcagggttttccaacggatgggtgggggtggttggattttggggtttatttgagtgagggttttggaatcgagagaaaaagaaggagcagacaatagagaaatttacatatgatcaaaatgaatggagagtttggagcacagtgtgatgctgtttttaatgtgtgggatttcagatattgcgttgaaaatatagacctcatacattgtgtttgtgtgggagtgtctctgggtattcagtggtttatcgggttatgtattcgattgattaactcaactcacatcaagtatacgcaatgctacacacacttaaagctacggggtgaagaagccacaaggaaagcggtggaaagagcgtttcgcaagtgctaagtgatggatagatggactaaagcagttctctaccagggcatgcaaagcggttttaagttttcaagttttcaggtgctcttcaatggtttttttagtttgatcgtggaacttatgacagagagatagttttagagtttagagttcagagatagccttgggcagtatgtgttctcaagtttacacggtttacacggattcttaacttaaagcatttggcttatatgacttagactatattaactttcaacttaaatgcaatagttatcgttatcgttagctgaaaagacgcgaccaagtagggcttaaattcgatttgggctcttagaacagagagagttagtagaacgacagtttagacttcgaagagatagaggcagtagatcgagagaaagagagagaaaaatttaacacacgcacaacgaaacaacgacaccaattagttgaataaagtttcaaacgaactaaaaatacaccatgataacgaaaatactttgtacaattgctggatggtgtcatgtcttgttttggccaaaaaaaacatgaacagtcggcatcagtccgattctgtccctgaccatgaaccagttagaatgtgtgtttgtatctgtgtctatgttggtatttctatttgtatatggatttgtgtctgtgcatgcgaactgagaactgataactgacaggaacaggaactggaaccgcaaaatggagccctctgatggagcacacaggatggtcatgtacggtatgggttattcttttcttttcgtttgcgattgctgtgctggctgatggtgatgcttatgctgatgctgctgctgctcatggcatgtgatttgtgagttacagttagaaaaagcacacacacacaaagagggaagaaagataacaaactatgggaacccaaataagcacacacagctccacagaattttcgattcgccgaagactgtactctcttacgttcatttgggcggactaagaaactttttaatttttttttatgatttaatatgtcaaaggttagggtgaattttcacaaatctttcttcaaatgtaagatgttttatagataaatttcaactaagatgacatattcgtaattataacgcaaaggttttagatatcaatgtatccttttcctctatgattaagttgcctctcatattttttttgaatattttccaagtaagagtatacagccttacttacgtcaaatgctttgtgggcatttgcgtgtgtgtgtggcttagtgggtggctgggaacggaaatgttcgcttgtttgtatgtaatgcatgtatctgtgtgtggggctgagtgccactggaagttggcaagctgcgattgaagtctaatgtatacacgtgtcggtgtttttggtcctctcgctcttgttgttgctgtcagttgttttggcttgaatgagacctccccgtttctcgatgtgtactatatacatatgaaataataaaattgattcgatttctgtaactcccgaagcttgtttcttgtgtatgtgtcctatatggtgctttcgatcagtgtagtgttgctctgatgtttgttgttcaggctgttgttgttgttgttgttgttgttgttgttgttgaagttgttttcaagttgttgtggtggctgttacctctagcaggggcggcggactcgctgagctgcccatggacgagatgctggcccccggagtcattccatcgatgtcgcagtcggacgtggtgtccgaatcactaaggcgcgacatggtgctcggcggtgataaatgatctgtcggtgtcagtatcaggccgtccacatcgctgccctcgtcacgtaactgttttcgttgttggttgtttagttggttggttgttgtcataaattttgcgtcgcaatgttgtatggataatcgcacgtgttgttgtttttaatgatgttattgttgttgtagttggcaatggtgggtggtgtttttttttttttatttgggtggtgatgtattggcgggtgcacgacaaaaaaccaacgaaaaaataaacagattatgacaatgcggagttaataattttgttcaaaccgggcagctgctgcgggggggctgagcagggtgggtaaaggacattaccaggctgattctggccttcactttcatccatttaccttaaatcttacgatcttaagatacaaagctattaggaaatttacgagagagacctaagaaagtgaagactagatccaccacaacatcgagctttacaaaccaatgaacaaaaacaaataattgtaaacaaacgataacattttccatttgacttttagccagatttgtgttaagtttttcactcgccgaaacttcgttcgtagaactgaacctgaactctgtgtgtttccatcgatttcatttcattttcttttcaagtgtttaccaacacctctttaacaaccaggaaacggaaacgaacgaacgcaaaatggaaaccaaatgaacgaacttaaagagccgcggcccacacatacgagataggaggtgtcctggtggggctgcagctgataccactcggcctcgtcgtccaggatgtggtgcgccagatcgatgaccacctcgccgatgaagtcgttggccccgtaccgcacatagtcccacagcgtcacctttcgaatggaatcatctcggtggattaagcatatagaggtgctctaatgtggggacaactcacctcgagcagtcggccgttgagatcgcagcgcctcagacccgagtagacaaaggtctggccccatcggggttcgcaggtggtgcccaccgtcttcgttcgccgcttggatttgtggcttcgatcgggcagaaggaacaccttgcataggaaaaaataatcgttcatttataggtagataattagttaacatataaaaacaatatacaaaattaaatcttaatagtttcactcacttttgcatatggattgcggcccgctccgctctggcgcagggagagtccggtggcgcagaccagggtcacgatcagctgcagggtgttctggtcgtagccaagcttcagctgcagccgtccctcgatggggatgggctgtgtggtggtgccggagccgctgcccatgccgatgccaccgcccaccccgtggccttgcaggtgggcggcgggcggaccctgatgctggtgcggatgcggaagcggatgctggtgcgggtggtagtggtgcgggtgcgggtggtgatggtggcccgccgtcgttgtgccgtgcaggccgccaggggcggaaccggaagcggacgccgacgcgtggacggggccgtgggcggaggcgggggcgtggacgctgctggtgctgctgccgctgccgctgccactcccgctgctgctatggctatgggtgctgtgacttggtcccaggcgttgcgtctgcccgacgccgccacgttgccggagtcctgatcctgataccgatcccggtccggaaacactggtgtggatgtccggcgagccgggcgaggtgattagcacgctcggcttgtcccgatggatttcaatggcctcgaccgcgggagctggaaaatggttgaagccaaggttatgcttgggaatatgcttggtattcatataaatttgagttgcggttaagtcgagttatcatgtactttgtggtatcgttagatgataagtcataacattgtggttgcattcatggaagtgactaagatctttgttgtttacccatcagtttgcaccaccatacacacttgacacttgttcattcaggaagtgaagataatgacaacaaatttatctttaatagactttaattgaatttttataggttttattctaatttaattattgtggttataatatagcgcatggaataacctgtggaagttcctcagcttaggcatcgtgctattattatttattttagaaatcgttggaggcaatacgaaaaataaaggtagactctcatattttcctaattaatgaaggtgttggcacctctaattttgcattgtatttgaggatgtatttggaaattaaggcgaaacattcatttctatcacacttgttcacgctcttccacagacacacaatccctatagaaaccgccgtcattgggaactatacatactatatggatacggtatagtacctttgcgctgcagatatcttcccccgctgctgaccaccgcactgccggccatgctgctcgccaacccgctgtgcgggaagttggccgaggagcggcgagcgggcacactgttggcggatccgccggaggctccgcttatgggactgacgttggcactgctgccgccactgccgccgccgctgccgatcggccggctgacaatcagttccacctgggcgtccaggcgactctcgtcgatgatgtcgtagacctcgtcggcactcttgttgtgcaggccgcggccattccactcgaggatctcgtcacctgcgccgtcgatcgatcgatggatgagcgttggatgaatggcatgtagatgtttgagcacagacagatagaaagaatagagagaaaagtcagagtgtaatgcgatggctgaatgaagtgggatgcacattacctggtcgaatccttccctcgagatcggccaccgatccgcgcttcaccttctccacaatggccccgcatggacctcctgctcctatagctgctcccgttcccgctcccgataccgatccacccgttgcgaggggctgaccgccgttgacctttaagcctaatatatcctccccatcatagtatttacgcaatatcatatgcccgatcaggcgagtattgtccgcggatgtttgccaattcaccggattctatatgcgcagcgatcgatttacgatttacgtgggtgtggtggttgggatggtaattggtttgatttggtttggtgattggttattggttattggttattattatattggtgggattggtggtttacagtttacagttcggattgcggatgatcgtgcatagattttggttgtaagtagttggatgtggtgtcggtggggagccatcgtatgcgggaagtagaattgtttttagttagctttttgcactgcttgaaacgccttagacatacagcttataccctagacgtaacttacaattagatttggtcaacgaaaacatatgtatatataacagtagaaagtaacagtttgtacagttttttcacattcaagtttttgttttgtttttttttcttagagtctaggaacatgttctacgcaatcacggatagttggcatagcgcatagatatagatacatagtagttttattggtattcctacttgttttgagaacacacacgattcaagagttacctcaacctgaggtacggatcatataaatttcgaatgctaaaaaaacggtgtgggttaacgacatttagcaatcatgcagggcgtgctaaggggttgttcggatttttggtttttttttttggtggagattcatgcaagcacaacacttagaggtttgtaaaaagtcggattattttggggcatgcaagattggttatttgtgggtttcgaatatcgctgggttctagtttttgaagtgaggttgtatgctgaaattgtcaagatgtttgtcacaatagctggaagttagttgcgagctgggagtgataaccaaaaacgatatcattgcttgattatggtctggggtttatggttactttctggacatgacaagaacaacaaacagagaaagttggtgggatatcttttttttttttttttttttttttggatttcatggggttactccccacacagacaaacggaatgtgggcttcaaagggggagaaagagacaaagagagagacagagagagagagaggactctacacagacacaatgcattcttgcccatcttggttatattttcatctttcttctccagctgcgatctgtgtgtaccttgggcccatctcctcgattcgagtcctcgctgctggtgaacgtgctgctggtatcgatgcccgagtccttggtggccgagtcctggctaccctgtcgctcggcttcccatcgcgaccagtcagctccaccaactccgacggcatccaggctctttccactgctcaatatggtggctgcacccacatccacagccgtagagggcaggattgccgtgactgggggcagtgaactgctggccaatatggaggcctcttcgtcgtgggcatcgaaacgcaccgtcttctttattctgcgctcggtgaatcgtcgcgaatcttgtgccgccgatgaggaggaactggtggccggttcgtcccagtaggcagcctccgtggaactgacggaactgctgccaccgccgcctctcgtggcgcccagcagaccaccacgctggctattccgcgccgcctgaccctgggcatccgccgctgttgccgccgctgccgatgccatggaagccatggatcccgatccccgatcgtagcccgatcccggaccaatcacaatctgcggcttcgattggggatagtagctgctgctagtggtgctgctgctgctgctgccaccgccgccggcggctgccaagggcggggcacgtcggtaagcgccagcagcaccaccaccacccgctcctcctggccctacgcctgctccgccgccggagaactgccgctcgtggttgctgcggttcagcgagttgcgctgctggacgtccaggcgagcggtgcgcgtgagaggatactgctccaggcgctcgcggtgctgcagctgcagctcgtagcgatcccgctgatcggcggaggcgtacagccgctgggtggcgtgcgacaggtggcggaagtcagcaccaccgacaccaccaccaccaccaccgccgctgctgagcagatcccgttcgttgaggctgcgctgctggcgccacggatccaatgaggtgcgcacctggaggcgcccgcctgtaggggtggtagatgttgattgggtgtggctataaacgctactaggggtttgctcttcgggatttttttgggggtggttcaggggactctgggatgtctttgggggtttcttgaggtctcaggggggttcggtttggattaattattcctggaaggggactgcgccgcttgcctgccatagtttgttgtccttttcagatgtttcaacaaatgcacacaatcataatggtaatcgatcggttgagaaagcaaaagttcaaagcaaataaatacgtatgatataagacttagtttcgtggatcagctcggatccagccttgtgagttcgatataatggggaaaatggagtaagttcctgatttttcgaaaacttcataaaataaacatattatgctaaatttgtgaagttgcatttttaactcgaatttaattggcttttgtaatgagtgtatgcagtagctttcactattatgtttgtgccttctattaggtaaacaaatctgtggcaaaataaaatggctttagagaactaaaatgcattattacagatacagatttatatgttgtcttttcgatttagatcaaaactatgtatatagtatggaaaattttcgaaaaatccgcgacattaccgtacaatttcgacaagagctgcaggagtaagctaagattgggtagtacgaatatcataagtagacctacgactagaactacgagtgccggggccgggagaagatgaatcagggtggtaagtgcccggtttttaaaaggttttcggagaagtacaaggcatgaaaatacttatctgtcgtggctaaaagtcgcaagagcattaagttacaagctaagtcttcgaagaaatcggaaactgggggaattgttggcccataggcccatagtgtagactgttctgaatgttggggtgtgtgttcaaggtagtgtgagtattctggttgaagtaaggaggaaacgggaaacagcgttacgatatccatgcaaattgttcaccaagatttcatgtgttgtcaaaattcttttttgtttttcgtatcagttcacatttacaggtagatttaaaaacgtagaagatacattaaaaaagcagaaagtaacgaatatataagaatctcaaaagtgtttttttaaaaaatgttgtccagcaacgataacgtgtgttcacagccagaaaaaagagagatagttgtgtgattgagtggttgaggtattcaagtgacgatcgagagatctgaatcggaagcgaaaaacaaacgcttaacgcatcaccagcttattggctattatagacaattctaggggaggagaaagttgtggagagtgtgtgagagaaagtgtgagtgagggacgatagtgctcgaacaaaggaaacaaagttaacaactaagaaaatcgtacattccttgctttcgcttgtgacacgtgttcgtggaaactcaaaagaaacaataacatcgaagagacacacacacattcaaattcaaattcgcattaaatgcctttgggcctggttttaatcatttgttttgttttcgcttacatttgcatgaatctgtagatcgccgggcgagagtacggtttggacaccttgaacgccgccaaaattacctgctattcgatgtttattttgggtttcatttacatttttcaaggggttttttttgggtattttttt

SEQ ID NO: 16313 - DNA, 7395 bp, DROSOPHILA
atgatattcgtactacccaatcttagcttactcctgcagctcttgtcgaaattgtacgacctcaagaaacccccaaagacatcccagagtcccctgaaccacccccaaaaaaatcccgaagagcaaacccctagtagcgtttatagccacacccaatcaacatctaccacccctacaggcgggcgcctccaggtgcgcacctcattggatccgtggcgccagcagcgcagcctcaacgaacgggatctgctcagcagcggcggtggtggtggtggtggtgtcggtggtgctgacttccgccacctgtcgcacgccacccagcggctgtacgcctccgccgatcagcgggatcgctacgagctgcagctgcagcaccgcgagcgcctggagcagtatcctctcacgcgcaccgctcgcctggacgtccagcagcgcaactcgctgaaccgcagcaaccacgagcggcagttctccggcggcggagcaggcgtagggccaggaggagcgggtggtggtggtgctgctggcgcttaccgacgtgccccgcccttggcagccgccggcggcggtggcagcagcagcagcagcaccactagcagcagctactatccccaatcgaagccgcagattgtgattggtccgggatcgggctacgatcggggatcgggatccatggcttccatggcatcggcagcggcggcaacagcggcggatgcccagggtcaggcggcgcggaatagccagcgtggtggtctgctgggcgccacgagaggcggcggtggcagcagttccgtcagttccacggaggctgcctactgggacgaaccggccaccagttcctcctcatcggcggcacaagattcgcgacgattcaccgagcgcagaataaagaagacggtgcgtttcgatgcccacgacgaagaggcctccatattggccagcagttcactgcccccagtcacggcaatcctgccctctacggctgtggatgtgggtgcagccaccatattgagcagtggaaagagcctggatgccgtcggagttggtggagctgactggtcgcgatgggaagccgagcgacagggtagccaggactcggccaccaaggactcgggcatcgataccagcagcacgttcaccagcagcgaggactcgaatcgaggagatgggcccaagaatccggtgaattggcaaacatccgcggacaatactcgcctgatcgggcatatgatattgcgtaaatactatgatggggaggatatattaggcttaaaggtcaacggcggtcagcccctcgcaacgggtggatcggtatcgggagcgggaacgggagcagctataggagcaggaggtccatgcggggccattgtggagaaggtgaagcgcggatcggtggccgatctcgagggaaggattcgaccaggtgacgagatcctcgagtggaatggccgcggcctgcacaacaagagtgccgacgaggtctacgacatcatcgacgagagtcgcctggacgcccaggtggaactgattgtcagccggccgatcggcagcggcggcggcagtggcggcagcagtgccaacgtcagtcccataagcggagcctccggcggatccgccaacagtgtgcccgctcgccgctcctcggccaacttcccgcacagcgggttggcgagcagcatggccggcagtgcggtggtcagcagcgggggaagatatctgcagcgcaaagctcccgcggtcgaggccattgaaatccatcgggacaagccgagcgtgctaatcacctcgcccggctcgccggacatccacaccagtgtttccggaccgggatcggtatcaggatcaggactccggcaacgtggcggcgtcgggcagacgcaacgcctgggaccaagtcacagcacccatagccatagcagcagcgggagtggcagcggcagcggcagcagcaccagcagcgtccacgcccccgcctccgcccacggccccgtccacgcgtcggcgtccgcttccggttccgcccctggcggcctgcacggcacaacgacggcgggccaccatcaccacccgcacccgcaccactaccacccgcaccagcatccgcttccgcatccgcaccagcatcagggtccgcccgccgcccacctgcaaggccacggggtgggcggtggcatcggcatgggcagcggctccggcaccaccacacagcccatccccatcgagggacggctgcagctgaagcttggctacgaccagaacaccctgcagctgatcgtgaccctggtctgcgccaccggactctccctgcgccagagcggagcgggccgcaatccatatgcaaaagtgttccttctgcccgatcgaagccacaaatccaagcggcgaacgaagacggtgggcaccacctgcgaaccccgatggggccagacctttgtctactcgggtctgaggcgctgcgatctcaacggccgactgctcgaggtgacgctgtgggactatgtgcggtacggggccaacgacttcatcggcgaggtggtcatcgatctggcgcaccacatcctggacgacgaggccgagtggtatcagctgcagccccaccaggacacctcctatctcttacgtgacgagggcagcgatgtggacggcctgatactgacaccgacagatcatttatcaccgccgagcaccatgtcgcgccttagtgattcggacaccacgtccgactgcgacatcgatggaatgactccgggggccagcatctcgtccatgggcagctcagcgagtccgccgcccctgctagagctcgatctaaacgagcgtcggtcccgacgtgacatgtcgccccagggccgcaaacgggtggccgggatggtggcccgcgactaccgcactgtatctggcattggacaaagttaccacaatcaggcctctgccaccggctactatcgtcgcggaggtggtaatggtgtcggctccgccatcggtcccggtggcatgagcctcagccagcggagtcactcggcggcacccagcgacggttaccacagcagcggagtaggaggagcggcctccggcggacccgcctacggctatcggagcaccagtcccagacggggctccttgtcgccacccgacgaccgctacatagactatccagtgcttccagtacacggctcctcgcctaacgccccatcggtctaccagggaccgggtggtgtgtcctcagcggcggcatctgcctcgcagcaacagcgattccagtcgcgatcggccacagccacgcccacgggatctccaaagaagaggcagctaccacaggtgccgcagacctcacgcagtgcgatgctgcgagatcgactgggtcaggacttcgacgagcggctggcctcgggtggtcgcttcgggcggcaccgcacacggcagccgcaccaccaggccacctaccgcagcaccggaatgggcggttgggagcgccactacacgggtctgtcggacagcgacctgcactctatggacgcacggatgcgaccaaggcactcgttatcgccggacaaggactttatgggcgagttcggcgactcggacatggagtcggtggtcagcgtgacctccagcgccttctccacgcagtcggagcgaccgcgcacgtcgcgcggactcagcttcccccgcaactggcgcaatctctttggcgtccgcaacagcttcctcggaggagcaggaggcgaacccattaccggactgcggctgcaccactcggagcccggaagggccaataccatcgaggtggatgactgcgactatctgccggttggcggtgcccagcagttggtgttgctggagcagctggagcaactgcagcagctggccgctcttgcggcagcagattccccacccatttcggcgggaattggaatacagccacctcaccaagttttggttaccgatgccaatagcggccaattggtggaacaattctacgttgagcccggcacaatggccgaggagatgatggagccactcgatccccatttacatccacattccgtcttctactcgccatcgccccatttgccaccacagccattcgacatcgatatcgataccatatatccaccacgacggtccaacggactgaaaccgaacgtacaagccaccgccgctgcctatccgctgccgctgctgccgagctttgagcaattcaagcgcattaccacgcccatcacgaatttcttccgcagctcctcgcccgcgggcgtccatccacacgcccacgaccacacctccacgacgcccagttcgctggtgggctatgtacgtgaccaccaggacaagagctgcagccactgccagaatggaagtcagccggtggtgctatcgacgcaccacacccttcacctgaccgccgccggtctggcaatcggcgcttgccaggatccgtgctgtctggcggatgcccatccgcacccacagcatcagccgatgggctatggggagccaccctcttcggatcctgcgatgtgcggcgagtgtgtggatcagcacttcctgggtggattaacgggaccgcaactgaatcttggtgtggttcccacttaccatgttcacacgcccactccaaatgcccatcggcgtgccaggggacaaatggcaactcctgcacctccgcccacgcaatcagtgctacgcctttcgcgccaattgagcgaagatgccctcgtggcagccgttcccatttcggaggccaaggcgcaaccaacttcgatcctgaagaaaccgaagctggagcgaaggcgactctttcacgaaggacaatcgcggtcgctagactacgatgatctgcacacgaagagctggggtcgacgtcgaattcggtacgaggacgaggtgatgccttcgtctggagactatccgtatccccattcgaatccgtattccagctactcacccacggcggcaatgtcgcgacgctacggatcggagaccaatattcgacaaagttatatgggtgcaaatgtggatgccaatcatccgctgagccactcgcatttcctggtaacggatgacaagatagtgaccattacctacgactcggatgtgggctggacgcgacggggcgtggctccgtccctctttcgcggagcgcaccgacaacgtggactggcggatcccaggaatcacatgtcgctggatttgcagcgaaccagccaacaaaaattgtacggaccggcggcaccgtatttgaagcgccgaaggaatctgccgcatccgcccagtgcgcagaatgcccataacttttcaccaatggagccgggatcgggaatggatgggctaaatgctgcggcagcgggaatggtggaacagggcaacggaatgggtagcggtggtgcacacaacactaccagtacacacaatagcaaccaccacaatagccaagcgagtagtgttagtgttagccaaagtcacaatcaacaacttcaacaacaacaacaattacaacaacaatcagttaggcaaaaagggaaagaaggcaccaccgccattagcggatcgatgatggcatcggagcagctgacgaaatctagtagtgggagcggtggtgcaacatctgctgccgctgctgggcatcttgtcgtcggtggtactaatgctaataatgcttcttcttcctcttttgcaaatccccaaccaccaccaccacaacaacaacaacaacttcatggatcacccaacaatctcaacaacaataacaaacgtgccccatcatcaacaccacaacaaaacacgaacaccataaatgacgccaacaacctgacgctcgacgccacacaacaacaatcacaacaacaacaactacaacaaccaccaaatacatgcacaaatcaaaacacgaatccaacaaccacattaacaacaacaaccacaacatcgtcgaatgcaacgaatgctgcgacaacgacaaccgcaaatgcaacaaatgctacaacaactgccacaaatccaacaacaacaacaacgaataacacgaacgaaccaaacgcaacaacaacaaccacaacaacgaacgctaatgctgacgcggatgctgacgcggacgctgatgctccgctggacgccatcgactgggatgccatcgatgctatgctggacgacgactttagcgagtacgacaaggacaagaacggcgccgaagaggctggtggctccaagtcagcggagggtgcaggtgccgaagataaagtcgatggcagcctctcggacaccgcgaacgatcggaagaagggcggcggcgtcgaccaggagcgatccccgaaaggaggcagcggcatgggcaaacgtatgggctttggaaagaagggtaagaactcgttcacggtgcaccgcagcgaagaagtgctgcccggcgatataacgcgggaactgcgaaccggtggcggattgggcgtcagtctcggcggtgccggtggtgccgccggtgggtcaggtggtgccggcgggggcggcctgtcccgcggctcgtcctcggaggtggacgccatcgagcagttcttcggcgatggtgccggcggggaaagcctaaagctagatacttgggttcagctacggctctttgttgtaagcgaacaagagcaataccaggcacagttcgcaatagcaggcagctcgaccagctccgctggtcaccaccatatcacactaccaccaccacatccataccaccagcggcagtcgcgcggctcggcgggcagcatccagcggtcggtggaggtaccgccggtgcctccggtgacacgttacagtgccggcagcattcactcgatcactagctccgagggctcatcattctccccttcgttgcgcaacgatggagccctcaatgagttcgtggatggcctgggccctggtcaactggttggtcgccaggtgctgggagctccctcgctgggcgacatccagctatcgctgtgccaccaaaaaggctgtctggaggtggaggtcatacgggccaggggcttacagcaaaaagcccaatcaaaaatgttgcctgctccatatgttaaggtgtacctagtgtcgggaaagcgctgtgtggacaagatgaaaacttcctcggctcgacgcaccctggatccactgtatcagcagcagttggtattcaagcagtcctacaccggttgcatactacagattaccgtgtggggcgactatggccgcatcgagaagaaggtgtttatgggcgtggcgcagataatgctcgacgatctgaatctgtcgaatatcgtgatcggctggtacaagctctttggcaccacctcactggtcagttgtcccactaatataggcttaggctctaggcgctcatccatagcctcactcgactcactcaaactctag

SEQ ID NO: 16314 - protein, 2464 aa, DROSOPHILA
MIFVLPNLSLLLQLLSKLYDLKKPPKTSQSPLNHPQKNPEEQTPSSVYSHTQSTSTTPTGGRLQVRTSLDPWRQQRSLNERDLLSSGGGGGGGVGGADFRHLSHATQRLYASADQRDRYELQLQHRERLEQYPLTRTARLDVQQRNSLNRSNHERQFSGGGAGVGPGGAGGGGAAGAYRRAPPLAAAGGGGSSSSSTTSSSYYPQSKPQIVIGPGSGYDRGSGSMASMASAAAATAADAQGQAARNSQRGGLLGATRGGGGSSSVSSTEAAYWDEPATSSSSSAAQDSRRFTERRIKKTVRFDAHDEEASILASSSLPPVTAILPSTAVDVGAATILSSGKSLDAVGVGGADWSRWEAERQGSQDSATKDSGIDTSSTFTSSEDSNRGDGPKNPVNWQTSADNTRLIGHMILRKYYDGEDILGLKVNGGQPLATGGSVSGAGTGAAIGAGGPCGAIVEKVKRGSVADLEGRIRPGDEILEWNGRGLHNKSADEVYDIIDESRLDAQVELIVSRPIGSGGGSGGSSANVSPISGASGGSANSVPARRSSANFPHSGLASSMAGSAVVSSGGRYLQRKAPAVEAIEIHRDKPSVLITSPGSPDIHTSVSGPGSVSGSGLRQRGGVGQTQRLGPSHSTHSHSSSGSGSGSGSSTSSVHAPASAHGPVHASASASGSAPGGLHGTTTAGHHHHPHPHHYHPHQHPLPHPHQHQGPPAAHLQGHGVGGGIGMGSGSGTTTQPIPIEGRLQLKLGYDQNTLQLIVTLVCATGLSLRQSGAGRNPYAKVFLLPDRSHKSKRRTKTVGTTCEPRWGQTFVYSGLRRCDLNGRLLEVTLWDYVRYGANDFIGEVVIDLAHHILDDEAEWYQLQPHQDTSYLLRDEGSDVDGLILTPTDHLSPPSTMSRLSDSDTTSDCDIDGMTPGASISSMGSSASPPPLLELDLNERRSRRDMSPQGRKRVAGMVARDYRTVSGIGQSYHNQASATGYYRRGGGNGVGSAIGPGGMSLSQRSHSAAPSDGYHSSGVGGAASGGPAYGYRSTSPRRGSLSPPDDRYIDYPVLPVHGSSPNAPSVYQGPGGVSSAAASASQQQRFQSRSATATPTGSPKKRQLPQVPQTSRSAMLRDRLGQDFDERLASGGRFGRHRTRQPHHQATYRSTGMGGWERHYTGLSDSDLHSMDARMRPRHSLSPDKDFMGEFGDSDMESVVSVTSSAFSTQSERPRTSRGLSFPRNWRNLFGVRNSFLGGAGGEPITGLRLHHSEPGRANTIEVDDCDYLPVGGAQQLVLLEQLEQLQQLAALAAADSPPISAGIGIQPPHQVLVTDANSGQLVEQFYVEPGTMAEEMMEPLDPHLHPHSVFYSPSPHLPPQPFDIDIDTIYPPRRSNGLKPNVQATAAAYPLPLLPSFEQFKRITTPITNFFRSSSPAGVHPHAHDHTSTTPSSLVGYVRDHQDKSCSHCQNGSQPVVLSTHHTLHLTAAGLAIGACQDPCCLADAHPHPQHQPMGYGEPPSSDPAMCGECVDQHFLGGLTGPQLNLGVVPTYHVHTPTPNAHRRARGQMATPAPPPTQSVLRLSRQLSEDALVAAVPISEAKAQPTSILKKPKLERRRLFHEGQSRSLDYDDLHTKSWGRRRIRYEDEVMPSSGDYPYPHSNPYSSYSPTAAMSRRYGSETNIRQSYMGANVDANHPLSHSHFLVTDDKIVTITYDSDVGWTRRGVAPSLFRGAHRQRGLADPRNHMSLDLQRTSQQKLYGPAAPYLKRRRNLPHPPSAQNAHNFSPMEPGSGMDGLNAAAAGMVEQGNGMGSGGAHNTTSTHNSNHHNSQASSVSVSQSHNQQLQQQQQLQQQSVRQKGKEGTTAISGSMMASEQLTKSSSGSGGATSAAAAGHLVVGGTNANNASSSSFANPQPPPPQQQQQLHGSPNNLNNNNKRAPSSTPQQNTNTINDANNLTLDATQQQSQQQQLQQPPNTCTNQNTNPTTTLTTTTTTSSNATNAATTTTANATNATTTATNPTTTTTNNTNEPNATTTTTTTNANADADADADADAPLDAIDWDAIDAMLDDDFSEYDKDKNGAEEAGGSKSAEGAGAEDKVDGSLSDTANDRKKGGGVDQERSPKGGSGMGKRMGFGKKGKNSFTVHRSEEVLPGDITRELRTGGGLGVSLGGAGGAAGGSGGAGGGGLSRGSSSEVDAIEQFFGDGAGGESLKLDTWVQLRLFVVSEQEQYQAQFAIAGSSTSSAGHHHITLPPPHPYHQRQSRGSAGSIQRSVEVPPVPPVTRYSAGSIHSITSSEGSSFSPSLRNDGALNEFVDGLGPGQLVGRQVLGAPSLGDIQLSLCHQKGCLEVEVIRARGLQQKAQSKMLPAPYVKVYLVSGKRCVDKMKTSSARRTLDPLYQQQLVFKQSYTGCILQITVWGDYGRIEKKVFMGVAQIMLDDLNLSNIVIGWYKLFGTTSLVSCPTNIGLGSRRSSIASLDSLKL

SEQ ID NO: 16315 - DNA, 4754 bp, DROSOPHILA
accaatttcgaagactggacactgacgtctcgttgtcaactgaaacatggtaacatgtgcctggatgtggactataaaaataatgtgcgggctacgaaatgcactaaaaaattgtcgaaaaatccatggcactataattaccagcacagctcatttgtaagcaacggaaacaaatgtctacaaattgatgtcaataaagttggactcattttaagtgcttgcgattccgatgtgacggaacaacgatggatgttcactaaagtgcaggacttcaaactagaccacatgagggatatttgcttaagtgtcaaccactaaacattaagattttagtaacactaattttgatttaacaagagcaatttacgtttattcctttaaagcttaaactaatgtttaataattatataccaattccgaaaaccttattaatagatcatgaacttcagatactttagagcctacggagcttacagctatcatatggttcaattttatagttcattgatataaaatctataccaatatatttgctgattgcattacacttagattaatattatcaagaatccacctttgttttccgttcgcggcgtcgcaaatagccagaaaaatattaagttcatctgtaaattccagacactttgtattgctcattagttgattgcttaccgaatcataatgccaactttgccgacctcctaggctgtggcaaaagctatatcccaacctcaaattgggacgcacttctgcacaaatattaccagccacgcgtagatctttgacataggttagtgtccagttttgaagagtattatttgtactgcaacgttctagaaataaattctgactttttgcattgatagtcaaacactttttgggaaattcaagggttttaacatgtcctgaggcataatccgtacgatttagtgccgcaacgtggttgagacccggcgtaatatcatttataaactctttaaacgactggcattcattttgcttatataattttcgcggttcattgagatccccctcggagatattcaggagatgtggctggtatttataaatggccgattttagatctcctgtccacacttctataatgcgtttcaggttctggataaattagatataaaaaacaacattgatttcatttttgtttcctttgtacatacccttgatttttgttcacccattttatggagatccccatatcgttttaggtagtcctcatccttgggctgcaagtgcccaactcgggagcagggaacttgaactattcgaccaccagtacaccatactttgaagctcagctccagctcagcagcaccgaacccccggagattgttatcaaagttcgaaatgtcctggaaccagacagctggaatggcaaaaacggaagtccttacggcagccacttcgtagggccaaggaaggtgcgacctcctcgctctagataaaggcacttccctacgagttaagctccaatcgtacattcctcgtctttctatagatcgttggtaggctaaagtctgttcgtccagattatcaagaatgggagtggccagagtatagctttgctccgcaatggtatcaagtaatggggataaccagccatttgtaaactccacttgtgcatccacgaacaccaagttttcggccttggcttcggaggcggccaaattgcgagccttgattaagcccacctgttcaggcaggtgaagaatcctagcttttggatgaatatacctgtgcacatagttgtcgaagaagatgagcgataatttatcattccaaaagtccgtatcactgtgatcgttcaccagaataagctcgatatacaggtattttggagtcctttccaccaaactatgtaatgtccttaagagtactacgagctgttcatttctaaatatcataataatactggcaggtttcatctcatcagaatcctcatcgtattcaagcttctggcatcgatgatcacgtaagtctggcaaagaacgtcttagaggaattctctccgccagccaagagttatataagtaataccgccaaccctgcgtatactcatcgatttcccaagatggaacacttaaatatgaggcagatccattttcgcccaatcctggatgagaaagtggtcccatcaggccatcccaactgctcagatctctgtgcagcagcaggagtacaataaatatccacacgggtaaaacaatgtatttaaaacagcaatttaaaactgacgcgaaaacttccatgtctatgaaacaactgattacttaataggcgaaatggcattatgcatactgcatggttattttaaagcgtaacatattaattgaaagtggtacacttacttatacgagaatgaagttttcgttcatacactagaaatatctcaatctcatcaatattcattattaaaaatcatagttcattgaaaatctatatattaaagccctttaaggtaaatccactaaggataaggatataagataaggataaggatattataaggataagattacggtggtccaaactattttctgttaatcaaaataccatattgagccatggaagtttgttagaacttcgaccaaatactttttgtattaaataaggttgtttgttttgtgggtttttctagctgtgtatactcagaaaaaataatttagaaatagctaaaaacaaaaatatttttcaaacaaaaaattccaaattatcaaagataaatacattatatttcctaagcccggtacttcctccacccattatttatcccagcaaaccgcagccactacagagttcccacaccccacacctgtcacatacgtgcacattatgcatccatcattactcatgccataaacggaatccacttaatctcgcaacgaaacatccaaacatttattaaagacatcgcacgtcgagggttgccagcgtcgaaggtcccattcccccgaatcttcaagatattcaggcaaaaactgcaacaaaaggtacaatttatagttcgacacccttgccggctaagtccaacccccaagattttttgggggggtagcgcacgccaaggacattgggtgggtggttcgaaaatgaaattgctgccgccccaaaatttggcaaagaccttgaaaaaaaacccgaggaacaaagggaaggggagctgcttttgtggggacaaggggctggttgggttggaggtgagtgatagaactttaagctcaaacgcccggccgtatgcaatgaatatttacgactaggtcctctgaggattacattgtcgggcttttgggcctggggctttatgcaattgtgcgcaagtaaaaatctaatttatccacccaccacccagccggcgttttgtttgacaattgcctgaaatgatggcaatgcattggcatgagttctacgctctgctggcacgtaattcttacggtccttcgatcttccgggggaattcccccacaaagcaggctggaaaaatcgcttcgcttacgcatatcaatgcacccttttttcggactaccgaagtccgtggatttggggtggctctgcagagttccatggggtgggtggctgccgggtgggtggtggttcggcggctcagtggtttaaaggtcccaatcctcatcataacaccacatgttccgaaattcagcggcgacgtggcgtctacttcatgtagatttctatctattctattgtctgactttgtcgcgtggtaaatttcagcattcatttcgtttgatgaggcgcaaagttgtggaatttattgcgtacgggaaagaagttaagtggattttacgtaaattaatgagtttccatcgggggttgatgccagccagaggctatttaaattgctatacaggatgttggtcatgggttgaggaatgctggtagtgcgaatgattgcataggatcgctaaacagatcgctggaggatcccactgcagttattgccccgctgatttatgctgcaaataataaacattaactgaatgccgtaaaacattaagagcgccatcagttggacattcttctatctccagtgggggtacacttaaaaaggggaaaggtttggtcagagttatcagtcaagaatgtattaaaaaaaaatgtccgattttcaatctaacccaagtgcccacttccagtttcccaatcccactacttgcgaaatgaaaatgaataattttcttatgaaatatttaaagtatctgaatgtttttcggtgtaaccatcatagtggacacacaaagcacccacaataaatttcacttatcaaagttttcgctagccggcggagacaaaaatggagcaaaggaaagacgcgacgagggccattcgaaaaagagctgaaaagaaaccacgacgacgactaactttattgcatagccccagtccagatacagatactcgccctccacgcacaggagaccaaagacgagcgacgacgccaggcggcgggaaaattaaatgtcttttgtcaacagacgttgcaaaaggaatactggccaggagtcggttgatggaggacttggaccggaggagcgggctctggccgaaagacaacgaaaagcgaacggacaatgacgcactttttggccaaaagtttgcccactctgatatgcattaaagccgaatcgaaggagggtgatgccgatggtcgatgggtgaggctatgactatggccaactccaaaggagcgcagagcaatctcgctgtgcaaactggcatca

SEQ ID NO: 16316 - DNA, 1424 bp, DROSOPHILA
atgaatgctgaaatttaccacgcgacaaagtcagacaatagaatagatagaaatctacatgaagtagacgccacgtcgccgctgaatttcggaacatgtggtgttatgatgaggattgggacctttaaaccactgagccgccgaaccaccacccacccggcagccacccaccccatggaactctgcagagccaccccaaatccacggacttcggtagtccgaaaaaagggtgcattgatatgcgtaagcgaagcgatttttccagcctgctttgtgggggaattcccccggaagatcgaaggaccagatctgagcagttgggatggcctgatgggaccactttctcatccaggattgggcgaaaatggatctgcctcatatttaagtgttccatcttgggaaatcgatgagtatacgcagggttggcggtattacttatataactcttggctggcggagagaattcctctaagacgttctttgccagacttacgtgatcatcgatgccagaagcttgaatacgatgaggattctgatgagatgaaacctgccagtattattatgatatttagaaatgaacagctcgtagtactcttaaggacattacatagtttggtggaaaggactccaaaatacctgtatatcgagcttattctggtgaacgatcacagtgatacggacttttggaatgataaattatcgctcatcttcttcgacaactatgtgcacaggtatattcatccaaaagctaggattcttcacctgcctgaacaggtgggcttaatcaaggctcgcaatttggccgcctccgaagccaaggccgaaaacttggtgttcgtggatgcacaagtggagtttacaaatggctggttatccccattacttgataccattgcggagcaaagctatactctggccactcccattcttgataatctggacgaacagactttagcctaccaacgatctatagaaagacgaggaatgtacgattggagcttaactcgtagggaagtgcctttatctagagcgaggaggtcgcaccttccttggccctacgaagtggctgccgtaaggacttccgtttttgccattccagctgtctggttccaggacatttcgaactttgataacaatctccgggggttcggtgctgctgagctggagctgagcttcaaagtatggtgtactggtggtcgaatagttcaagttccctgctcccgagttgggcacttgcagcccaaggatgaggactacctaaaacgatatggggatctccataaaatgggtgaacaaaaatcaaggaacctgaaacgcattatagaagtgtggacaggagatctaaaatcggccatttataaataccagccacatctcctgaatatctccgagggggatctcaatgaaccgcgaaaattatataa

SEQ ID NO: 16317 - protein, 474 aa, DROSOPHILA
MNAEIYHATKSDNRIDRNLHEVDATSPLNFGTCGVMMRIGTFKPLSRRTTTHPAATHPMELCRATPNPRTSVVRKKGALICVSEAIFPACFVGEFPRKIEGPDLSSWDGLMGPLSHPGLGENGSASYLSVPSWEIDEYTQGWRYYLYNSWLAERIPLRRSLPDLRDHRCQKLEYDEDSDEMKPASIIMIFRNEQLVVLLRTLHSLVERTPKYLYIELILVNDHSDTDFWNDKLSLIFFDNYVHRYIHPKARILHLPEQVGLIKARNLAASEAKAENLVFVDAQVEFTNGWLSPLLDTIAEQSYTLATPILDNLDEQTLAYQRSIERRGMYDWSLTRREVPLSRARRSHLPWPYEVAAVRTSVFAIPAVWFQDISNFDNNLRGFGAAELELSFKVWCTGGRIVQVPCSRVGHLQPKDEDYLKRYGDLHKMGEQKSRNLKRIIEVWTGDLKSAIYKYQPHLLNISEGDLNEPRKLY

SEQ ID NO: 16318 - DNA, 7136 bp, DROSOPHILA
gccctgccagcccatatttccatttagccccattctactactgctggattttagcatctttccattctcgcccaaaatacaaaaaaataaagcatcctggtctggtgtctttaatttgaattgtcatttcctttcttcggctctcgaagcagccactttggtgtcgtctgccaggcatccggttggtggccacgcccagctactcccacatccttcagcctcccccttatccccacgtccaccctttctcccccttaacttaccactgaatgcggtcgcacgttcaacttgattagcgtaacttataatgagtcgcacgggcaggatagtcagttgggggacaaacttgtttggctctcactcaaattccattctggcaaaacacttgcaaacgcttactttcgcaagtaaatgtgtactcaggcatatagatatttgcctacacacatatatacatatagataaatgtgtataaaggatgtttttttttttgcaggggggttttcacaggcatttccaagtggtttgcataattacattgtgtgagctcttcatggtgtatctaccaaaaactttgcaactgtcaacgaaccggaactctggcctccatttgcaattatgtgcgtaatatttgcacgtaattatatcaccatatatgtagttacaagtatatcacttttgataattggattgctctcaatttagtcaaattgggcatgcgttcattgatcgggcttgatgcgtaggaaaatcatagtgttctgctatttaatacattttgtgagcactttaattaaattcatttactaattggttagctgaaataaacttattcaagctcatttctatacaaatattgtaaatgttgttaaataatagcatggtttataaaacaaaatgtctggttgtactccaccaagaattttcttttctttaatgttaaaaatggctgaaatacgtatagattttgacaagggatactgtcatgcgtttttgttcatcatgccgaatccctcatcatttctcgtatccaattgtgcgattcttgcaataatgcgaacattatacaattttgaaaatatgtcacgttgcccgtgatccaatcccagctccacaaaatgttcccccgaatccaactcaaacagtagctgatggccaactgccaataaatttgtgagaaaaacaactgtcgacggcgagcaggacgaagaagtggcataaaacttttgctctttgtgtggcataaatatgaatgaacggatttggacttgaggcttgggagcaggagctttctaatgggagtgggaatggcagtgggaccaactggtccactgcggcatgaacgctccaacccgtcgcctacatacaaatattccaaaatgagtttcgaccgagaagaaggagtccaatgcggtcttcccacgtcggtgcttgaattcacaaaggcaaaagggctaagggatatgggggggcggttgaggggataaaaggggcaaggagcaaggactttccatgggcaataaattttaattttccccaaatccttgcgcatacgaaatgagatttgtaacaagccgcagcaatcatctggcggcgctttcctttcactgtctaaaaaacttccctaagtgaggaaatgattgtctggcagatcttgattaattgtgagtggcattatttgacttaaacgtcctaaatgcttaaccccctttatgccagatttaaaatctacggacttactttaatagctaaaaaaaaagctagcatcttgcttaaagcgctgtactattgatattgaataacttactttagatttgaaaaatggcattattatgtgccacctttgaccagcttgttttccatccgcagcttcactaataataataataaatcttggccgagtggcgatgactcagctgttcagcgatccttggagaaatgggacaggtcacagtcaaatgcgcagataaatgtttatggaagataaattgcagccagcggatagaaatcaggcaacgcataataaattccatttgttgtagttcgcaactgggagcgaaattttcgaatgtcgaagtttgcgagggagcgatgccaaatcgagtattgatgcgttggcatcccgcggcatggtgtcattgccaaaaaggcccaatcccctcccgatttcattttccaattggagcattgaaacattggagcaatctggagcattggagcattttagcaccgaacccccaaaaatagcgaacaatgaattcgttcgctgcgaattggttttgtgaaattatccacgaacgtgggcggatcatttatcaatatttccgctctgctgctggaatcggtagtaggtaatcgcttattatgcgaaatcggtcgataaatgcaatacatacatatatgcatactagtatgtacatatgtgccagtcagtgagtgcggactcgtgttccaccaaaccgatttccaaatttaatttatgtattactaccaaaaaaaaaaaatacaaaaaataagggtagcgcaatacacattctgtcaattgcgggaattgggtttgacaaattgaatttggggaattggcaaacttttgaccctattttaattggctttaaaaggcttactttttgtcaaccaatcagtgtttatttgcttctttcatgttggggcaaataaactctaaatgatttcaaagttataaatgcggaagaaatgttttattaaattgtattatttttaaggaatttattacagaaaaattttgtatgcttgagcaaatttcgcattgcaatggcttacaagattttgattacagaaaatctgatcaaccagtttcgccttctaatttggaaaccttaaagccccatccacaatccttgagtgctgcattgatggattccgaatcctgccggagcgaagaacgaggaaaagtgtatgaaacgggcaacaaaggggcataaaatgaatcccttttgtaatcaaatgcacagaaaattgtattctattcaagcaaaaaccactacgagtcccaaacctctttcgtgtcgtcatcatgggcattgtatcgtcggtagtttctcggccagggataaacttatatatatatatgtatatataaatatatatgtgtctgagtgtatatatatacatatctgtgtcctgtgtcctgtatccttagccaagttagtgtgcgcgtgatccacttaggcgttgcacggcgaatccacgggccgcccaaaaaacaaagcggcgaaattatcttccgtagccaagattccggtgggcggtggtgagcggtgggcgtggccggtggctgaaggaaaaatattacaagaagcgcctagacaatagcaccgaactaagtaaacaacaataataaaaaacaagaaaaaattaaatgaaatagaataaaataataaaaaaaaataatagagaaaagacgcagcaccaacaatggcgtaataaactaacggtagggctaagctcgctgggaaaactatgcaaaaacttttcgctttgtttcgcagcagcagcaaaaatggaattaataagaggaaaaatgattttcgttaaatatatatgtatgtatatgtttaagcctccgcctcgtaggccagttaagaccagccaaagtccggcccacaagggcagtgcgaaatttaattaagaattttgcgagtgggctaaaataaacaaacaaagggcccgcaggcgtttttcaccgtacatccatccggatatccggaggggctcatctgggcttaccttctcgttccggaaatgatctgctctgcggtagattgagcagcccttcgatggctgcataacaagttgatagctccttgacaagttcttaatgaaaagttgaaaagcgcgcataattaaactgctttttgccagcgcaactggcaaagtttactcaatcagaaaaaaacttaggcaatcctggtgaaaaatgggcaaaaatgatcgattgactgcaaagatagttttgttccaagaaatggattcttttctatcagaaataaatggacatcattgggaaatgttctttttgaaaatgaaattaaatttttcaatttttttcttattaatttcaataaatatttatgtattaagctttaataacaaaagtagatcattaaagtcatgatataagcaaaaagtttttgttcgcgattgaatctttgaagtagcaaaactaaatgtttaacgagagtcatttgccaaaacttttcagttttaccatcgattttaataaaatttcacttcaaaagtcagagctatcggagctgaactgtgccgcaggacaaaagagaaaaaaaaagaaggtgaaatataaattccgaaacttttgactattcaaacattttgacaagcgacaattcgcttgattattgcaatgggaatggaaggaaaaggacgagcgacaggcagacttgggtgaatcttatcgtctggcccatttggggcatgtcctttttgccagctcgtgttggtggatggtccgcccccatcggttgctccatagttccttcattagtttggcacttcatcttggctgcacgctcgagtgcctctggtctgaggttgccacattctgagaagtgacaaaagtttaatgatgcgtttaagttgcacgtggcatgccccttggcatccaccgcgtgcccccgatttgatgagctgtacgcattgcaatgtttgtttttcccaccgggagcaggagaattggaaatattgcagctgtcagcttgaaattgatttccatcaccagctatccagacaaatgatggtgtagataatggggcacttcacatggggtattccatagcacaaagacccaattttccacatccacattccacattgtgggcataaacatgttgtgaattttttttagaatacatgaatcatctaacaacgattatataatattaaaaccatattataataaaacttgctcttatgcctgactaatgtcttccaccttggagtcctccaactgcttgaattgaatgagaatcaccagataggtagtaacagccgagaagatcttgaagagtgttgagttgtctatggaaaagaatccgtaggcggtgaactgaagatcctgtttgatgctcttcgttaggaacttgtcgatgaggttctggaactgcttgctcttgccgtaaattctcgccaggatctgtgccgtgccattcacctcggatgccaggccgtcacatgcgctgcaaatcacaatcattgtgatagtttcagccaaaacccagatacatgatagtcctatggtatcagccacttctgttttggaactcaacgagccggctgtcaatgtggcaaaggccaagtaactctgatttgtgaccgtgtagaaggagaagccaaagtagaatagcaatgaaactccggccacgcagttaatattctcggtgatgtagcggaatttgcaaaggacctctatgaggttgctcaactcacgccagttttccatgtggccacaatcctgaagattaaacgtatccagtttctggttaagaaatccaattctctgtgccaaattcatcatgagtgtccttagatataaggccaggagagtggagtacagcagttggaggaagtagatcagaagcaggatgatttgccttttggcaccaatgccacttcgatagtgaatatagtagaaggccacagcgaggacaccgcctgctgcagaggtgaccagaatggtcagattgcgacaactgtaggtttcccggaatccattggccagcagatactcatcgattttggcaatatcgtgaagagtgcgaaagtgtctggatgcattctgcacactcgataataccaccatggtatagctgatgatacacagaagcgtctcgatggtcctgttgatctcctcggtatcaccttgggcactggccaccaatctgtactccttggaggcgaagagcacatcttcccccaatgtcagtgatccgattagtataatcagggccaccagtcgtccgtaccagcgacccaatcctccaaagcgaaagccatcatcgacgtctccactatagaatggtaatatagcaaagatctgcgagggcttggatataggatatatatcctggtagatcttcatatcgatatggtgcgctttgtggcactaactaaaatgaaacaatttggtgactccagtcattaactgagtagcaggcttactgtattagtacctttaattagctgtcataaacagcaaataggcgtaataatatgatactattaatagtatgaagcaaatatattacaagcaaaatttcgtatttaggtgttaatttcttgaattctaaatggctgaaaaatcatcattatcgtattaagttagtctgcgtccaatttatttgatcaaattcatgactgatgagtgggcaaagtagttcgcgtatcattgggtaattacgagctaatgcgacatgtcataattgccgactgacataaatatccgcgaaacttaaaagcgctgtccaatgcgccacttaaatagcccaattactttgacaaaccaccggcggcggacgcagctcaatgggccacgtgaatggtttgacggacacgggcattccgggcggcccaaggctaaacgacaggatgcagggatactgaatggggattatgctcattatgcaaacgccttcgacggataagctggatggacgaagtcggccaggcgaaaggcatttacttcaattatttcattaaagcagcaacagcagcgacaaaagaccagaggcgtcatctgggaatccttgtggcgcaggccatcgccatggcctccaagatgccatcgatggtggcgctaatggagcgtgtgagtccggcaccagatgtcgatgccagtagctacagcttagtcaagtggatagagcgtaggttgtgccacaatgcactggcaacaatttcctagaaccatgcttaattggaaattttgctgaaaataaaagggattgatatttttgaaattgaagcccatctatctaaacttgtattccatgtgatgaatctcttcttttttttttgatttcataccaatttttccaagagccaccgtgtatagttgtgagggcaatgactttacacgaaca

SEQ ID NO: 16319 - DNA, 1857 bp, DROSOPHILA
atgaagatctaccaggatatatatcctatatccaagccctcgcagatctttgctatattaccattctatagtggagacgtcgatgatggctttcgctttggaggattgggtcgctggtacggacgactggtggccctgattatactaatcggatcactgacattgggggaagatgtgctcttcgcctccaaggagtacagattggtggccagtgcccaaggtgataccgaggagatcaacaggaccatcgagacgcttctgtgtatcatcagctataccatggtggtattatcgagtgtgcagaatgcatccagacactttcgcactcttcacgatattgccaaaatcgatgagtatctgctggccaatggattccgggaaacctacagttgtcgcaatctgaccattctggtcacctctgcagcaggcggtgtcctcgctgtggccttctactatattcactatcgaagtggcattggtgccaaaaggcaaatcatcctgcttctgatctacttcctccaactgctgtactccactctcctggccttatatctaaggacactcatgatgaatttggcacagagaattggatttcttaaccagaaactggatacgtttaatcttcaggattgtggccacatggaaaactggcgtgagttgagcaacctcatagaggtcctttgcaaattccgctacatcaccgagaatattaactgcgtggccggagtttcattgctattctactttggcttctccttctacacggtcacaaatcagagttacttggcctttgccacattgacagccggctcgttgagttccaaaacagaagtggctgataccataggactatcatgtatctgggttttggctgaaactatcacaatgattgtgatttgcagcgcatgtgacggcctggcatccgaggtgaatggcacggcacagatcctggcgagaatttacggcaagagcaagcagttccagaacctcatcgacaagttcctaacgaagagcatcaaacaggatcttcagttcaccgcctacggattcttttccatagacaactcaacactcttcaagatcttctcggctgttactacctatctggtgattctcattcaattcaagcagttggaggactccaagaacttgtcaaggagctatcaacttgttatgcagccatcgaagggctgctcaatctaccgcagagcagatcatttccggaacgagaagggaagttttttagacagtgaaaggaaagcgccgccagatgattgctgcggcttgttacaaatctcatttcgtatgcgcaaggatttggggaaaattaaaatttattgcccatggaaagtccttgctccttgccccttttatcccctcaaccgcccccccatatcccttagcccttttgcctttgtgaattcaagcaccgacgtgggaagaccgcattggactccttcttctcggtcgaaactcattttggaatatttgtatgtaggcgacgggttggagcgttcatgccgcagtggaccagttggtcccactgccattcccactcccattagaaagctcctgctcccaagcctcaagtccaaatccgttcattcatatttatgccacacaaagagcaaaagttttatgccacttcttcgtcctgctcgccgtcgacagttgtttttctcacaaatttattggcagttggccatcagctactgtttgagttggattcgggggaacattttgtggagctgggattggatcacgggcaacgtgacatattttcaaaattgtataatgttcgcattattgcaagaatcgcacaattggatacgagaaatgatgagggattcggcatga

SEQ ID NO: 16320 - protein, 618 aa, DROSOPHILA
MKIYQDIYPISKPSQIFAILPFYSGDVDDGFRFGGLGRWYGRLVALIILIGSLTLGEDVLFASKEYRLVASAQGDTEEINRTIETLLCIISYTMVVLSSVQNASRHFRTLHDIAKIDEYLLANGFRETYSCRNLTILVTSAAGGVLAVAFYYIHYRSGIGAKRQIILLLIYFLQLLYSTLLALYLRTLMMNLAQRIGFLNQKLDTFNLQDCGHMENWRELSNLIEVLCKFRYITENINCVAGVSLLFYFGFSFYTVTNQSYLAFATLTAGSLSSKTEVADTIGLSCIWVLAETITMIVICSACDGLASEVNGTAQILARIYGKSKQFQNLIDKFLTKSIKQDLQFTAYGFFSIDNSTLFKIFSAVTTYLVILIQFKQLEDSKNLSRSYQLVMQPSKGCSIYRRADHFRNEKGSFLDSERKAPPDDCCGLLQISFRMRKDLGKIKIYCPWKVLAPCPFYPLNRPPISLSPFAFVNSSTDVGRPHWTPSSRSKLILEYLYVGDGLERSCRSGPVGPTAIPTPIRKLLLPSLKSKSVHSYLCHTKSKSFMPLLRPARRRQLFFSQIYWQLAISYCLSWIRGNILWSWDWITGNVTYFQNCIMFALLQESHNWIREMMRDSA

SEQ ID NO: 16321 - DNA, 3939 bp, DROSOPHILA
catttaatttagcactatctgcagtgacatgcttgcttgttctattttggcaactttaaacagtttccattgcgaaaggactcattcttctgctcagccactaacgaagcagaacggcgaatagttacgcaaaattgccgacgaccgcgcgttgttacgcgccacgtgttcccacaaagttgccatcgccatcgtcatcagaatcggaatcaccatccggattcgggattcgacccacaatgcagtgcatctcagtcagactcggcagactcagtttggccgaccaaagtttttattggccaaattcccctgtcgctgttcgcgatgcagtttttggccagcgaaaaacccttgacccactacgtgagttaacttggcagttaggaaaaaaaaacttttgcaataaaaactccaactattaggttaaatattttccgaaacttaaaataatttaacgctatgataggtaaatatatatatatatatttacaaaccggaaaacaaatttggttcagtaaacttcagtattgaaaccattgtgcatagcaaccatttccatgtgagtcattaaggcaacacgctgtaacaaaattgaacatccgagcaaactattttagtcgtacaaaatggcagcgtgagtataacaacagaatcgaactatttattaatatattatatattatgatccttaaacaagtactcaagattacaagcccggggatattcccctggaggagcaagatgatcgcagattattttgcaagtaccactacaaaggagttctacttttgttcatacctattttgctggcacccattttaattggaactccagtactggtaagagatggcaaggcttttgaaaggcatttaattaacttatttcctgtagatttgccgcttcatctatctaacactatgtctttacttgatttatatcctaaatttaatggccagaggagctgccgccttcatctatatggttttcatacccgttgcaggcattgcgagctctaaagagatcagtgtgtcgtactacactgatctcatatttttcgtttattccgctatattcatgggcatcatgatggacagttcgaaattgagtgaccgcttggcttttattgtcatctccttggtcggtggaagtttgaaattgtatgtccttaaatggctgagttgtacattactttagaatatcgttctgtagtcttcagattttcttgaccatcgccgcggccattgtgtccattttggtgaatcccacaatatccgctgctttttggatgaaggtgtcccaagccgtgatggtggaatacgataatgtaagaaatcaccaacatctgaatcttaacttattttacatactttttacagggtggtttgataaaattaaactctgaagagaagccctatgaaattggatcgtgagtccttgacagtacagtaccttccacaaatccaattaattttataatccgcctcctagcaaaccatatcccacgcgtcctgtaatcggaatatacctaacctgttgctacgcagcctctttggcagcaagtctttcgcccatcgtcaatcccaatggtgtgataagcgatggttttggggggtgattatggttttaattgctgttcgaaaaggtacgaaagttgaagttgcaaactacttttccaggtctcttacagttctggaaattggcatgctaatggcgggaccagctctaatgggtctcgttgtcatgatcttctggttgcaagtcctcttcctcggtctccttggaggcagtgtgaagcgcgatctggcggaaatggctggggctaaggcgggctttaaacagaccgcgtctgaaagaaaacaggctcttggtccctggggaatatatcccatcttggccttgagcttgattctattgatgttcctgctggtggccactcgcaagccgcgcatctttacgggctgggatagtataaactataaggcggaatctggtctctcagtggccggcattggcatgtccattctcttcttcgcaattccggccaactatatattctgcagatactatgtttgccgccagccggagaaggagggtcctgccaattcacttctgggctggaaggcggtcaacaacaatactccctgggcggaaatctttatgctgggcgccgccttcagctttagctatagttccgctgtttgtggattgaacacctacttggcggattcgatgaactccgataacaagggattcaatatgaagagcttcatctgcggcgccttgcttggaacactttggaccacgctgtcgccggccaccaccgtggccaagttggcattgcccaccatggtaaccgcggtgagtcaaaatttgtatattcatattaatgaatatgaatggataggatggtcggactaagccatatcatattaagtcaataagattcctttcactaatatttttgtgtaattttagggtaattccttttcactgccatttgccaccgcgttgcacaatcagtttttgctgcccgtgagcagcccggccaacacaattgtcgccggctggggcaatgtcagaccttttcaatttgtaagtaatacgaattgatatatatatatatatatgtatagatatgtgtatcttaacggatttttcagctgctgggcggaagtatcctgacgcttttcatgttctgcacaatcgctggattcaccatcttgttccgcaccatggtgctctgaattcaactaatttcaacttcatttcagttcagccatccaaatttccgtttcgatttctctcaaccgcatttgataaaattaccaagtaaacaccactgcaatgcggtgtgtagagcaatcttgttgacacgtttagcatacaaaatcggagatggaactggatttggacgagattgggatggctcggcaacagctggtccacgaaaattcagctccacggacaggtgatggcaaaacaaaatgctgctgctgtggcagtaacttttagaaaaatataaggacgaaagaaaggatcaaacagcaaacaaaccaacaaaaaagaactggataaagtttctgagccaaaattttttgaaattcatttcaaattgtgatgtacatgtttcaaaacgtagccattgccaattaaagcaacttaaatttggatcaactttttcctattttttttcagaaactgcagcatcacagtgaagagtggccagtacaaacatggcattaaagtgttgtccgaggaccaacgcttttaagcaaattacacagtttcgcatttagggtaatccccgcctggtcattcgcacctaattcacatcgctgtagtccaaacattgcccacacaagtgttggcactgaataatttatttgttaatttagacgaggaccaggcgcatctacatacgcatgtacatctacatccctctagcaaactctttccggctggatacttgccggtttggtgtcgcgtgaatcctctccagccaaaatacattagcggctgcaggtttcggcgtcagcagctttgggaggcatttatattcaaactatttaaatattaatacagtggcgcagagttcgtgaatattcataacactcacgacaatccaaaattgcgcatttaattgattttgtcaaggttaacggccgcagatgttgcaagtacttgtaaattgtggaaaaagtatgtaaataaaatataagcatttataaattcaattgcgtgtgtatatttcgataatatcccataagctgtaactaatttttattgaaaattcaatgaaatcataaaatgggagagccttcttcggcctgtgacactttttcaggtcttattgtcatgcctttcaatttgtcttgaaaatcccatgggcttttctacttcttagtcagatgaggaatttccatcttaaagtcattggaa

SEQ ID NO: 16322 - DNA, 1511 bp, DROSOPHILA
gcattgcgagctctaaagagatcagtgtgtcgtactacactgatctcatatttttcgtttattccgctatattcatgggcatcatgatggacagttcgaaattgagtgaccgcttggcttttattgtcatctccttgattttcttgaccatcgccgcggccattgtgtccattttggtgaatcccacaatatccgctgctttttggatgaaggtgtcccaagccgtgatggtggaatacgataatcaaaccatatcccacgcgtcctgtaatcggaatatacctaacctgttgctacgcagcctctttggcagcaagtctttcgcccatcgtcaatcccaatggtgtgataagcgatggttttggggggtgattatggttttaattgctgttcgaaaaggtacgaaagttgaagttgcaaactacttttccaggtctcttacagttctggaaattggcatgctaatggcgggaccagctctaatgggtctcgttgtcatgatcttctggttgcaagtcctcttcctcggtctccttggaggcagtgtgaagcgcgatctggcggaaatggctggggctaaggcgggctttaaacagaccgcgtctgaaagaaaacaggctcttggtccctggggaatatatcccatcttggccttgagcttgattctattgatgttcctgctggtggccactcgcaagccgcgcatctttacgggctgggatagtataaactataaggcggaatctggtctctcagtggccggcattggcatgtccattctcttcttcgcaattccggccaactatatattctgcagatactatgtttgccgccagccggagaaggagggtcctgccaattcacttctgggctggaaggcggtcaacaacaatactccctgggcggaaatctttatgctgggcgccgccttcagctttagctatagttccgctgtttgtggattgaacacctacttggcggattcgatgaactccgataacaagggattcaatatgaagagcttcatctgcggcgccttgcttggaacactttggaccacgctgtcgccggccaccaccgtggccaagttggcattgcccaccatggtaaccgcgggtaattccttttcactgccatttgccaccgcgttgcacaatcagtttttgctgcccgtgagcagcccggccaacacaattgtcgccggctggggcaatgtcagaccttttcaatttctgctgggcggaagtatcctgacgcttttcatgttctgcacaatcgctggattcaccatcttgttccgcaccatggtgctctgaattcaactaatttcaacttcatttcagttcagccatccaaatttccgtttcgatttctctcaaccgcatttgataaaattaccaagtaaacaccactgcaatgcggtgtgtagagcaatcttgttgacacgtttagcatacaaaatcggagatggaactggatttggacgagattgggatggctcggcaacagct

SEQ ID NO: 16323 - protein, 410 aa, DROSOPHILA
MMDSSKLSDRLAFIVISLIFLTIAAAIVSILVNPTISAAFWMKVSQAVMVEYDNQTISHASCNRNIPNLLLRSLFGSKSFAHRQSQWCDKRWFWGVIMVLIAVRKGTKVEVANYFSRSLTVLEIGMLMAGPALMGLVVMIFWLQVLFLGLLGGSVKRDLAEMAGAKAGFKQTASERKQALGPWGIYPILALSLILLMFLLVATRKPRIFTGWDSINYKAESGLSVAGIGMSILFFAIPANYIFCRYYVCRQPEKEGPANSLLGWKAVNNNTPWAEIFMLGAAFSFSYSSAVCGLNTYLADSMNSDNKGFNMKSFICGALLGTLWTTLSPATTVAKLALPTMVTAGNSFSLPFATALHNQFLLPVSSPANTIVAGWGNVRPFQFLLGGSILTLFMFCTIAGFTILFRTMVL

SEQ ID NO: 16324 - DNA, 7031 bp, DROSOPHILA
gttggatggttggatggtggggagagcttttcgttttccagtgtaagtgttacaatgtgttaagaatcattttctaccttctattgtctctcaaactcgaaaagactttgccgcaattagtctaactctaattattacgagtatatgtaaatgtatggtacatgtgtgtaatgtactcaaataatagcaaccgaatattccgaaaatgtcattttaaagtctcctgcttcatccacacattcagataactaacgaatcctttaagttcgatgtcaatccatgtacgcgctgattgtaaattagataatttttggtgtgtgagggccaaggatacgtaccctcgaaggataactatgggcttaaagtatacattgactaggtatacatacacccgatgaagagccacggacagtaaatcgtagtgcaaatgttagtcaatatcaatattttgccatagaaccaatgccgattcgtaactcctctagggagttttcccaattcagttcatttacccgcacgcattccaaaaacagaaagttcacaatttatagatttattgcttttggttgaatacaaactaaaaaaaaataaaattgcataactaacagcgagggaaataactgggagatcatactaaccaaaaaaatcgaatgaatgagcctaggggatcgcgtaaagtaatgcttagctttgtgttaaattgctgttgaatataaatgtaattgtacaatgataataattacgatggcatcaaacacacagatcatccacagaacacatcagacatcagaaccatgcagaaaacagaacccaaatccaaaagaaactaattatattaaaataaagaatataaaacgttaaattcaagagtttctctgactgatgattactttaaagtaagtaattaaggatataggacattacaagacacttcattgtggatttaagtctacaaaattcagtgattagttatctctagcttaatagcagtatatgctgcttagacgctgaactcctccgacgaggatgtctccgtatcggcatacagtatcatctccaggtttcgcatcttacgcttcttctcctgctggcgcttgcaatggatttgcgcgaggcagttcagcgaagatactacgaaacaggtgaccatgatgaaggcacacagctcgaaagcacgaaccagatggcttagataggccagggaattggaatttactgttccatgcatctgctgcttcgtcgactgcagcagttccctgatcatgcgctgcattggaggtcccaaatagggtagcttccccagaccgaccacaaacctatcgactagactctcggttagggacgcaataacaaacaactgctgtatggtggccttgattaacgccttgccgatcagggtggccacaaagaacttccaaaagggcaccagaaaatgtccgcacgttatgccggccaggtcgaacagaggattgggtacgctggcgcagaatagtattcccatgaagcccactcttcgcatcacccgttccatgaacagcttggcatggtcgagcatgcctagctttccgcaccttcgcctttcatccaataacttttcctcctccgctccatccaactccttgccagagagccgtgctctacgtgtcataaagtatggcggcagctcaccaagagcagtgccaatgccccagagtagcgcctccggacgcacctttgccaaaatttgccatacatctgggtaattgcgcttgtacggctcctgtgggcagacttttatgtccggatacggaggagtgggaaagtccagcgtttgacactcgtaggcggccagagtgactgctgctaggtgagggcccaggtagagcagaaaggtgtgcaacccagtgccaaagcccacagatgagagcacgcccaggcccagccagtagaccgcaaatccaaacctatgcttgcagaaaatcacgaaatccgcatgaggtcctggcagtaaacaaaacatgcccaacagcagcagaccgcccactagccacagattcaacagcttttcgatgaaggatagcaacaaatgcccggcctccaggccaccatacttcaaagtctgcacaggacgacgccaaagaaccagagacttccattccagccgctcctgtaccagttcagccaagcgatctatttcactgggcaatgaagagtgtcctgcttcagtgtcattgctagcagccatgatttactattttccgcactaggcactgagatatatcgtgttttaaatctagaacctagaagatttagataagaaattcacccatagcagcaaagtcgactatgatatggttttttcttaatatctttaaaataacattatgtattcagatattttgataattttcataactgtggcgaaagtaaatgggtattattagacatatgttgagcctcatcattcaatttactatatttatagtatgcagagcttttgtctatgagaatataatatggggatttcttaatcagttagatctgttgtattatgaatagttttaatctgccaaagattcaatggaccagagggcaaaggtgttagcctgccctcgtagtactcattttttgtagcctccaaatgctcatcctcggcctgatatttatatgtactgatctgagtgataaaattctcgatttccgaattctcttgcggcccaattgtctcgtccttcaaaacgtgcagcagtttagcgctacattaaatcatctggttaataagagtttgctactgatttttatatactcacatgcttaaaaattgggcttcatccagacgcaagttcaccaccatatttagaatatacttcaatggcagaagacgattccgttgacttgaatttgtaacctccgatctcctaatgcgcatgtttttgatcaagagactaagggattctttaaagataatataacgtagcagccaggagtccaaagcactgcagttcatatcgatcagtcgaagatgggcagtcaaggcaattgaaccctttttgttcacgttggaatctttgtagatatgcaactgaattaccgacatgtaatggatatagctctcaatccgatactttatgaaaacatttataagatcttctatctctgtgtccaaacattttattgaagactaggattaaacagacgataataaagttttactaattattcgtattccctaaaaaaaaacattaaaacggaactcttaccattttgtatttcattagtagcttccatactcgattggtgggaaggtcaaattcctccgtctttatgagtagacgaaacatatagtgcatatcggcaacataagtatttgaaggtaattcaggcggtgattcacgtggtggggaggttaatacttccaaaatcttgtcatatgcagcagagtcaaggcttaaatatggcagctggttgatgtgcattatgagagtagaacaaacaaaaaactttgctctttttaagtttaatttttcctttctcaactcagaaacgcaaaagtcttgcagctgctttaccaatccagataccttgtcgatcatctcgccgtcggaatccttgagatctccgtgcaaaagaaccagcatgttagccaaactttcggagccataaagagctgaaattcgaaaaccatattccagtgttcatttctattactattcataacttacttatattttcatttagtgtaggcatttctagcacaaatttggcgagtgtttcgtaaatgtccgccacatagcgaacatgaagcttattaaccattaggacagcatgaatgcgcatatagctaaaggcatattccttcaagagctgctgcatttccgggctctcagggtcggtgttgttcagccggagctgtaatgcagcttgttcatctcgcaaagccctcgacgtcgtagtatgtatctgaatgtttcctgttgcacccacagagcgcgatatattcacgtagagcctttggaactcagactcaataatggtgtcatcgtttaggaaattctccaaacagctgctctccaagtttaaaagcaactgcaatagaagtaatagataagtattcaatttttttagaatactcctatagcttacatcagcatcacactctgctactgagtcaaaatcgatcaaatcatatatactgtagatcagcggtcgagtgccattttgttttgatgaggccttcaaaatccgagaccagactcgcagtaattcgttgacctggtcacgagccaccggcagggaggtatactctgccatatgcatttcaaaaattatgcttgcacattgcgcagcaataaggctcaattcaatacgaacattccgagcagtgagcactcgggcgtagaagtcgaactcctgtagcgggggaaaatactgaatgagagtctttagatagcgcgtcagttcatttcgaaactgttcgtaagtgatattttttctgggattttggggtatcttcacataggtctccagaatgtgctgttctatttcctgttcttggtgctgtcgctgggatagtgtaatgtagaccttggctgccatagaagcaacagtcgccgacgaaactgacattcgcaggacaagatgaaggagctcctcgtggaaacgttttgtgaagcactctgcactggctacatttctacgatgaagaatcaattaaaataaacaaatcaattattataaatgactaatttatgattatatagtatatgatctcgtacctttgaagagtcattaaatacttcagagtggccaagagcaagggtttggaattgctgtccttgagagtttcaaactgtagcacaacatatttcacagtaatcagttcattggtaaaacaacgcaaatgatggctgtgttgcgagttctcggcgaactgcctaatcatggactccaagaactcataagctttaatatagcaatcgtcttcggacatctgttggaataaaatatttaatagatttactgataaatataatacattaagtcttaccacaaccgtcagaatgcagtatacaaaatccaatgcggatttctcggggccacagaaagttttgtagtgcttacggaaaatatccagcatgggcggaaccaccacatcgcaggtttcctgatagctagtcggtcatcaatataatcacgaatgtcaatattaatttatattatgcttataaatttataaagtatgatactgaactggtcttagatatggggatttcttatatataggtacattaaagaaaatcataataaatcttattttacttacaaaatgccatagcgaacgtcgacggtgagcgctaggcaaattcccttaaagcccgaaaagttttcatatttgggcagcaatttggccagtccgccaaggatgctgaaagctggaaaaggtattcaagtcggaaggcagcacagctatatggaattggagacaatgtataactatatagcttacacattctggccagcggttcgcagatatatctatccacggaggtgctgttgctgagctgcatgttcttgcacatcgcctgcaccaccttgatccacttcagaatcaaattcaggtagcaaggtagcggctgggtgagctcatcgaacctggtgccctgggaatctttggccagcagttcgcccacttgggccagcaaacggggcaggcgatccaggaacttatccaattcggtcatcaccagtggcaccggatcaaagatatagttgggattggcatcgcgatacggatgatcttgcgtctggctgaaggcctggacgcttacgttgaagtttaggcccaagacacggaagcactggcccacaaactggtgtgacaccttcacaatccagttatccgggtcagaggtcacggcctgcagaaaagcaatggcgaattccctggccactgtctacattccacattacgtcaacggtagcataagacacgataatcccacatacttacttccgtgttaccaactgtcgaaatggcgcttacaaattccattttaaaacggttacttaaactgacgccaagttttaaaaactttccttcactgagcatccgttttgttttgataagtgccagtgctgaaaatagtatgaaaatggatcgataagcttgatcaatggatatcgattgatttttggcgcgcagaaacattcaaaattaaattaaacattttgaaacataatatttacatcacataactatttatattatattttcaagggtgatgatgaacacattatatactttaagtccttttccacaattgtgcgcctttgaaataaaatccaaagttgagatttccaacaaacagtttattgagaaaatattcataaatgtacattctgtattcagtagcatatgctactaaatgcatatatttacagcgaagatgcacatgtaaaattatcgaaaatgtccgagcttcgagcaagggaaatgcgctaataatacaaaatttacattataaatatttcatgttcactacatatgtaactaaaatagaagcctaaattaaagtaaatacagtgttcttcaaatcttttttttttttttttttattaattttttattatttattgaatcttccctttgggttaagagactaacaataagtgttcaaatcttaatctaacttaattaactttcacttagtgatagtttttttttttttcattaatgccctaataagtttattgctgggctgggaggtcgttgcggtgcagccggctttgactgcatactcggattagttttcttgcgaggggatttgtatgggtggtcagcttttcgttatacttcgtttttttctcagctattacttcgattactaatttgatttttaggtctctgggtatgttttcgtttcgaaggtaccacggcgctccagggataattctcagaattcttgactgtgctcgctgaataatgtctatgttacttctggatgcgttgccccacagctcggagccataagtccagataggttttaagacgg

SEQ ID NO: 16325 - DNA, 3366 bp, DROSOPHILA
atggaatttgtaagcgccatttcgacagttggtaacacggaaacagtggccagggaattcgccattgcttttctgcaggccgtgacctctgacccggataactggattgtgaaggtgtcacaccagtttgtgggccagtgcttccgtgtcttgggcctaaacttcaacgtaagcgtccaggccttcagccagacgcaagatcatccgtatcgcgatgccaatcccaactatatctttgatccggtgccactggtgatgaccgaattggataagttcctggatcgcctgccccgtttgctggcccaagtgggcgaactgctggccaaagattcccagggcaccaggttcgatgagctcacccagccgctaccttgctacctgaatttgattctgaagtggatcaaggtggtgcaggcgatgtgcaagaacatgcagctcagcaacagcacctccgtggatagatatatctgcgaaccgctggccagaatgtctttcagcatccttggcggactggccaaattgctgcccaaatatgaaaacttttcgggctttaagggaatttgcctagcgctcaccgtcgacgttcgctatggcattttctatcaggaaacctgcgatgtggtggttccgcccatgctggatattttccgtaagcactacaaaactttctgtggccccgagaaatccgcattggattttgtatactgcattctgacggttgtgatgtccgaagacgattgctatattaaagcttatgagttcttggagtccatgattaggcagttcgccgagaactcgcaacacagccatcatttgcgttgttttaccaatgaactgattactgtgaaatatgttgtgctacagtttgaaactctcaaggacagcaattccaaacccttgctcttggccactctgaagtatttaatgactcttcaaagaaatgtagccagtgcagagtgcttcacaaaacgtttccacgaggagctccttcatcttgtcctgcgaatgtcagtttcgtcggcgactgttgcttctatggcagccaaggtctacattacactatcccagcgacagcaccaagaacaggaaatagaacagcacattctggagacctatgtgaagataccccaaaatcccagaaaaaatatcacttacgaacagtttcgaaatgaactgacgcgctatctaaagactctcattcagtattttcccccgctacaggagttcgacttctacgcccgagtgctcactgctcggaatttgcttttaaacttggagagcagctgtttggagaatttcctaaacgatgacaccattattgagtctgagttccaaaggctctacgtgaatatatcgcgctctgtgggtgcaacaggaaacattcagatacatactacgacgtcgagggctttgcgagatgaacaagctgcattacagctccggctgaacaacaccgaccctgagagcccggaaatgcagcagctcttgaaggaatatgcctttagctatatgcgcattcatgctgtcctaatggttaataagcttcatgttcgctatgtggcggacatttacgaaacactcgccaaatttgtgctagaaatgcctacactaaatgaaaatataactctttatggctccgaaagtttggctaacatgctggttcttttgcacggagatctcaaggattccgacggcgagatgatcgacaaggtatctggattgacggaggaatttgaccttcccaccaatcgagtatggaagctactaatgaaatacaaaatgttgcatatctacaaagattccaacgtgaacaaaaagggttcaattgccttgactgcccatcttcgactgatcgatatgaactgcagtgctttggactcctggctgctacgttatattatctttaaagaatcccttagtctcttgatcaaaaacatgcgcattaggagatcggaggttacaaattcaagtcaacggaatcgtcttctgccattgaagtatattctaaatatggtggtgaacttgcgtctggatgaagcccaatttttaagcatcgctaaactgctgcacgttttgaaggacgagacaattgggccgcaagagaattcggaaatcgagaattttatcactcagatcagtacatataaatatcaggccgaggatgagcatttggaggctacaaaaaatgatgaaatagatcgcttggctgaactggtacaggagcggctggaatggaagtctctggttctttggcgtcgtcctgtgcagactttgaagtatggtggcctggaggccgggcatttgttgctatccttcatcgaaaagctgttgaatctgtggctagtgggcggtctgctgctgttgggcatgttttgtttactgccaggacctcatgcggatttcgtgattttctgcaagcataggtttggatttgcggtctactggctgggcctgggcgtgctctcatctgtgggctttggcactgggttgcacacctttctgctctacctgggccctcacctagcagcagtcactctggccgcctacgagtgtcaaacgctggactttcccactcctccgtatccggacataaaagtctgcccacaggagccgtacaagcgcaattacccagatgtatggcaaattttggcaaaggtgcgtccggaggcgctactctggggcattggcactgctcttggtgagctgccgccatactttatgacacgtagagcacggctctctggcaaggagttggatggagcggaggaggaaaagttattggatgaaaggcgaaggtgcggaaagctaggcatgctcgaccatgccaagctgttcatggaacgggtgatgcgaagagtgggcttcatgggaatactattctgcgccagcgtacccaatcctctgttcgacctggccggcataacgtgcggacattttctggtgcccttttggaagttctttgtggccaccctgatcggcaaggcgttaatcaaggccaccatacagcagttgtttgttattgcgtccctaaccgagagtctagtcgataggtttgtggtcggtctggggaagctaccctatttgggacctccaatgcagcgcatgatcagggaactgctgcagtcgacgaagcagcagatgcatggaacagtaaattccaattccctggcctatctaagccatctggttcgtgctttcgagctgtgtgccttcatcatggtcacctgtttcgtagtatcttcgctgaactgcctcgcgcaaatccattgcaagcgccagcaggagaagaagcgtaagatgcgaaacctggagatgatactgtatgccgatacggagacatcctcgtcggaggagttcagcgtctaa

SEQ ID NO: 16326 - protein, 1121 aa, DROSOPHILA
MEFVSAISTVGNTETVAREFAIAFLQAVTSDPDNWIVKVSHQFVGQCFRVLGLNFNVSVQAFSQTQDHPYRDANPNYIFDPVPLVMTELDKFLDRLPRLLAQVGELLAKDSQGTRFDELTQPLPCYLNLILKWIKVVQAMCKNMQLSNSTSVDRYICEPLARMSFSILGGLAKLLPKYENFSGFKGICLALTVDVRYGIFYQETCDVVVPPMLDIFRKHYKTFCGPEKSALDFVYCILTVVMSEDDCYIKAYEFLESMIRQFAENSQHSHHLRCFTNELITVKYVVLQFETLKDSNSKPLLLATLKYLMTLQRNVASAECFTKRFHEELLHLVLRMSVSSATVASMAAKVYITLSQRQHQEQEIEQHILETYVKIPQNPRKNITYEQFRNELTRYLKTLIQYFPPLQEFDFYARVLTARNLLLNLESSCLENFLNDDTIIESEFQRLYVNISRSVGATGNIQIHTTTSRALRDEQAALQLRLNNTDPESPEMQQLLKEYAFSYMRIHAVLMVNKLHVRYVADIYETLAKFVLEMPTLNENITLYGSESLANMLVLLHGDLKDSDGEMIDKVSGLTEEFDLPTNRVWKLLMKYKMLHIYKDSNVNKKGSIALTAHLRLIDMNCSALDSWLLRYIIFKESLSLLIKNMRIRRSEVTNSSQRNRLLPLKYILNMVVNLRLDEAQFLSIAKLLHVLKDETIGPQENSEIENFITQISTYKYQAEDEHLEATKNDEIDRLAELVQERLEWKSLVLWRRPVQTLKYGGLEAGHLLLSFIEKLLNLWLVGGLLLLGMFCLLPGPHADFVIFCKHRFGFAVYWLGLGVLSSVGFGTGLHTFLLYLGPHLAAVTLAAYECQTLDFPTPPYPDIKVCPQEPYKRNYPDVWQILAKVRPEALLWGIGTALGELPPYFMTRRARLSGKELDGAEEEKLLDERRRCGKLGMLDHAKLFMERVMRRVGFMGILFCASVPNPLFDLAGITCGHFLVPFWKFFVATLIGKALIKATIQQLFVIASLTESLVDRFVVGLGKLPYLGPPMQRMIRELLQSTKQQMHGTVNSNSLAYLSHLVRAFELCAFIMVTCFVVSSLNCLAQIHCKRQQEKKRKMRNLEMILYADTETSSSEEFSV

SEQ ID NO: 16327 - DNA, 5464 bp, DROSOPHILA
taatataaagttatctaaccaattttatacaatttacaatctttaaaaattggcgattgatgcttatcctgcgactaacattcctacatagaatagggattactgattggattacgggtgaattattttctctgtatatagcaaaaaaagatgaagaattggagagaatcaaagaatccttgcccgctggcgggctaaaggtgagcaaacaaagacgctgataaaacgaaatgccaaaacgacaattgaaacgcccaacaaaaggcatgagctttccaggagggggatgcgctgggaacggggaacggggaaaggggtgggccagtgaaaaagtcaactcgagaggcatccacgaggccggtggctgccatttcttggtgtctggtgtcgccccatccaaatcaagtgtgaacggaatacggccaaaggtggcccatccatccatccatccatccatctctccgtccgtccatcggtctctttccagcagccgagtgctacgcatagtgcgctccctcttttgcggaacctcctccatctcgtcactcctctatgtatcatcttcctgggctcttgagctctatctctatataaatattttaggggcggtctctgctcactgcctctctctttcgccgtaatattccaattcgacattttgtcttttcattcataatgcagtcgcagtcgacggcgacgtcggcgtcaggacatatcctccaatctgaacgtgatgattaagttctccttttgcccgtcgctcccatcaatccatctcgctctgtcgctcgaccaggacgtctgcatccatctctctctctccctcggcatgcatttcatctctcactctcgccaacggcggcagcacgcaggactctcgggggttgtttcgccaggattcaccccagcactcgccgtgtgtccttttcatatttcttaaggcccgcaccgttcgctgtttgccttcattccgcttcggtcgctgatcctgtgctgaacgcgtcctgttcctcgcgtccctcgatttgcatttaaaaagcgtatatccttatcgacgaaacaagtgaactttaaatagtaaagtaaaaggaccaagttcaatttgtgtgtgccaactgttgtgttttgcctctaacaagtggagatcggccgcctgccaagggaactggatatccacataggcagtgcctgaatatggtttactttgtacgtattcgatacataaaaacttaatttattactctgtaattgcaaaactccgacgggaaaaggaaaaaactataaagtacaagttcgctttttcatattagaagcatttcgaagctatttgcgtgacgttcgtaagaaaagcaggcatttacataggtctatgtcctctttagatagtatttcgtcttgtatctttaccatcattcttaacacttatgattttgattaaccccatcaaaagccagcttcatctcataacttctaacatgtgctagggcatagccacttgttcaactcaagacaaagtttccaagtgcctgtgtgctccgttgattgaatattattccacgcacttggttaataagctcgatgtggttcgcactccccaagtggcgttcgtagaggcaaattttgaagtggccactagaacaccaacataattcggctgcttaaaagtggaactactcgttcgtagtagtagtagtttggcacccgggaaactttgggatcgagggctgaccgccgctgcctccgggtcagcgtgtgaaatggttgccgcctctcgtttaatgagattaaagcgcactttggaagggaaactgcaagatgggcgaactgcggacccagatgggagctgggcctgctgaggcgtcaaatcaagttaattaaaagcggcaaggaagtcggtaatcgcaccggatgtcgcacattagccacactcgagggcacatggggaagatggagccggcgaggcggcgaggcggccttacacctccagtcgagtgtaagcgatttaatgaatctcacataaagccaagacccgcgccaaaaaattcgcatactgcttactgggcctgtgttatgattgatggcaatatgctggcgaaaggattgaggtctttgtttgggttaagtggagtgtaagccagggcaaagcacgggttaaatgcaaatagcgtggtatgcaaaatcgatcgggtaatattatggaacgcactgcggtttgcgtttaattgcaacccgctggctggccctgaattatcctgcggaaatgtcctgccgctgggagcacgccctccgctggcgtttgtttgtgctcccgaattgccaacgcattagttgcacttgactgatcaggcggtaaatagtccgtacagctgcggtcaaaacaatagggaccacttgaaatccgagcaacttgggaataggtgttgttattatattcataattataaaccgaaatatatgctttacatatatgcttttgaaggcaagaagtttttagaaaggtatgggaaccagaaatgttatttatcctagttatttccccccaactgtggccacaaacaatggaggcgtatgccttcgattaattgataacccgttgcttagtttgcatactcaatttggctctttgttcgtttcttacagagtccgcgtggcatgcaaccgtgtagtccagcgggagaaatcgcaatgatgccgccttcgaagagccccgtgatggagagcgccgcctccgaacagaatcctgcccagcagagccagcagcaggacgagcagagcgccaagcgggcgtgtcccctaaagttttcgatagccaagatcatggagccggatcacaggcccagccaagtgccaccgccgcagcccgctccggtttccttcgccaccaacgatgacgacgaggatgaggatccggagatcgatgccgactcggagcgctcctgcagccccatcgaggtgatcagcctggatcagtcgccatccactgtcaactatgactccgctttcaagaagtatgtgccgggtccgtgttcgggcgccacttcatcggtggcctcgccgccgagcaccgctgctgtgcagcagtttgtgagctcccgccaccaggagctgctctcgcagtatcccctgctgtactatgcacccaatcagctgatgtgcgccgctgctgccgcccaatatgcagcccttaccgcccaacagcaatcgctggccagcgccgcccacctgagcagcttcaccgcatccctgaatgccagcttgcatcactcgcagtcgctgagaagaaatctgggtcatccactggccgcggcagctgccgtggcggcagtggcccaatcccaggcggtgcccaatttgcaacataccctggaaaagtcgccagtggcccagagaacagcccagagttcgggattgcaagctaacttgaagaggaaacgatcgccgcaggatcagggcgaagtgacgccgcctccagcgtctactgccacttccgccactggagccagatcccgctccccctcgccgcaaggatccatcgaggacagcagtcccggatcggccagtggcggcaagcccaagaccttctcctgcctggaatgtggcaaggtgttcaacgcccactacaacctcacccgccacatgcccgtccacaccggagccaggccgtttgtttgcaaggtctgcggcaagggattccgccaggcttcgactctctgccggcacaagatcatccacacgtcggaaaagccgcacaagtgccagacctgcggcaaggccttcaatcgctcctccaccctcaacacccactcgcgcatccacgccggctacaagcccttcgtgtgcgagtactgcggcaaggggttccaccagaagggcaactacaagaaccacaagctgacccacagcggcgaaaaggcctacaagtgcaacatctgcaacaaggccttccaccaggtctacaacctcaccttccacatgcacacgcacaacgacaagaagccctacacctgccgcgtctgcgccaagggattctgccggaacttcgatctgaagaagcacatgcggaagctgcacgagatcggcggcgatctggatgacctggacatgccacccacctacgacaggcggcgcgagtacacgcgcagggagccacttgcctccggttacggccaggcatcgggtcaactcacgccggactccagttccggcagcatgtcgccgcccatcaatgtcaccacaccgccactttccagcggcgagacgagtaatcccgcctggcccaggtccgccgtttcgcagtatccgcccggtggcttccatcaccagctcggagtggctccacctcacgattatcccagtggctccgccttcttgcaactccagccgcagcagccacatccgcaaagccagcaacaccatcagcagcagcaaagactctcggagaccttcatagccaaggtgttttgacagcgatactatgcggaaagcttgaacagctccacggggtcgacctcgacgaccagctccacggtgaccaccaccaccacggccatatcctcgatggccacctccaggagcgatctgctgatcgactgactgcagtttgtggcagcggcggccgctgcgagcagctcgaattccgggcaggataccggcgaatccccgtccccggagctcggatgcactgctctgggcagtgctgtccgcgcactgaacggtctcttctaggcagaaggacccctgtccacctccacccaccccgcagaacctcagcagccaccaaatggtttcaacttgtgcaataccccactcagaagatgatgatgacgatgatgatcccaacgctcagcccacatctccaagcagcattttgtacatagcgtatccctaagaagtctcacagaacactctacttaagcagctctctcgatgtatagatgtagttaaaggatttacctagttagtcgccaataccgaaagccctgagttccgtgtagacacgctacacagatcctccaggacacgtttcgatatagaaaaaggtgtttttaacattgcgttacagctttttggggtctgtcaaccgatatacatagatggaaatgtatcttagagttgcactagatatccgtacgtactctatccctaagtgtctgtgtaacccaacgcaaattaatgaaattgagaaacattttaacaaagatccatgaatgcattgtatttgtttaggtcttaagtgatattattgatactgtttaagcaataaaccaattcttcaattattaaacgaaaatggtgtttagatatgctgggaaagcgtatataatcttcatatgcacatatgcaaataactgagcaacagtgtggggtgtcattgagtcgagtggagggatcctaaataatgcaaatggatgcgaaatgaaaacaattattgctgcattactcgggcccaagagtcgcgtttaat

SEQ ID NO: 16328 - DNA, 1981 bp, DROSOPHILA
cgtcctgttcctcgcgtccctcgatttgcatttaaaaagcgtatatccttatcgacgaaacaagtgaactttaaatagtaaagtaaaaggaccaagttcaatttgtgtgtgccaactgttgtgttttgcctctaacaagtggagatcggccgcctgccaagggaactggatatccacataggcagtgcctgaatatggtttactttagtccgcgtggcatgcaaccgtgtagtccagcgggagaaatcgcaatgatgccgccttcgaagagccccgtgatggagagcgccgcctccgaacagaatcctgcccagcagagccagcagcaggacgagcagagcgccaagcgggcgtgtcccctaaagttttcgatagccaagatcatggagccggatcacaggcccagccaagtgccaccgccgcagcccgctccggtttccttcgccaccaacgatgacgacgaggatgaggatccggagatcgatgccgactcggagcgctcctgcagccccatcgaggtgatcagcctggatcagtcgccatccactgtcaactatgactccgctttcaagaagtatgtgccgggtccgtgttcgggcgccacttcatcggtggcctcgccgccgagcaccgctgctgtgcagcagtttgtgagctcccgccaccaggagctgctctcgcagtatcccctgctgtactatgcacccaatcagctgatgtgcgccgctgctgccgcccaatatgcagcccttaccgcccaacagcaatcgctggccagcgccgcccacctgagcagcttcaccgcatccctgaatgccagcttgcatcactcgcagtcgctgagaagaaatctgggtcatccactggccgcggcagctgccgtggcggcagtggcccaatcccaggcggtgcccaatttgcaacataccctggaaaagtcgccagtggcccagagaacagcccagagttcgggattgcaagctaacttgaagaggaaacgatcgccgcaggatcagggcgaagtgacgccgcctccagcgtctactgccacttccgccactggagccagatcccgctccccctcgccgcaaggatccatcgaggacagcagtcccggatcggccagtggcggcaagcccaagaccttctcctgcctggaatgtggcaaggtgttcaacgcccactacaacctcacccgccacatgcccgtccacaccggagccaggccgtttgtttgcaaggtctgcggcaagggattccgccaggcttcgactctctgccggcacaagatcatccacacgtcggaaaagccgcacaagtgccagacctgcggcaaggccttcaatcgctcctccaccctcaacacccactcgcgcatccacgccggctacaagcccttcgtgtgcgactgacccacagcggcgaaaaggcctacaagtgcaacatctgcaacaaggccttccaccaggtctacaacctcaccttccacatgcacacgcacaacgacaagaagccctacacctgccgcgtctgcgccaagggattctgccggaacttcgatctgaagaagcacatgcggaagctgcacgagatcggcggcgatctggatgacctggacatgccacccacctacgacaggcggcgcgagtacacgcgcagggagccacttgcctccggttacggccaggcatcgggtcaactcacgccggactccagttccggcagcatgtcgccgcccatcaatgtcaccacaccgccactttccagcggcgagacgagtaatcccgcctggcccaggtccgccgtttcgcagtatccgcccggtggcttccatcaccagctcggagtggctccacctcacgattatcccagtggctccgccttcttgcaactccagccgcagcagccacatccgcaaagccagcaacaccatcagcagcagcaaagactctcggagaccttcatagccaaggtgttttga

SEQ ID NO: 16329 - protein, 405 aa, DROSOPHILA
MVYFSPRGMQPCSPAGEIAMMPPSKSPVMESAASEQNPAQQSQQQDEQSAKRACPLKFSIAKIMEPDHRPSQVPPPQPAPVSFATNDDDEDEDPEIDADSERSCSPIEVISLDQSPSTVNYDSAFKKYVPGPCSGATSSVASPPSTAAVQQFVSSRHQELLSQYPLLYYAPNQLMCAAAAAQYAALTAQQQSLASAAHLSSFTASLNASLHHSQSLRRNLGHPLAAAAAVAAVAQSQAVPNLQHTLEKSPVAQRTAQSSGLQANLKRKRSPQDQGEVTPPPASTATSATGARSRSPSPQGSIEDSSPGSASGGKPKTFSCLECGKVFNAHYNLTRHMPVHTGARPFVCKVCGKGFRQASTLCRHKIIHTSEKPHKCQTCGKAFNRSSTLNTHSRIHAGYKPFVCD

SEQ ID NO: 16330 - DNA, 6350 bp, DROSOPHILA
ttttgccccaaaagattcgcaaaggctcaaacgttgaggcatcacgagtggattcatacgggcgagaaaccctttgagtgcaagacctgcggcacccatttccgccaggagacggcgctgaagcgccaccagcgcacccacgagaaccgtccacccgtcatttcgcccaagttttatgccgctcgcgaggagctggaagagcaggaacgcagcaagcgagaggcgaagcgccaggcggatgcgaagcggcgcgaaattgcggaggcggccaaggagcagctatcgtcgctgcacaagcttgaaagtagtgaccgcagcctgcactcctacgatgagtaccaggaggcagcggcggagcgagcagcggcatccgctgaactccaggcgcagcagtttgaagagaacgaagtaaagcgactggcggaggaggagcgccgcaaggttcaggaggctgcctacgagcaactgcaactgttgcagcatcagcaggaggttgacaaggcgcaaagctcctacgatggctactacgctcaaaaagcacatgccgatggcaccactttggatgctttaaaaatcgatcatgtctgagatttggccagcgtttaacgctgtcacagatggtaaatcaatcctgggttttttttatgaaaagcaataccttataatccttatgagaacagtgtgtgtaagatggatatgatatagttttaagctgaaaatattctttaatactatttaatataatgtccttaactgtagtacaaataatactgtacattattcaggagaacacagaatacctatgtgaattcgacttaagtttaatgattctggtctgaatggagaggttgcatgtcaaatatcatcttttcaatagatgaattgattgtggcagttatatatttatatataaagattgtttataagtagcttaaaaaataaatttgccctattaagagcttaaatctaatcggaattttttgttttaaattcataagttttactcctccttgagtatgaatagcttcttaaggctgtctagtgtcatgttctccagatcccagtgggtcgacagcgtagtcgtgtcatcggctgaagtaattagcgatagaatattctcctcaatcgtttcattcacaatgaaacgatgcaccttcgtgggtctaaaaacaattgtattgaaactgacagcaacttcacttcaatagcgcgcactcacctcttttgcccaaatcggtgaatacgacctatggcctggcgctcgtctcccggatttagaatgggttcgacgaggaaaacatgtgtggcttcgatcaggttcaaaccctttgagcctttggacagtggcattagtagacaggtaacattgctcaacggattctaaaggaggaaaaatgtttagcagtgataaattaaatttaacagcaagataaaaaccttgaaatcatcaaagtccttatttgtgcacttattgcggaattgaatgccgttgagactgagcgctctggcaatttcaatgagaatcgcctgccattgagagaatacaataatcttttcctgttcattttcacccttaattttcagcactaattccacaacacttgaaatttttgtagaaaagtcaccaataattgacttgtgggcacctgggcgtaccgagtaatacaacctataagaaatacatggttacaagcgtagtctgtgagggttaatgacaaaagcttactgtggcgaatcttgccgacaaagtggacactttgtgacgccggctcggccgttcttcctcctcatgctatccaggcagtgctggcacacaaaatgcccacataccatcatcacatactaaaacgaaaacaataagtcccgagcgtagaaaaatttgttgaaattttagctacttaccctcacgtcatcttgggtttggcagatgggacacggtttgtccgcggaatcctctttcagatgcttcaggtacttcaaacgaccgcacagtctcgtaaagttcaactgcgatgtctgtagattatactgattgaactgtagctgctcgtccaattggcacgccagtattctgtagttcgattgctcctcaggatcgtcggtgaggaggatgcgcatcttgcacatttccagttcgtcaaaagccttaaccatatactccacctcgatccagtacttgatttgaaacttgaccaagtcctgtaggcaggacagcaattccagtttgctctggcattcctctttccattcgctaaaatcttgctttgaccgcaggaaggcaaagatagctatttggatatagaataaagttattcctgttctttaaataggtttttatgcttgcttacatttaatgaaacttatttccatgctggggttttccaagccctcagtaaccgtagccttttcatccagctttttggcaaacagaagacactcaaattgattcaatgaatcgcgaatcaggcacagccggcaatatcgatgcttcttgggtttcactggtttgtccttatttgcgtcctattaaatatgcgtttattagacatacaagtgtatatgtataagcacacggttgccaaacccaccaaaatatctgtcaaatgacacacggttacgttttctataaagttgattatctccatggagagtaagactcctgttttgatagcctcacaagcttgctgcataactcctttcaggaattcaaactcagcgatcaaagtactcttaagattttgtagcttattatgccatatatccataaagtaaagcattccggccatggagttgacattttctagcctttccacagaaatgttttggcgaaagaagtcatcccggactttgttccaaatagcatcatgaagagaggtcttgtggttcaccatcgttgccagcagatccaatgtactgccctcgaatcgtttctccagctcggaaactttttcaaggttttcgttgtagctgctgagtgcgctttctagcacacgtgtattatcctccaaatacttccactccagccggctcatttgagcctgatactttttgtgctccagttctgttaacttgtgttcagcgggagccaatgaacttgcttgcagaaggttgtatatcgcatgaatttgaagcacactgtcaacactaaatacgtaaaatgatatttcaattatatttgtatcgtatgactaatgaaaaataaaacatacgatatattctgctcgttatactcgttcgccagcttcaataggagattataatacttgatggcttgggggaaatcgttctttataaagtatatagcggccaggccgttgtaggaggatgcccaggtgcgcagctctgtcttacactcgttctcattgttggacttcaaacgcgccagcaaatcctgagggtgcaggtagtcggtgctggacacattgctgttgaacacgactggtactgagcaggtctgccgaatgcggagaaagggcttcaggatgatccgcagcagttgtggtgagatcgacgccaggcaggagctattgtctgcgttgtgacgggtgtgtttggccacagcagcaaggaattgctcgtggcactttaaatgctcttcccgatagtaaagggactccacgttgctcagctccaagcggtgaacaacttccgtttgcggcggaattcccagttcgtgctcaactttggacttgcaggtacgccacaaactatgctcgagaagttccagcagcggctcacatttgtagttaagctgaaaggccttgtcgacggtttgccaagcatccggtggcctacagacttcgggccggcccacgaactccaacaaaggcggcaattcatcaattgtgccagtaacagcccaacgattaatggccggcagcattctaaccatctcggcagctgctgaagtgctgctctcgaccatctggatgtgggtagtttggaaaatattcagtgggccgtggatacaaaagtaaaaaattctcttacctgtgcctcatccaagcaaacgcgccaccagtttaccattaaaagtggagagttgggacgcatgtacctttgttggtggcgcatctggcggtccgacttaaagtccgtcgtatggtatatttcgttacgcagaatcgtatagtcggtaaggacgacatcgtactgggccagatcgaaaggactaacccagaaggttgagtgtaggccgaaataaaggagcaccttaagcgatggcgatatatgcttgtgtatctcttcgaaccactgcatcttgatggcgttcggagatacaatgatggtagcgccgctctcaacaagcctttcgccagactttaccaattcggaccagcagctgggacacaggtggggtaagtctgatttttctgaaatagtcatgcacatttcgtgttgccaccgacggcatttggtgcactgcactcgtttaccgtgtttcttggtgcagatgcagaaaacctcgtcttttttacttatacgtgaccgctttaatggcacttcatcggaaaactcctcgaggcgttggtgccagtaatcgtttcggtaggagtcttgtgggcgcggattcatcagcagcatggccaggaactccacggtcttgcccaggcccatctcgtcggccagaatgccacccggcggcaacgagattttgggaatctcctcctcgaaaggataaaattgtaagcagtatttatgcttaaagacgcgagttataccatcaatggcatggagcactatgaagttggccggcacttgagttatctgctgctcccgccccagcatccaagatactgtgcgctgctggtacttgcgtagctgagattgaaatcttttcggcaggtctagcgaacgttcctgttcaacatgaacggtctggcggtgcttttcgtagagggcgtcgtacaacttggtggttacatatgtttttaagggacgcttgtgctccttctcctgctgggccacctcgaactcgagactgcctctgaagtctttaaagaaaaggggcagaacttgttctcccacttccatctcgatctcacgtgctcgaacatgcgtctgttcatggcttagcaccaggatgcaggagcccgactcctgccgaatggatctgaacttcagctttctcgtccgagcattctggcctgaaatattttcttattaataagtgcaattatagtacgttagcctacacacatttttcaatacaaatcaaaatctcctctttatgctcaacgagattatctttgaacacccatcgcttctttccgtagcggaactccgttggatcctcgggactttctggaggtacttcatcagcaatttcgcacaaaacaacgccatccattgttatttgcgaaataacaattcggacaaacaaatgtgcgatgaccgccaattcgatatacgataacagaaaaatctatatcggacaccaaatgacacacctccacagcttaaatttaacgattgcaacaggggaatctttatgttctctagaaagcaaaacattttcggtaagttatcaaatagcaactcaggcaaaaatgaaaagaaagaaaaccatttaaaaagaaaaccaattaaagaaatatatttataataaagaactgtatttaaatcataaaacataattgtatgtagtttagtttctacaatatgtgcagcggttatcgtgtgaacaagttgaaaaatgacaatcgataaccgattgtgtgaggacacggtcgatcggccgcatatatcacactgagttaatataccctgtaatcgaatattgtccacctctacgaagcagtgaagaaaattatagcgtggttttttcggttgaaaaccaatcaaaagtgcaacaaacagtgagcaaaacaaagtccagccaactcgtaagtgtgcgcccaagcatcccgcaacccttgcaatctcaaacgaccggcatacaaccatttttcgacccgcattcgtagtgtatatgtggagcctgcttggcataattacaaaaatttacgcattactttgtgagagccgagtgttgagctgagtctagtctgtgttcagtgtattaattgcgctattccgcttatccaaatctccaatcccgtcccgcagagccgtgcatgccaagtcatcagcgttccgcgagtccagcgaagattgatcttgtttcccccagactgaaagtgtcaccgccaagacgtacgtgcgaaaaatgttttgggacaagggttatgcgccctccgcgaatatagaggcgctgctcgagaaggaggtaggttgactcgatccgtgctgatcaagtggaaatgtctcagttacgcgtcgtcgccattcgcagaactccacactggagg

SEQ ID NO: 16331 - DNA, 3813 bp, DROSOPHILA
atggatggcgttgttttgtgcgaaattgctgatgaagtacctccagaaagtcccgaggatccaacggagttccgctacggaaagaagcgatgggtgttcaaagataatctcgttgagcataaagaggagattttgatttgtattgaaaaatgccagaatgctcggacgagaaagctgaagttcagatccattcggcaggagtcgggctcctgcatcctggtgctaagccatgaacagacgcatgttcgagcacgtgagatcgagatggaagtgggagaacaagttctgccccttttctttaaagacttcagaggcagtctcgagttcgaggtggcccagcaggagaaggagcacaagcgtcccttaaaaacatatgtaaccaccaagttgtacgacgccctctacgaaaagcaccgccagaccgttcatgttgaacaggaacgttcgctagacctgccgaaaagatttcaatctcagctacgcaagtaccagcagcgcacagtatcttggatgctggggcgggagcagcagataactcaagtgccggccaacttcatagtgctccatgccattgatggtataactcgcgtctttaagcataaatactgcttacaattttatcctttcgaggaggagattcccaaaatctcgttgccgccgggtggcattctggccgacgagatgggcctgggcaagaccgtggagttcctggccatgctgctgatgaatccgcgcccacaagactcctaccgaaacgattactggcaccaacgcctcgaggagttttccgatgaagtgccattaaagcggtcacgtataagtaaaaaagacgaggttttctgcatctgcaccaagaaacacggtaaacgagtgcagtgcaccaaatgccgtcggtggcaacacgaaatgtgcatgactatttcagaaaaatcagacttaccccacctgtgtcccagctgctggtccgaattggtaaagtctggcgaaaggcttgttgagagcggcgctaccatcattgtatctccgaacgccatcaagatgcagtggttcgaagagatacacaagcatatatcgccatcgcttaaggtgctcctttatttcggcctacactcaaccttctgggttagtcctttcgatctggcccagtacgatgtcgtccttaccgactatacgattctgcgtaacgaaatataccatacgacggactttaagtcggaccgccagatgcgccaccaacaaaggtacatgcgtcccaactctccacttttaatggtaaactggtggcgcgtttgcttggatgaggcacagatggtcgagagcagcacttcagcagctgccgagatggttagaatgctgccggccattaatcgttgggctgttactggcacaattgatgaattgccgcctttgttggagttcgtgggccggcccgaagtctgtaggccaccggatgcttggcaaaccgtcgacaaggcctttcagcttaactacaaatgtgagccgctgctggaacttctcgagcatagtttgtggcgtacctgcaagtccaaagttgagcacgaactgggaattccgccgcaaacggaagttgttcaccgcttggagctgagcaacgtggagtccctttactatcgggaagagcatttaaagtgccacgagcaattccttgctgctgtggccaaacacacccgtcacaacgcagacaatagctcctgcctggcgtcgatctcaccacaactgctgcggatcatcctgaagccctttctccgcattcggcagacctgctcagtaccagtcgtgttcaacagcaatgtgtccagcaccgactacctgcaccctcaggatttgctggcgcgtttgaagtccaacaatgagaacgagtgtaagacagagctgcgcacctgggcatcctcctacaacggcctggccgctatatactttataaagaacgatttcccccaagccatcaagtattataatctcctattgaagctggcgaacgagtataacgagcagaatatatctgttgacagtgtgcttcaaattcatgcgatatacaaccttctgcaagcaagttcattggctcccgctgaacacaagttaacagaactggagcacaaaaagtatcaggctcaaatgagccggctggagtggaagtatttggaggataatacacgtgtgctagaaagcgcactcagcagctacaacgaaaaccttgaaaaagtttccgagctggagaaacgattcgagggcagtacattggatctgctggcaacgatggtgaaccacaagacctctcttcatgatgctatttggaacaaagtccgggatgacttctttcgccaaaacatttctgtggaaaggctagaaaatgtcaactccatggccggaatgctttactttatggatatatggcataataagctacaaaatcttaagagtactttgatcgctgagtttgaattcctgaaaggagttatgcagcaagcttgtgaggctatcaaaacaggagtcttactctccatggagataatcaactttatagaaaacgtaaccgtgtgtcatttgacagatattttggacgcaaataaggacaaaccagtgaaacccaagaagcatcgatattgccggctgtgcctgattcgcgattcattgaatcaatttgagtgtcttctgtttgccaaaaagctggatgaaaaggctacggttactgagggcttggaaaaccccagcatggaaataagtttcattaaatctatctttgccttcctgcggtcaaagcaagattttagcgaatggaaagaggaatgccagagcaaactggaattgctgtcctgcctacaggacttggtcaagtttcaaatcaagtactggatcgaggtggagtatatggttaaggcttttgacgaactggaaatgtgcaagatgcgcatcctcctcaccgacgatcctgaggagcaatcgaactacagaatactggcgtgccaattggacgagcagctacagttcaatcagtataatctacagacatcgcagttgaactttacgagactgtgcggtcgtttgaagtacctgaagcatctgaaagaggattccgcggacaaaccgtgtcccatctgccaaacccaagatgacgtgaggtatgtgatgatggtatgtgggcattttgtgtgccagcactgcctggatagcatgaggaggaagaacggccgagccggcgtcacaaagtgtccactttgtcggcaagattcgccacagttgtattactcggtacgcccaggtgcccacaagtcaattattggtgacttttctacaaaaatttcaagtgttgtggaattagtgctgaaaattaagggtgaaaatgaacaggaaaagattattgtattctctcaatggcaggcgattctcattgaaattgccagagcgctcagtctcaacggcattcaattccgcaataagtgcacaaataaggactttgatgatttcaagaatccgttgagcaatgttacctgtctactaatgccactgtccaaaggctcaaagggtttgaacctgatcgaagccacacatgttttcctcgtcgaacccattctaaatccgggagacgagcgccaggccataggtcgtattcaccgatttgggcaaaagagacccacgaaggtgcatcgtttcattgtgaatgaaacgattgaggagaatattctatcgctaattacttcagccgatgacacgactacgctgtcgacccactgggatctggagaacatgacactagacagccttaagaagctattcatactcaaggaggagtaa

SEQ ID NO: 16332 - protein, 1270 aa, DROSOPHILA
MDGVVLCEIADEVPPESPEDPTEFRYGKKRWVFKDNLVEHKEEILICIEKCQNARTRKLKFRSIRQESGSCILVLSHEQTHVRAREIEMEVGEQVLPLFFKDFRGSLEFEVAQQEKEHKRPLKTYVTTKLYDALYEKHRQTVHVEQERSLDLPKRFQSQLRKYQQRTVSWMLGREQQITQVPANFIVLHAIDGITRVFKHKYCLQFYPFEEEIPKISLPPGGILADEMGLGKTVEFLAMLLMNPRPQDSYRNDYWHQRLEEFSDEVPLKRSRISKKDEVFCICTKKHGKRVQCTKCRRWQHEMCMTISEKSDLPHLCPSCWSELVKSGERLVESGATIIVSPNAIKMQWFEEIHKHISPSLKVLLYFGLHSTFWVSPFDLAQYDVVLTDYTILRNEIYHTTDFKSDRQMRHQQRYMRPNSPLLMVNWWRVCLDEAQMVESSTSAAAEMVRMLPAINRWAVTGTIDELPPLLEFVGRPEVCRPPDAWQTVDKAFQLNYKCEPLLELLEHSLWRTCKSKVEHELGIPPQTEVVHRLELSNVESLYYREEHLKCHEQFLAAVAKHTRHNADNSSCLASISPQLLRIILKPFLRIRQTCSVPVVFNSNVSSTDYLHPQDLLARLKSNNENECKTELRTWASSYNGLAAIYFIKNDFPQAIKYYNLLLKLANEYNEQNISVDSVLQIHAIYNLLQASSLAPAEHKLTELEHKKYQAQMSRLEWKYLEDNTRVLESALSSYNENLEKVSELEKRFEGSTLDLLATMVNHKTSLHDAIWNKVRDDFFRQNISVERLENVNSMAGMLYFMDIWHNKLQNLKSTLIAEFEFLKGVMQQACEAIKTGVLLSMEIINFIENVTVCHLTDILDANKDKPVKPKKHRYCRLCLIRDSLNQFECLLFAKKLDEKATVTEGLENPSMEISFIKSIFAFLRSKQDFSEWKEECQSKLELLSCLQDLVKFQIKYWIEVEYMVKAFDELEMCKMRILLTDDPEEQSNYRILACQLDEQLQFNQYNLQTSQLNFTRLCGRLKYLKHLKEDSADKPCPICQTQDDVRYVMMVCGHFVCQHCLDSMRRKNGRAGVTKCPLCRQDSPQLYYSVRPGAHKSIIGDFSTKISSVVELVLKIKGENEQEKIIVFSQWQAILIEIARALSLNGIQFRNKCTNKDFDDFKNPLSNVTCLLMPLSKGSKGLNLIEATHVFLVEPILNPGDERQAIGRIHRFGQKRPTKVHRFIVNETIEENILSLITSADDTTTLSTHWDLENMTLDSLKKLFILKEE

SEQ ID NO: 16333 - DNA, 2606 bp, DROSOPHILA
tattgaaatatgtattttttttgaaatctctaactaagctgcgatctgctgtatgtgttcatcgttcataacaatgaattgctgcgatttaatcaaatgtggcaggtgcttttattttttttttatccatgctgctgccacaaaaaattgcacgcagccagcgatcaaaactggttggctgcaactccgaaaaccactttggatctttttctgaagtcttgtttgatttgctcaaattagcgcatggtgagccaaaaaacctgctggcgtccccctctaaaaaaaaaaaaaacactcgcaacatgtggcacgtttccttggccgggcaattgaaattgaaaacttcgcagcaaattgttggcacttaattgagtaactccgatcgatctcgatgtgctttgcataaattgaaagggggcctttggaaaaagcgttctgggagtgggtgcgtgatgtaggtgtcatacgaagtcggctgtcagttggctccgatcgtgtctccgcatcgagccgcattgtttacaatctgcaggggttcgaatggacaccttacctaccttaccgcaactgcgattgccaggtgaccacagaggactgcgactttattgattcgattcaacaattgaaaattttttgatcttttgtggttgattttctgacacaattgggtcatagttcttaaggtcgtgcaggtggtgcaaatgaaccatggacaattgaataccattgtacttttgaggcagagaaaatatctatgattttacacattcattgtcacttgtgagatgttttaatcaaataattcaacgcagaatgggttccaaattaaaatgcaaaaaaaaaacgaaccaaatttcgttcaacgttcaaagacatttattttgttatagaatatatagaatattgtgtaaaacatttaaactacattctattactttcatgaatactaaaaactgttcgttgtgacgattctcacaaaatttgcattgctgccatgactctaactttgtcgatcttcaattttgacttctacaattaggccgccaacatttttgccaccactgaagaatgttataatggccttgacaatccctcgaggcacctgcgatggccaatcttgcgtattcaaaatgacgttcttaacgtagaattcgccttcgggcactgggcaaaagtcatcgtcgacaacggggaaatttgtggtttctccagtcttcagagagggttgcacaaactggacatagaactttttgaagcactcgcaaatgctagtttgcggcacatccatgaccatcctcttgaattccccatcgccattggggcttgaatagagctccacggataccttgaagtcatcattgttcatctcaccgaggaatttgaaggatccgttaagagctctctcccggccaatcgttttcagtccatcgaagagcactaaagtttgtgaatcgccctcgaaaggctccaacctttcattggtaacctcataggactgctcgcactgttgaatttattttaatgggtatttgaaataaaaacataattaatattcgaattttacctttattttttccagcagttggaggagtactattatcactagccatttcattttgaactgttgaatgcctccagcaagctcatctaatttattagattgcgacttgctttttggcacgcgaaattcatgtttcagtcataggcacgaattcattaacgaccttgttgtaccgaaggttacattgtatttgctgatcctgatctctatattcgaacaatatacttgttaagttttaattgatttaatgcaaagcggccttatttacagctataaatatatatatagagcattaaagtttgtaatgacgaaaaaaaaattttagaattcaataacatatgtattacgataataaacattgttgtttattatataaattgaggttcgtttaatagcacgccatgtagaaaaatacgggattgcaaaatcgtgaaattgtctaatatatttaagcatttactaatacatatatgctattcaaccagaaatggcaccatgttcttaacgactttaagtatataatcaatcagtttcctagtcctaggtgcctattcatatgacgcgttgaaagtccaactaaaacaattcaatttgttggaatcgccttcacttcaccttcccccaccagatgctagccccgaaaattccaccgaagtcccatcaacacatcatcgaaatttgggggaaaatccccccaaaaatgagcgataataaagcattaattgaaaagttataaacaatagacagcagcgactcgagaatgtgtagactaaagacacgaaatacaaaacaactaacacaaaaagtgcgcaatgcctgaaaaactaaactcagcaggagatattttacattttcacggatggatttccccagaaagtgtgtgccagagcagagggcgagatagtttatatttataacaaattcattcaagatccaacaagggggaaagcggctccaattttttttttttttatatttttggggcgggagacactgaaataggggacaccacgcgcccgcgcctgccacagcctataaataggaa

SEQ ID NO: 16334 - DNA, 546 bp, DROSOPHILA
ctagtgataatagtactcctccaactgctggaaaaaataaagtgcgagcagtcctatgaggttaccaatgaaaggttggagcctttcgagggcgattcacaaactttagtgctcttcgatggactgaaaacgattggccgggagagagctcttaacggatccttcaaattcctcggtgagatgaacaatgatgacttcaaggtatccgtggagctctattcaagccccaatggcgatggggaattcaagaggatggtcatggatgtgccgcaaactagcatttgcgagtgcttcaaaaagttctatgtccagtttgtgcaaccctctctgaagactggagaaaccacaaatttccccgttgtcgacgatgacttttgcccagtgcccgaaggcgaattctacgttaagaacgtcattttgaatacgcaagattggccatcgcaggtgcctcgagggattgtcaaggccattataacattcttcagtggtggcaaaaatgttggcggcctaattgtagaagtcaaaattgaagatcgacaaagttag

SEQ ID NO: 16335 - protein, 121 aa, DROSOPHILA
MNNDDFKVSVELYSSPNGDGEFKRMVMDVPQTSICECFKKFYVQFVQPSLKTGETTNFPVVDDDFCPVPEGEFYVKNVILNTQDWPSQVPRGIVKAIITFFSGGKNVGGLIVEVKIEDRQS

SEQ ID NO: 16336 - DNA, 9258 bp, DROSOPHILA
agcgctaggcaaattcccttaaagcccgaaaagttttcatatttgggcagcaatttggccagtccgccaaggatgctgaaagctggaaaaggtattcaagtcggaaggcagcacagctatatggaattggagacaatgtataactatatagcttacacattctggccagcggttcgcagatatatctatccacggaggtgctgttgctgagctgcatgttcttgcacatcgcctgcaccaccttgatccacttcagaatcaaattcaggtagcaaggtagcggctgggtgagctcatcgaacctggtgccctgggaatctttggccagcagttcgcccacttgggccagcaaacggggcaggcgatccaggaacttatccaattcggtcatcaccagtggcaccggatcaaagatatagttgggattggcatcgcgatacggatgatcttgcgtctggctgaaggcctggacgcttacgttgaagtttaggcccaagacacggaagcactggcccacaaactggtgtgacaccttcacaatccagttatccgggtcagaggtcacggcctgcagaaaagcaatggcgaattccctggccactgtctacattccacattacgtcaacggtagcataagacacgataatcccacatacttacttccgtgttaccaactgtcgaaatggcgcttacaaattccattttaaaacggttacttaaactgacgccaagttttaaaaactttccttcactgagcatccgttttgttttgataagtgccagtgctgaaaatagtatgaaaatggatcgataagcttgatcaatggatatcgattgatttttggcgcgcagaaacattcaaaattaaattaaacattttgaaacataatatttacatcacataactatttatattatattttcaagggtgatgatgaacacattatatactttaagtccttttccacaattgtgcgcctttgaaataaaatccaaagttgagatttccaacaaacagtttattgagaaaatattcataaatgtacattctgtattcagtagcatatgctactaaatgcatatatttacagcgaagatgcacatgtaaaattatcgaaaatgtccgagcttcgagcaagggaaatgcgctaataatacaaaatttacattataaatatttcatgttcactacatatgtaactaaaatagaagcctaaattaaagtaaatacagtgttcttcaaatcttttttttttttttttttattaattttttattatttattgaatcttccctttgggttaagagactaacaataagtgttcaaatcttaatctaacttaattaactttcacttagtgatagtttttttttttttcattaatgccctaataagtttattgctgggctgggaggtcgttgcggtgcagccggctttgactgcatactcggattagttttcttgcgaggggatttgtatgggtggtcagcttttcgttatacttcgtttttttctcagctattacttcgattactaatttgatttttaggtctctgggtatgttttcgtttcgaaggtaccacggcgctccagggataattctcagaattcttgactgtgctcgctgaataatgtctatgttacttctggatgcgttgccccacagctcggagccataagtccagataggttttaagacggagttgtatagaagagctttgaactccagactaagtggagagcgagcatttatgagccagtggaggttccttgctttaagtttaagatgtttcgatttggcttctatatgtttgcgccaagtgagccgcctgtccagatgaactcccagatatgttacctcgtcggcttgtggaatgcatatgttattcaagaccagtggtgggcatgtttgtttgtttaaggtaaaggtaacctgcttgcatttttgaacatttattgaaattctccagtcggcaagccatcgttctacagatgttaagtgtcgggataggagtgcccgtggcttttattgggcatttcgagcgactgagtatcgcggtatcatcagcgaacgtggaggttgttagattgtagtctatggggaaatccgccgtatacagggtgtataagattggacccagtacactgccttgcggcactccagcttcgattgcgcaatcgcgtgaagtgcttgtatcgcatcttattgcaaacactctgttatataggtatgacttcagtagcttatgtgtgttttggggcaacagcttgattattttaaacaaaagtccatcgagccacacctctgtcaaatgcctgcgcgacgtctaagaaaaatggctgtgcagtattctcgatgttaaaagcagtaccgaatttctacgtagattcggttgcctgttcgatggttccatgtttttctctaaagccaaattgatgtgttggaagtgtgttgttattctaagatgagggctaatccgaggagtagcattttttcaaacagctttgaaagacatgttagtaagcttatcgggtctatatgatgatggctgcgttttatcttttcctggctttggaatcattactatgggtcgactttttccatttttgagggaagtatccaagcttggcgattgcgttgaacaacaggcagatgtgaagaaagcacactttgggagttcaatgagcattcttggagttattaggtcgtagccaggcgattttcttgggttcagttgctctttgataacctttgctagttacatggtcggaattcaaagggttcttgaggatctagattggctgctattaaaggagggagaataaatgtgttggtagagggatttggtcggaatacattttgtaaatgggcagcgaaagcacaggctctttcttcatcacttcgaagccaggtgccagagggacttcgtagtggcataattggcgctattggagtctttaggtttctggagctctccaaagagggtacttagtgctggtgggagagagttgctcgatatattgaacgttggctgtttttttcctcttgtttgagagcattggtaagcctgcgtgtggctatcttaagcatgtgcttagtaattggtgatctattagactgccaatcccttcgtaggcgtcgtttatctaataccagccgctcgatttcgcgattagttttgatgtagtttggttttgcatacgtcactggcggggttgaagcctttgcagcccgaaactaaaaatgttttcaagagtttccgttgacttgtctatatcctcctttgtagataatgcccgtcgttagttctatgtgtgaacagacaatacttttgataccttggccagtttgttctaaaatttgtgagtctatacggtgggtcgacgatgtgggggcgagttagcatatttagaaaaacaggtgagtgatctgatgataagtctgctagtgcttcggcggtgaccatgttgcgggggacatgtttagtaattgcaaaatcgatcaggtctgggatttttcttgggtctgctggccagtatgtaggcttacccggggatacatagtctagcttgttttctggcttcgtaagcgcattgtacaattgcttaccctttggcgacacaagtcgagatccccaatggggtgtgcttggcgttatagtcacccgctgcgatgaacctgtcacctagtgtgttaaagaattccatgaattgatcctcagagattggaaagcgcggtgggcagtagactgcggctagagtcgttgaaccattgttgagttgtaaggctatggacgtagattgtaagtagtttttgtcaaaattgtttaagtggtggtgttttatgcgatttctgatgagtattccagtgcctccatgagctttaggtcgtagccaggcgattttcttgggttcagttgctctttgataacctttgctagttcacatggtcggaattcaaagggttcttgaggatctagattggctgctgatgatttgtaccatagaacaagtatcctggtatatgaaaattgtttttatttgtgaggtgcgtttctgatagtagcattacgtcgatgtttttttcgtaaatgaactgtgtgagctcttgggtatgcccgggaaacgccatttgcgttccacagagatatccgtagggaagcccattatggggattttgaagatacaagaagttgaatcaggatattttggtttttcatgagctcttgcaaagtattttgcatgaacgtcataaagtctttcatgctttgctgtagggatagcatcatagcttcgatgccactttgttgtgtttgttggatgtttgtcggtgtatgttcggaatgagcagttcttgtcggtggggcgggcacttctagtccggattttagggcgctagcgaaagaaattgttggagtagtgcttgggacagttaggggtggttgaaaaatcggttgcggagagtagaaattgactttgttgtatgtatgtgctggggcaatacgtttgtttaggcggctcttcaattctttggacacccacacagcctctgtagtttgcagtatgtttttccccgcagtactgcatttcttcacagacttatcgtccttgtttttggggcagtttgcggtagtatgaggttcgctacagacaacacataccggacttaagggtgcagtatgccttggtgtggcccgtattcttggcaattagtacattgaactggattgatccgtttgtgcggctcctcccggtgatcctccgatgtagcaagtactgcaaattgtatattgggtgcacttcgtttttctttagtgcctggagctctggttcgagttctattttgaatagtggctgcggaactttgtctttgtttaaaatattaatagctgtctttgcagaaaagtttttggccttcagagcctcaattatctcagctggtgtcactgttgcttcaatgcccttaagtactacctgtagccctttgcaactttttaattggatgtgtagtagtttttaccagccatcatttaggatttagtcactataccggtggtctgcttctgttggatctgtagttttatttcatgaatatttccttttttaagtgggataatgtggaacttgctgtcaccaatcaaagcaacgagtttatttacaagtgcatttgtactttggtctcgtatgaaaattggtggaggcctggtcttttttggttcccctaccgttttttcgttgggttgttcggtcgcagaatcagccaagatagcatatcggtttgaattatttactgcagagttttcattgccgttgttggttcgattgattttgggttgattacctgccttattggtttgagggctgagctttctcttgatttggatgtagcgatcccatgccagtctgcacagtcgaaatcgacttctgcttttgttttgattcttctttacgtgcattattgttgttgcaaacggtcagtgctgctgaattatttacagctggcacagcgataattagttgggccgctgacgaagttgatgttgtggcagttgccagtgaggtcactgcactcgttattgcagtgttacagttacccgggacggtcgtttggcgctgcgagaggagcggggtaggagaggcggtctcttcgctccacgacttgtgagccgaagcaggcagagagggagagcaagaacgcggtctgtcgttcgctgagggcaaaagtttcgagttagttgaaggtgagggtgctcgatcaccgatttgcggtgagacgaaagaaaagtatgcattgttgcgttgtaaagagagccggcgctcgtcttgttcacattgtcgctgagaacgtatgtcgttttgattcattgttctaagtccacatataacaattaccagaacaatatggaataattatttattttagtaaataattactatagtcaataattgttagttgtgcaaactgcactttacactttgtgtttaactttcactatactgttgtagtttttagaacttgctattcgtagcttgaaagaaacacgtctccacccgaagactgaagactgatttgaagatttgattcttcaaatcaaatcaaatttgctacttaaacgccagagcaacaacttatatgttttggtgaagaaaatcgccaaaaatgcaaatacttgaatacatgccaacattttttaaatgcgaccaatctgttttactcttgcccaagcaaaatgacactggaacaggtatttagggggctatcgaatgggctgtgagacaggcactttagtgaccccttcgtttccaccgcgatcttaaagttaagccaattccggcagcagatctgatctttttggtttgaatgctaaaatatgtcttgtacttgaattccctggacgttcccatctaccgcactagtacttctttagttgttcgtaggtaataaaaaatatgatattccacgggcccatcctcacccaggtgggaatgaaacctttgtacagggcgggtagaccttcgttcctgatagtctgtacagcacagtctaggctgccgctatacagctttggtgtggctgctgccgtgaccactccattcattgttatgctaacgggacgctggttcatcaggcgcgtctgcaagaagaaatagatgacaatacaagcttaaaaggcacgtaggctttacatacccggattacatcaataggcgttgaggcaatggcactgcctagactggcaataaagctcgagctgcaatttgggaaaattaggcactatgctcgcgattgttatacgtcacttacatgaaatgattgccaacgtgatctccgaaggcattcattaactgcagcttgcaaaagtcgtagacgggcagctcaacggaggcgataactacggcacgctgagccgtcggacccacaccacgccacagtccacgaacgccctcgtatttgtagatctcaccgaagcagcccagcaggcccttgtgctgtcccttcccatgcacctgcattcgcactttcagcacgtccgtggggttagcaatggccgaagagatcgctcccgccgccgccgcgcacaaaatattgctccacacacgctcgctgccgtcctcgttgatcagcaagccgcgttcgttggccagcttcttcagggtgtagtaggttccaaacttgatggtgccataggtcgcttgtctcaaaactgctggccaaatactataacaaaattattagagttatcaaaatgcaataaaaccaacagtaaaaatcgactttaaacttgaatataatctattgaaatgaactctgacttgggatcaatatcagatacgtagcctaatggttcggttggcgggcaaagtttgccgactgattaaatatgactagaatatatttttggccggccgtgagtaatcattatcaatatatgcctcctacagtacaatttcaatagcttgaaaccttacgtatgcagtttatgttgtgtttaagttaaagaaattccaattatgctgatacaatcatttaaatagctcactaagtgagatttaaaagtatatcaagtataattctcttcgatactcttcgacttttggaatagctcattagttcaccatagagagattccactgtccgtgcactcattatgctccccagcggacgaacacgtgaccgtcacgtttggcgcgataagaatggcatgatggtaccatgttttgacaacgtgccaaccggagaacccccacagattcttacccggaatagagggccctcagcccctcctcgcgggagatttttacaaaggcatcggtcatgccgcgatatcgcagctgcgagaacgattggtcgattttctgaccttggatttggaggcgcgtcttcgtcgtgtcgataggaaaggtgcctgcaatgaatagaatttgtttacaaagattcgatcgcggcgatagcagctaccagtgcatatagccgacgtcccagttagggggcgtggcgtgctgtacgccctgctatgtacttgttgtttaccaaattccgccgtgattgaggcgactccgccgtaaacgaagggccgccaatccttcacttcacccatatccggcgtcgcacctgttgatgtccggaatcgaaacgaattgcgcttgccgcacggaagcgctgcactctcgccgctctgttgcgcaacgaattagataaccaagcagttttattgggattccatcgcttaaatactttaagttgcctaaagtttagagacacaatcaaaaacaacaaaaacaactgggggctgtagttcagtgtggtcgcaactttttgcacgcgaaatattgttacatctcgcaattgattttggtcacacttaacagcgggaaatggctttcccgccaaatttgaattgaaaagaaaacatttcagaaaagtttttccctggaaaaatttccacgggaattattattaattgtataaaacttctaaatttttttgcattggaaaaaggtaagcgagaattcaatacgtggtagaaaacttggctagaaatttgctattctacaattttaaattgtggaattcaaatgtccatgtaaaacatttaaataaatttagtaattaacattatgttataattattaaataaagggtaggtacatatacatatttattaatgaacataatatgctaatttatttaattgaactaactaaatattcaaatattatacgcttctgtagtttatggcccagtctgtatattttattcgaaaattaataataataaaataccgatcagagattagccaatgacaaatattaatcgtaacggtgcgatagcatcaaaacaaatcgttcacgattcacaagtcaaatgaaaagtggaccaagaaactcagtcgtgcgacgagtttcaaatgaatatttcatttgccaccggtaacaagtcgtatgagcaacggagatctgggaattcctagtgaccatgcccatagccatggccccgtggtccatctgggaatccagtggttcaggttctgcggcgacgaccttagatggcattttgcattggttttttaccctcttgtttttttgcccatctctctcggcatttgtttggtttgtatcgctggcaaatacgcataattattgcttgtttttttggcaaacgaaacgaaaatcgctggcagtgtttactacgagttttctatgtatgtttaattcacgtcacttgccgcgaaaccggatcgtgaaagtcgccggcc

SEQ ID NO: 16337 - DNA, 1636 bp, DROSOPHILA
ctaaactttaggcaacttaaagtatttaagcgatggaatcccaataaaactgcttggttatctaattcgttgcgcaacagagcggcgagagtgcagcgcttccgtgcggcaagcgcaattcgtttcgattccggacatcaacaggtgcgacgccggatatgggtgaagtgaaggattggcggcccttcgtttacggcggagtcgcctcaatcacggcggaatttggcacctttcctatcgacacgacgaagacgcgcctccaaatccaaggtcagaaaatcgaccaatcgttctcgcagctgcgatatcgcggcatgaccgatgcctttgtaaaaatctcccgcgaggaggggctgagggccctctattccggtatttggccagcagttttgagacaagcgacctatggcaccatcaagtttggaacctactacaccctgaagaagctggccaacgaacgcggcttgctgatcaacgaggacggcagcgagcgtgtgtggagcaatattttgtgcgcggcggcggcgggagcgatctcttcggccattgctaaccccacggacgtgctgaaagtgcgaatgcaggtgcatgggaagggacagcacaagggcctgctgggctgcttcggtgagatctacaaatacgagggcgttcgtggactgtggcgtggtgtgggtccgacggctcagcgtgccgtagttatcgcctccgttgagctgcccgtctacgacttttgcaagctgcagttaatgaatgccttcggagatcacgttggcaatcatttcatctcgagctttattgccagtctaggcagtgccattgcctcaacgcctattgatgtaatccggacgcgcctgatgaaccagcgtcccgttagcataacaatgaatggagtggtcacggcagcagccacaccaaagctgtatagcggcagcctagactgtgctgtacagactatcaggaacgaaggtctacccgccctgtacaaaggtttcattcccacctgggtgaggatgggcccgtggaatatcatattttttattacctacgaacaactaaagaagtactagtgcggtagatgggaacgtccagggaattcaagtacaagacatattttagcattcaaaccaaaaagatcagatctgctgccggaattggcttaactttaagatcgcggtggaaacgaaggggtcactaaagtgcctgtctcacagcccattcgatagccccctaaatacctgttccagtgtcattttgcttgggcaagagtaaaacagattggtcgcatttaaaaaatgttggcatgtattcaagtatttgcatttttggcgattttcttcaccaaaacatataagttgttgctctggcgtttaagtagcaaatttgatttgatttgaagaatactgtatttactttaatttaggcttctattttagttacatatgtagtgaacatgaaatatttataatgtaaattttgtattattagcgcatttcccttgctcgaagctcggacattttcgataattttacatgtgcatcttcgctgtaaatatatgcatttagtagcatatgctactgaatacagaatgtacatttatgaatattttctcaataaactgtttgttggaaatctc

SEQ ID NO: 16338 - protein, 303 aa, DROSOPHILA
MGEVKDWRPFVYGGVASITAEFGTFPIDTTKTRLQIQGQKIDQSFSQLRYRGMTDAFVKISREEGLRALYSGIWPAVLRQATYGTIKFGTYYTLKKLANERGLLINEDGSERVWSNILCAAAAGAISSAIANPTDVLKVRMQVHGKGQHKGLLGCFGEIYKYEGVRGLWRGVGPTAQRAVVIASVELPVYDFCKLQLMNAFGDHVGNHFISSFIASLGSAIASTPIDVIRTRLMNQRPVSITMNGVVTAAATPKLYSGSLDCAVQTIRNEGLPALYKGFIPTWVRMGPWNIIFFITYEQLKKY

SEQ ID NO: 16339 - DNA, 3728 bp, DROSOPHILA
gaaaaaaagaaataaaaactagttctagacacacacagccatccccccttcgaagcccctgccgccgtaaaaaccttatttcgcccatattttcgattcgattgcgtataacaagtttagcggtctcgctatccccgcccccttctacaaaccgttctttgacttgatataaagtgcttcgcatccatgcaacgtcgtcttcaaaccccaagccccatgccccatgccccatgccccatgtccccgttgggtccaaccccctcgccaacacaagccctttccccttcacacagacatatatacatatacatatattatggttcgcttttaatttttgttttgattctatgcttttgaaactgctgcactgagaaaaattcaggctatattcctaacatatttattcttaataagtaacgatttgtgaaacgtatttattaagcaaatattgagatataattgacatttcacccattattatatttactaatcataaatacttaattttcttagactgttaatattacttgaacgaagtgctcagtgtagttttgattaatattgtgtacatgttgaatttgaggttttaagaccccatgtggagtggcccgtcttcttaatatttcctccatgccttgtaattacccaaatttggcgtcactatccgttaaagggtttatttgttggacttatgggatggggatagacaggaaagcggtaaaatggaattgaggtgcatatctatggagttgcactaacgacatcttaaacgctactatgtatggtagatactctgtgagagtttttcaaattgaaataggcaacgtaaagtaagtatttgataatatctacatattcaaatattctaaaagatatattctaaagagcacgtaacccattccatctaatagaattgatattcatctaatcaagtgttttattttattatttattaacacatatgcttacactttaaacttgttaattagatttatgccttttaattctcatgcaggatatgcacatccttccagaacacatgatctccggagatttcaacagccagggcgtcatcttccagaaatctttcgaaggggtaacccaagggcagttcatcccatcgactgacaccctggctaaagtcacaattaagttcgttttcctgccgagccctaaaatcatacacactggccacgatcagaagacgcaatttaaggggatttcccaaaccaccacgcggtaaaatcagacgtcgagggaatgcacaatttgcagttgatatattgaggggaaagtcgaattcatccctttcggccaatttaacaaactgatagagttcggtgtatgagatgtgatctccagcgaggcctttaaactccttcgattccctggttattcgattcaatccagggtatatcacagtcaggaacgaatcgagttgatagaatggctctctttgaatgtttcctcctcgctcagaagtggttagaaaaactcggaaaatggtcgattgtgttttgttactcgatatgagcaggttgtatgagaaatccttatgttgcagtcgaaattgtcgatgttgcaaagtaaaaggccacacaaactggccggctaagtaaaaatgttgggcggccagaatattactaatatcaacatcaacaggttgatcgtaggtaatcaaaggagttatctgcatatcatctatgcgaagatcactgggaataaatgttttctggttattcggttggaaaacctgacgataccagcgataagaatccaataatcgctcagcatagtaataaaagtcttcggatctcactatagttcgaatatccagtaaaatattagtttcgataacttcatccacagctaattgtgtccaatcatagggaaatagttcttcaagtccgattagccaattgttgttctcattcagattaatacgacttccattagttagctgaatactttgaaatgaaatggtatccccaacttttgcctccaattctgatatctttttagttataaattggaattcctcgtttatgccacgattttgtgtcagcctcttgtaagccatcttttggccataacattcaagtttataacgagccagtatttgactcaactgatagtagcaccattcgcgcaactgatctgaattttcggctgttaaaatcactcccatgttcagattataccaatacgattgccaatctatatcttctaacaagtgttctaacttatttctctttttctgttcattcatccttagaatattcacatcagccatggcctgaaaccattcaatggtacctcgaagattaccttccaaatttaaaggttccaatttttgcggatggatttcttctacatcggtcatattcacgtatcttatccagttggcaaaattgaaatttcttgcttttctcactgttacatcatcgtgatacgattctggccacaattcatagatcttgggcataatcaaggcctgatagtcctctcttttgaggatcaattgagtgagagcttgaacaaaaatacacggatgcacatgaactcgggcccagcttatattttgccataaggtataccaatccctggcgttgtagaaaaattgatataatcccagcatctgccgataatgatcggcatagaggggattatatcgtacatttcgatgtaaaagttttcccaaactgaagtcttcatagaaacgtgtcatttgctcgttgtagacctttgaatttcatatattttagttatgaatacattttttaatttcattccgtataccgaccacatactgttccttatctgtcaccaattgttttcccaataatcgccactgttcgttcatcaaaggttcgttaacatgatgtagaatttccaacaaaaaacgctgcttttccaaaaagtaacgatttgctacatgttaatgtgtgcattagggattgaaataaattctaagatattccacattatttaccgatgccattagcaagcacctccaagtgaatattaagtcccaacaatgataagaacacacaaagtctcatctcgcacttgtttaccacacaccacaccaaaataaactgaatggcatcgtgcaaattgcattgtgattacacgctaataatagcttagctttcttccaaaaaaaaatttaagtagggtggctattttaaaatgagataatcaattatggagcttgcatagaagtgcacagaaaatcattgctttaaaatttaaaatatacaagcaaatgaaattcattgacaaactcaaatcatttcgattctctttaaatgagaacaaaaacaagtgttttcaaattaactaaatacacgtttcttttctccccttaattgcctattgttcgataatacatactgaaatactgttaataagatggaaaatgagtctcatttgcctattagtcaccaagagtggcacaataatgcaaatcgcttttcaccaacgatcacttcccgctccttttgcgaaaatgtgcggacattaaattgccaactcagtggctttgtggggtctctgatgtctgattttttgatttctgatgcctgctgatgactggatggcggaaaaaagggcaaattataatgcgagtaatgttaattacagtcagcgcgacttcggatgtctcggtatctgtatctggcccattgttcgtccagaaattggcgcattaatgtaaatcggcagcc

SEQ ID NO: 16340 - DNA, 1728 bp, DROSOPHILA
atgacacgtttctatgaagacttcagtttgggaaaacttttacatcgaaatgtacgatataatcccctctatgccgatcattatcggcagatgctgggattatatcaatttttctacaacgccagggattggtataccttatggcaaaatataagctgggcccgagttcatgtgcatccgtgtatttttgttcaagctctcactcaattgatcctcaaaagagaggactatcaggccttgattatgcccaagatctatgaattgtggccagaatcgtatcacgatgatgtaacagtgagaaaagcaagaaatttcaattttgccaactggataagatacgtgaatatgaccgatgtagaagaaatccatccgcaaaaattggaacctttaaatttggaaggtaatcttcgaggtaccattgaatggtttcaggccatggctgatgtgaatattctaaggatgaatgaacagaaaaagagaaataagttagaacacttgttagaagatatagattggcaatcgtattggtataatctgaacatgggagtgattttaacagccgaaaattcagatcagttgcgcgaatggtgctactatcagttgagtcaaatactggctcgttataaacttgaatgttatggccaaaagatggcttacaagaggctgacacaaaatcgtggcataaacgaggaattccaatttataactaaaaagatatcagaattggaggcaaaagttggggataccatttcatttcaaagtattcagctaactaatggaagtcgtattaatctgaatgagaacaacaattggctaatcggacttgaagaactatttccctatgattggacacaattagctgtggatgaagttatcgaaactaatattttactggatattcgaactatagtgagatccgaagacttttattactatgctgagcgattattggattcttatcgctggtatcgtcaggttttccaaccgaataaccagaaaacatttattcccagtgatcttcgcatagatgatatgcagataactcctttgattacctacgatcaacctgttgatgttgatattagtaatattctggccgcccaacatttttacttagccggccagtttgtgtggccttttactttgcaacatcgacaatttcgactgcaacataaggatttctcatacaacctgctcatatcgagtaacaaaacacaatcgaccattttccgagtttttctaaccacttctgagcgaggaggaaacattcaaagagagccattctatcaactcgattcgttcctgactgtgatataccctggattgaatcgaataaccagggaatcgaaggagtttaaaggcctcgctggagatcacatctcatacaccgaactctatcagtttgttaaattggccgaaagggatgaattcgactttcccctcaatatatcaactgcaaattgtgcattccctcgacgtctgattttaccgcgtggtggtttgggaaatccccttaaattgcgtcttctgatcgtggccagtgtgtatgattttagggctcggcaggaaaacgaacttaattgtgactttagccagggtgtcagtcgatgggatgaactgcccttgggttaccccttcgaaagatttctggaagatgacgccctggctgttgaaatctccggagatcatgtgttctggaaggatgtgcatatcctgcatgagaattaa

SEQ ID NO: 16341 - protein, 575 aa, DROSOPHILA
MTRFYEDFSLGKLLHRNVRYNPLYADHYRQMLGLYQFFYNARDWYTLWQNISWARVHVHPCIFVQALTQLILKREDYQALIMPKIYELWPESYHDDVTVRKARNFNFANWIRYVNMTDVEEIHPQKLEPLNLEGNLRGTIEWFQAMADVNILRMNEQKKRNKLEHLLEDIDWQSYWYNLNMGVILTAENSDQLREWCYYQLSQILARYKLECYGQKMAYKRLTQNRGINEEFQFITKKISELEAKVGDTISFQSIQLTNGSRINLNENNNWLIGLEELFPYDWTQLAVDEVIETNILLDIRTIVRSEDFYYYAERLLDSYRWYRQVFQPNNQKTFIPSDLRIDDMQITPLITYDQPVDVDISNILAAQHFYLAGQFVWPFTLQHRQFRLQHKDFSYNLLISSNKTQSTIFRVFLTTSERGGNIQREPFYQLDSFLTVIYPGLNRITRESKEFKGLAGDHISYTELYQFVKLAERDEFDFPLNISTANCAFPRRLILPRGGLGNPLKLRLLIVASVYDFRARQENELNCDFSQGVSRWDELPLGYPFERFLEDDALAVEISGDHVFWKDVHILHEN

SEQ ID NO: 16342 - DNA, 4230 bp, DROSOPHILA
tgtgttgaccaacacttagttagtatatttgtacagcgacaatatcatgcatttgatatttttttggtatatttatcatcttggcaacatggtaacttttgttgactcatttgcggtcacactgctctctagggcgtatcttttattatttacgttgtgtatttgtgttatctgttttattttgaaaagaaaccccgctttattaaacaaaacatgcactaccatacgaatctcattgcagccctgctgctggcagctctaattcacgagggtaagaagtatttccaacgccctcaccaaacagttacatatgtatgtactataacatacaatttgttgacaggctctgcaatttggtgctaccgctgcacttcggccacgcccggctgtgcggagaagtttaactggcggggaataggattcctgggcgagcactgcccggaaccggacgacatttgcgtcaaggtgacggagcgacgcggcggtaagcggaaatcctctgttatccgagcttcattaacaaatgaaactcgcttttagccagggaaacaatcacacgtgactgcctaagcgcgctgagcttccgcaaagacattcccgccgacaaatacgaaggatgtcgtcctgccgcccacgatgaaaagctagcgaactacgtaaaccacacgatcaaggagcacgacgtgcgccgtgactactacacggacaccacgttctgtttctgcttcctcgaccatcgatgcaatggggccagcggcctacaaacgtccgccgtaatcggtcttctcactctaattcctgccctgcttctacgctagaatctcctcttgagtgcagtatttaagtgccttactaactcgctctgcaactacgaattccgtccaacattccacactttttgtacaaccttttgacatgactacagcttttagagtcttgtgtttactcaactaattaaatacattttaccatatttataaacaggagtgaaatcgttgctttaaaggacctctacattcttgggcgcccggtaatcataggcagccacctcgggtcgcgtcaccagatgctccgaatagacttccgccaacctcaggcactgctccacagttagttcaaagggacgcagcgtgtcctgtacttcggcgcgctgaaatagcttctcagcaacctcctcgcgatcttctggaggaagcagggtgccatagcctcggcgacagtacttctggcgcatgctaaagatgtgacggactacgcgctcaactaggtgaaacggcaattgagtcttagggcgctttaggggaattagcttgacgacgcccacatccacctgtggtttcggaacgaacgccttgcccggtatggtgaacttcatgacgggttccgtccacacctgcgacatcaccgagagccggcagcgctgttcgccgcctacaggggcacaaattcgctcggccacctcttgctggaaggtaagagtcatacaggtgtcgatgcgccggaaagcaccacgcctggcggccaaatcatcaagccaattgatcaacagtcgagtggatatggcgaacggcaggttgccaatcagatggatccgctgtgaggtgtccgggatgtgctgctcaatgttgaagcgcaggatgtcatcatagtggatgtcgaactggatgtttagtggactggcgcattccttgagcaactgcagtgtttcgccgaagcgcggatccttctccacaagcaacaatcgctgtgggtgacgacgcagaatcgagcgcgtgataccgcccggcccgggacccacctcaagaactaaatcccggggatcgatgcgtcccgccgacttgactatcttgtccgtgagccgctcgtccatgaggaagttctggctaagctgtttcctggcctgtagtctgtatagcttcaccagctcccgaattgtgggcattggaggcaggcgcatgccgctttggagcacacgggcactgggttgggccatctgcaagcgtattatataaaagtaatataatatggaagtgactgggctgatatctagactcaccctgttgtgcaacgacttcaaaaagtgtaaaactgttgtaaagtgaagaaaacgcttacgaactagggataactaacgcggacagtagctaggaagacaccttcttgggctcctcgaagtcgtccaggaacttctcctgttgcaccgaaaaaatggagtagccgtagatggccaaaacggagacacccaaagcgccggcggtcagtagattgttgcggcggatgcgctttagcttttgcacgcggtccaggttctgctcctcgatcagcttcatgaactgcaactgcgccttgtctagcttcggagcgctttccccgtacttgattttaggtccctgctccgacgccgacattataaacgctgctaaacggcctttttttcgtgctttcctcgccgatttgagaattatgaaatctgtcgcacggtaatagtgtggccgcagctgaccgtcagatagaacaagcggtcacactgacaaaattcacaaggcactgttaagtttacagcttgctgggaacggtacttttctgttattattttcattgggttaacaaatgttatattgtcaaattcctgtgttaccttttgaatataacatattctataacatataatataacaattttatttagttagatacaataaattatggataaacttcaaattattaaattaaaaattttaatttgttcataagttaataaaaaaatatggtttgcacttaattgcctgtttttaattccttcaatcatcatcattttcgctcgatccggcagcacttacgcagcattacaactccgtggctgcgtggtatattttggcgccaccacgtacggtcactccagcgcgagctgcgcgtttgcgtccgttataacgagtgcttagttttcctcgatttggggccctgcggaattggcagttcactttcgttggtggctcgagtgcgacgtgaagtgcggcagcgaagagcgcttttccaggcacagtgcgccactacttgcctgcaagtcagccacagcaatttctcggtaattgcgttgcaaagtgcgtaattagagcttagggggaaaactgcgttttccgcaataccagaacgtgccccattttcactagagcgtacgcagatccgtgagttcagtgattcctctaagctcaatgtggtaacgagagccatggcgatgactttgaaatgcggaaatgaaagtacaaattcggttgcgtgctggggaaacggctctgaaaattttacagccaataacaacaaaggcaaaacaaacgcgtaattgcagaaatcagctgtgtacctacggacgaaccagagccccataaagagaggggcatatgccccctgccctgcgacccattatccccccttcgtcctcaactttggagcccaacagctggtcgcgaagccctctctctcgcgcgctctctctctctgcttgttctcgccttttatggactaacttttgtttttattttgatttgcttttctggttcagtttgtgtttttctgtttattatagtttcattttcttttaacttgacttttaagactttgattcttatagttcttatgtttttcgcaaaaatatttactttaaatgtatctaaatttgtaatattcatttttcctgctgaaaagaacacattcttttatttgtcatgaacactcaaaagtgtattagtctcaaatcgcctaattaaggtttcttaaaagtgtgttaaaaagaaatactacaaaaaaagtaattaaaatagttagtttttagtttttcaaccccaatcgaacagttcttattcctttgttgttacagcttaggcaggtgaaaattgctattaattatgaaattccctcttgcagttaaatcaaacgcgtttcgtcaaccgccgtccgcttaggcaaaaaaaagtaaacaaacaatacaaatctacactctcacgcgaaaaacaataaagcgatcgttcggaaattagtgcaacgtagacaaaggcaactcaatccgcatccagatccacaaaagatggcgttcatttcgaaagactttcggtcgccgggggaaacttggatcaaaaccgatggcggctgggagcgttccaaggtgctcgagtgcggcggaaagcggaagcggtaagcttacaacattttttcaaaaggcctttgaatggcgata

SEQ ID NO: 16343 - DNA, 1449 bp, DROSOPHILA
atggctctcgttaccacattgagcttagaggaatcactgaactcacggatctgcgtacgctctagtgaaaatggggcacgttctggtattgcggaaaacgcagttttccccctaagctctaattacgcactttgcaacgcaattaccgagaaattgctgtggctgacttgcaggcaagtagtggcgcactgtgcctggaaaagcgctcttcgctgccgcacttcacgtcgcactcgagccaccaacgaaaatttcataattctcaaatcggcgaggaaagcacgaaaaaaaggccgtttagcagcgtttataatgtcggcgtcggagcagggacctaaaatcaagtacggggaaagcgctccgaagctagacaaggcgcagttgcagttcatgaagctgatcgaggagcagaacctggaccgcgtgcaaaagctaaagcgcatccgccgcaacaatctactgaccgccggcgctttgggtgtctccgttttggccatctacggctactccattttttcggtgcaacaggagaagttcctggacgacttcgaggagcccaagaagatggcccaacccagtgcccgtgtgctccaaagcggcatgcgcctgcctccaatgcccacaattcgggagctggtgaagctatacagactacaggccaggaaacagcttagccagaacttcctcatggacgagcggctcacggacaagatagtcaagtcggcgggacgcatcgatccccgggatttagttcttgagcgattgttgcttgtggagaaggatccgcgcttcggcgaaacactgcagttgctcaaggaatgcgccagtccactaaacatccagttcgacatccactatgatgacatcctgcgcttcaacattgagcagcacatcccggacacctcacagcggatccatctgattggcaacctgccgcgtggtgctttccggcgcatcgacacctgtatgactcttaccttccagcaagaggtggccgagcgaatttgtgcccctgtaggcggcgaacagcgctgccggctctcggtgatgtcgcaggtgtggacggaacccgtcatgaagttcaccataccgggcaaggcgttcgttccgaaaccacaggtggatgtgggcgtcgtcaagctaattcccctaaagcgccctaagactcaattgccgtttcacctagttgagcgcgtagtccgtcacatctttagcatgcgccagaagtactgtcgccgaggctatggcaccctgcttcctccagaagatcgcgaggaggttgctgagaagctatttcagcgcgccgaagtacaggacacgctgcgtccctttgaactaactgtggagcagtgcctgaggttggcggaagtctattcggagcatctggtgacgcgacccgaggtggctgcctatgattaccgggcgcccaagaatgtagaggtcctttaa

SEQ ID NO: 16344 - protein, 482 aa, DROSOPHILA
MALVTTLSLEESLNSRICVRSSENGARSGIAENAVFPLSSNYALCNAITEKLLWLTCRQVVAHCAWKSALRCRTSRRTRATNENFIILKSARKARKKGRLAAFIMSASEQGPKIKYGESAPKLDKAQLQFMKLIEEQNLDRVQKLKRIRRNNLLTAGALGVSVLAIYGYSIFSVQQEKFLDDFEEPKKMAQPSARVLQSGMRLPPMPTIRELVKLYRLQARKQLSQNFLMDERLTDKIVKSAGRIDPRDLVLERLLLVEKDPRFGETLQLLKECASPLNIQFDIHYDDILRFNIEQHIPDTSQRIHLIGNLPRGAFRRIDTCMTLTFQQEVAERICAPVGGEQRCRLSVMSQVWTEPVMKFTIPGKAFVPKPQVDVGVVKLIPLKRPKTQLPFHLVERVVRHIFSMRQKYCRRGYGTLLPPEDREEVAEKLFQRAEVQDTLRPFELTVEQCLRLAEVYSEHLVTRPEVAAYDYRAPKNVEVL

SEQ ID NO: 16345 - DNA, 3364 bp, DROSOPHILA
aaatggttgttgcaaacatgaaaacataatgtgggcttattggaatgacttaggacctacctggagcttgcgtttgcgccatttttccagctgattcagtcagtaattcatataaaactaaaattaagacttttgttgactgtttgtccgactggccgcagttatcgattggcaggaaaatcgatttatctttgacagcgatgtaataactgtttccacttatatattccaaagcgttcacactgctgaaattaagaagtaaacatttttagatgaataacaagtttagactgagttacatcaaaaaaaaaagcctcggcataaattattaaattacctaataatataaaattatttgtttgttagttttcaaatgttgtaatactttagattaaattcaaaaattatgctaactagctaacttaactaaatcgccacaaaacttttaggttacccaagtaactgactaatttaatactaatgagtttactgctgtaaaatatgtttatttatatttctttatttctttataaaatgtgcttttcttaattgaattttttttctatttaagttttgcgtacacacttataagtaaggcagctaagatgcaaattgatgatagttgctctaaaattgagaaacaggttgggcttgaagaaccaccaggtcattcacgaatccggattcttgggcttatcgctttatttgggcctatggctctatttataactgatcgtatcagtttagggggccacatagcctcggcccaccccactgccaccccctggaggagatcctctgcagatctgcgatcggagaacgaccttaaacgccctaccgcagagagccaaagctcccggcttcggattctccgaggaaagctccggtctggccggcgattggtggcgccgataaggtgtaaacagtatttccagttcagttcgcccagcgatcctcttgcattcggaacggaactttccaagattaagcagctttcattatgtggacagatctcgcgggcaaggtgatcttggtgaccggagccggggccggtattggccaggcgttggtcaagcagttggcctccgcgggtgccaccgtcatcgcagtggccaggaagccagagcagctccagcagctggtggccttcgatccggtgcacatccagccgctgcaattggatctcagcggctggcaggcggtgcgtgaggggctggcgaaggtgcctctgctggacggtctggtcaacaacgccggcgtggccatcatcaagccattcgaggagctcaccgaacaggatttcgacacgtaagttaatggttatcatcctattgtcagctaaaagctgtgctatcaagcctagttttggaataagtaaaaaagtacgaaaaaattacttttacccaaaattaaaaaaaaaaaatagtgtttagttggtatccctagaaaacacaagacaatttaattaatcttatcttatgtttataacaatttttattgccagcaaacatttctaaacctatttgattctctcttttcttcactaaaagtaaaaataacatatataaacgagatactatggaataaaatgtactttattttgaagtatcgtacttcatatgtatcgtatttatcaatgcaaatgattaaatttcttaattaattaataaaaaatcatccaaatggaatattaactaagcggaactctcgttcttatcaaaaacaagttctgcttgctttttgaaagatcacgatcagcgaatcgttaaactatgataacgattatcatgatcagattgtaagaaagggcaactggtagcccactctaattgaccttcagcattaaacttagcatattaaaccaattatcaatcccaaattagttttggaaaaatgactggcatccaattttaactaacatcacgatttccatttccttacagccacttcgatgtgaacatcaaggcggtgttcaatgtcacccaatctctgctgccccgcttgaaagacggagcctcaattgtcaacgtgtcctcgatagcgtcatcccgatcctttggcggccacacggcctacagtgccaccaaggcggccctcgattcgctgaccaagtcgctggccttggagctgggtccgcgcaaaattcgcgtcaattccgttaatcccaccgtggtgctgaccaaaatgggcgccgacaattggtcggatcccgccaagagtggaccgctgctggcccacataccgctgaatcggttctgcgaggtgcaggaggtggtggacgccaccggctatctgctgagcagcaagtcgagcttcgtgaacggccaccacatcctgctcgaaggtggatattccgtttcctaagacgccagcgttaacttcaatgtgcaagcccgaaatttgatacaaatgaaatatgattgaattaaaactgtggaaattccatgattttataatactctctccataaactaaacacaagggtaaggttaaaaaaaaaatgccattttgtttgtttgttgcttacgaatacatacatctttgaaatgtatttaaaaagacaattttgtgcttaaaccttaagttttgcgcttaaaactagagttggaaaaaaatccatagatatacaatttcattttatatttataatccgcctataaacgacacttgcaacgtgctctcctgtcggtctaaagacgtttgtatttgcacaagattaaataggagagtcgttgcgcaacacgcgctgatgtgaatgccacccaagctaggcgcatatcttgccctgctgctggctctgcagttgctgctgcttcttctcgcgctcccggcgacgcagcttcttgcgccgccgatcgataaccgccagttcgcccttgatggtattgtaggccttgcgcagatcctggatctgtttgcgcaggatcgtgatgcattcgtcggagctgagagctggatctgcagtggaaagcggacggttagatggaaaccaattggtgtaggaaattcactttgctcttacccagctcgacgaggaagttgtacggacatggacgcacgcccgaagagttggtcgactggatgccctgcggcagttgcgtctgctgctgttgcagcaattgctgttgctgctgctgttgcgcattgctctggggcatcatgtgctggcgggcgctctgccgtggctgctgctgctgctgtcctgcgttcggcgctatgttatccgagttgtcgtcggtatcggagcccgctgaaaatgaaggcaagtgtcattgatctactgatctacttggtcaaggatctactaggatcaacgctaacttaccggcggtggttgtggttttttgattgcgcattccggaaa

SEQ ID NO: 16346 - DNA, 729 bp, DROSOPHILA
atgtggacagatctcgcgggcaaggtgatcttggtgaccggagccggggccggtattggccaggcgttggtcaagcagttggcctccgcgggtgccaccgtcatcgcagtggccaggaagccagagcagctccagcagctggtggccttcgatccggtgcacatccagccgctgcaattggatctcagcggctggcaggcggtgcgtgaggggctggcgaaggtgcctctgctggacggtctggtcaacaacgccggcgtggccatcatcaagccattcgaggagctcaccgaacaggatttcgacacccacttcgatgtgaacatcaaggcggtgttcaatgtcacccaatctctgctgccccgcttgaaagacggagcctcaattgtcaacgtgtcctcgatagcgtcatcccgatcctttggcggccacacggcctacagtgccaccaaggcggccctcgattcgctgaccaagtcgctggccttggagctgggtccgcgcaaaattcgcgtcaattccgttaatcccaccgtggtgctgaccaaaatgggcgccgacaattggtcggatcccgccaagagtggaccgctgctggcccacataccgctgaatcggttctgcgaggtgcaggaggtggtggacgccaccggctatctgctgagcagcaagtcgagcttcgtgaacggccaccacatcctgctcgaaggtggatattccgtttcctaa

SEQ ID NO: 16347 - protein, 242 aa, DROSOPHILA
MWTDLAGKVILVTGAGAGIGQALVKQLASAGATVIAVARKPEQLQQLVAFDPVHIQPLQLDLSGWQAVREGLAKVPLLDGLVNNAGVAIIKPFEELTEQDFDTHFDVNIKAVFNVTQSLLPRLKDGASIVNVSSIASSRSFGGHTAYSATKAALDSLTKSLALELGPRKIRVNSVNPTVVLTKMGADNWSDPAKSGPLLAHIPLNRFCEVQEVVDATGYLLSSKSSFVNGHHILLEGGYSVS

SEQ ID NO: 16348 - DNA, 2506 bp, DROSOPHILA
aatcggatcaagatttcttaccatgataaaaggaacaccttttcccagtttcattttattcagatgattcttttgttgtacatgctaatcgatgtcagtaggactatccttgctctaatttgactttcattattatacaagtgttttttctctgttcgcccgtgtataaaacgagttatctcagtttccagctatcagttgtaataaaaatgcggtatctgtgcgttttttccttaacacttatcctttgctgcctttcaataaaggctcagagcttaaattgcaccaggcttcgagaaaattgtcgtccttgcacccgccgcttggtggatcctattaacgacctggaattcattaatagcgattgtagggagaaacttagaggacgttggatttggcgggatgtaaggcgttgtgatatgcaaattgttgcgtgcgaaagtaagtataatatatataagtatttaaaaagtatagtatatagtatgaatgttttaaattgcagatcatgaaacccgactggattgcgagaatgtggctagactaacaggcatgagacggattcgttgatttttcttagctcttgagagaaatttaaagctatttgtctttttaaacaatatttttagacataaataaagaattatgtgtgtacgagcaatgtaagtacttgtgtgtattttattttccgcaagtccatagttggacaaaatcgagctaaatcaagctgaaaaacgacctttgtccaagtttttaatatatattgttatctatcttctacttagcaaaggtaaccaaaagaataacctatattttgggatttgagattattaaaatatttcattaaaatattgtagcaagaaaatatacatttattgaattacaaaatatatcaaagttttgcagaaagaacaacccattcgattgcaatatttaatgagagctagaacttaaaatattacttttaaataaaaataaagaatacaaaattgaatcttgttaaatatcatttctcgctttcagtttatttagggtggtttaaaattttcaccaaagacgcatgcggtgggcaacattcttgcaagtcggtgtttcgcaatcgcgcacagtagctgaataattagaaaaatattatatttggtccttcttaagcttttggagatgttcactcacataaacaggctattcgcagaagatcacatcggctaacatctgaccatccagaatccgaacggcgacagtagtcgttaaagaactttgaagtatcgtcctgttttcccaacctagcttcattttcaatacacttatcgtaggtgcgaatgcagattttatgacgcctgttagcttcttcgggattggcttgtatgtgagccataaacaggcacacaatagctgtgagaaagtagctttattaccactttataaatacctattgatagaacttacctaatggcagcaaaagttttaacatggcgtaacgcttgaaatagttttaaggtctaaactggctacactggaacgtgtcccgtggtatttatacccataactatacacttaaagctgtcatttgtaattgtccaaaaagcgctacagaattaattaaaaacccaactgcattaaacacatgtattgggatcatatctgtttctttgtccagattcaatgaataataaattctttatgttcaataaattggggacacttaagacctcgcttccttgttggccatcatatataaggccctattctgaatatggttttatcagagtgtatatcaccaataagtgatttgaaaatgaagttgactgtctgcttcctggtgatcctgggctgtgtgatagtccatggccaatcgcccgactgcaaggaaataaaggatatttgctcgaaatgcatccaaagacttaatgatccctacaacaaggtggacttcataaataaaggatgtagaaacagagttagaggcagctatgtatggaaggaccagaatctttgcgaacttcaagcgatagcttgttcgggtaaaccaatatcttttcattaactttaaacactttcatcaatgtttaattggttattttcagctccgaatcgagcaatgaattgtgttgtcatcgccgatgttgccaaaatgcgcagagtgactccaagacctccaggataataaatgtagcatatggccaaagcatatgatattcactttcgggactggataatatttgtttctcattttcttgaagcaaatatattgaaattcaataaaatgcatttatcaggaattctgtttgtttatatagatttactaccattgccaacgcttttaaggagtataatataaatctcacaaatattaaaacagctagcgaagtaatatataaagttaactacactagacttgcaggcttaattacgacaaatgtaattcatgcttattcacgttctagaaaaataattaacttggaataattatctgttaagtcaaagtccagttaaagttaaaatttaa

SEQ ID NO: 16349 - DNA, 390 bp, DROSOPHILA
agtttagaccttaaaactatttcaagcgttacgccatgttaaaacttttgctgccattagctattgtgtgcctgtttatggctcacatacaagccaatcccgaagaagctaacaggcgtcataaaatctgcattcgcacctacgataagtgtattgaaaatgaagctaggttgggaaaacaggacgatacttcaaagttctttaacgactactgtcgccgttcggattctggatggtcagatgttagccgatgtgatcttctgcgaatagcctgtttactactgtgcgcgattgcgaaacaccgacttgcaagaatgttgcccaccgcatgcgtctttggtgaaaattttaaaccaccctaaataaactgaaagcgagaaatgatattta

SEQ ID NO: 16350 - protein, 108 aa, DROSOPHILA
MLKLLLPLAIVCLFMAHIQANPEEANRRHKICIRTYDKCIENEARLGKQDDTSKFFNDYCRRSDSGWSDVSRCDLLRIACLLLCAIAKHRLARMLPTACVFGENFKPP

SEQ ID NO: 16351 - DNA, 3497 bp, DROSOPHILA
ctttcacaaattacacacttaactttagcactacgatggcttggaaagcagcatgtgtcaactgccagagtcggcatttctagaatgtttttaggtgcgagttctttatgttggtggcagggggagatgctccattgttcggtgggtttgacaaaagcgaaattttaatgagcacagcgctgaaaaaaaaaaccgccaaagaaacttttgttgtgtcggccacgcattgttttcaccatatttatatatgtatgtgagtcgtatatagttatgtgtcaggaaaacgcatcaaagtgcaatttttatatccgggttgcagttgggaaactaacaagagaaagcgcttagctgcaccctcccctcctcacatccgcatccgcatccacatccgcatccgtcgacatcagacaagagatggaagacaggacacaggacgcaggacatgggacacaggacttgcagcagctgctccatcgtcgcctgcttcataaatcataaaaaactttcaccgcacgtcgccgaacaagaacaactcccgacaagccgccatctctaccccattcccccacttttcccatccagttttccctcccgggaaaacttgcccccgcaaaactaaccaacagctgctaagcgttgagtaaatgttttcgcgcctcgttgccctctcaaattcccaaaacgtttccagttgttggtattagtggggctatatggcggatgtggcacgtgattgctgcagtagcccccccccccccccccaacggaactcccaaaaactcataaataccgagaaaagctgggatgccgagcttcaagtttttgggcgttatagaacatgctggataatattgcaatggcttgagagcattttcattgagcttgatgtattgacatacactttttatttcaaaaacatgtgacttaattcatttgacattgaacaacgtatacctaaggaaccataacattaatcattgctttaaaatgcacatagaacctatagttccgaggtaggactggtggtaacttgaacctgctcagtttcttcagcatgaccttgctcctcatttccctggacattgccaattttctcgtccccttgagttgttccttcctcgatcggagtctccgttgtcagctggggcacatcctcttccacgggtgaaccagtagtgccatccttggttcctcctcctcctgtttcccagtactgcatcacttgtagaatcctgggttgaatcgaacgcctagcacttatgccccagatcatgtccatgtggttccatttgcggtacagatggttctcgaccacattaggcaacactttggccaatcggtgtacatcctccacggccgaaaggtaatcattactgccgtagtacagggccaccggagccttgatcctttccaggcggtaatccggcggtgtggaacgtccgtacagcctttggttctccttggattcgtaatcgtactggcagaagcgatcggatttttgcatttggaggtagtggagcgcttgtttgatattgcagccaccgggaagatggcccaaaaccacagggaacatggtctgtataagaatagggattatatgagtatatcagatggagtttcataacaatacctaccatattttgctcctccctattcttgcctacaatctgccagtagaatcgcatacaggtctttagcatggcggcagaggaaaggcactggttgagaaatacttccgagtgcggaaacagctcaaaattgtcgccaaacatgttcattcccatgcgggctattcccataagtggtgccttcatgtgcttcataaaggccacgggtgccagagcgctcatcaaatggatcttcgcattatactcgggtctactggaagccattacgaagaacgaggtggttccctgggagtgaccgaagtagctcagcttttggtatcctgttttctgcagaactccatcgatcatcgctggcagatcgtacatgccaatctcgtgccaagagaagctccagtaggacttgtccgtattggggttgagtttcacgtggcccttggagtaacgattccccctgacattacccatccagacgtcgtatccgttggcgtagagaaagtaacccaggccactttcgggacccattacgatccaagtggaagaggtgtcctccagtccgtgaaccagcagaactggcttggctccaggtcgagctatgcgatgaagggtaaggatatatttatcatcggtggtcacctggtgggtctccgctggatgcttgtacttttccagtagttgtatctaaacggagcatgagaggaacagttcgatgagttaagttcccataaaacttggacctaacttaccgtattcaggtgagcatcctcaatcacgcttgccgggtaggtgttctccatgaacccgcccaacaccccggatccatcgagcgtatagatcccgagcactacgagaatgcagatcgcatgtggcatggcgttcgatcagtgactaaatcgagcttagtccaagcccactgggccactaaagcgctgtaattagtacggaatattgtttgagtggattttctacgcttatcgtataatcgaatcgtgaccagctcattttcggttgtatgtgccggaaaacgtttttaaattgaggcaaataaaaatgtttttaaaatgccaatgggcaaagttaagtgttattcactggcgtaaattgctgcgatatgtccactcatttaataaccaatcaatctgagttgttcagacgggaaatcagctggaacggctagacgagataccttcaaagttaaacgaataaagaatccatacataataactataagtgccttaattcattctaaattttaatatacttataattataatagatctaaaatgagtttcaatataataccttcgcgaattaaatcacccctaattatttttccatttccactatacgttagaataaatattttaaatgttgaatactttttttttacgtatttaagggtttgtatccacatcctaatgcgcaccatcggccaaatcaaaaggcccttctttaatcagatttgccatgccacttcgaaaagcgtatgatcctagaaatgtttgccggcttaattggaaaattaaatttttaattcagttgtggagtgaaccgtgtccacttgccaaacatttgaattcgtccctttcattgcctacgtcatcgctttcttttttcgcaattgattggcaaaaattgatttcggcttctgcataaaatattcgtcgctcctttatttgcagcaactgctgtcacaacgacgactgacaggctgacaaagcgccgcggacggagcggatagagcggatggagtggaatcccttccagacccggtccgtgtccggattttcgaatcggactcggatccgactccgatgacgggggattcgtaggctcgatgtgtgactgtgtgccggccaacgtttcgacatt

SEQ ID NO: 16352 - DNA, 1374 bp, DROSOPHILA
atgccacatgcgatctgcattctcgtagtgctcgggatctatacgctcgatggatccggggtgttgggcgggttcatggagaacacctacccggcaagcgtgattgaggatgctcacctgaatacgatacaactactggaaaagtacaagcatccagcggagacccaccaggtgaccaccgatgataaatatatccttacccttcatcgcatagctcgacctggagccaagccagttctgctggttcacggactggaggacacctcttccacttggatcgtaatgggtcccgaaagtggcctgggttactttctctacgccaacggatacgacgtctggatgggtaatgtcagggggaatcgttactccaagggccacgtgaaactcaaccccaatacggacaagtcctactggagcttctcttggcacgagattggcatgtacgatctgccagcgatgatcgatggagttctgcagaaaacaggataccaaaagctgagctacttcggtcactcccagggaaccacctcgttcttcgtaatggcttccagtagacccgagtataatgcgaagatccatttgatgagcgctctggcacccgtggcctttatgaagcacatgaaggcaccacttatgggaatagcccgcatgggaatgaacatgtttggcgacaattttgagctgtttccgcactcggaagtatttctcaaccagtgcctttcctctgccgccatgctaaagacctgtatgcgattctactggcagattgtaggcaagaatagggaggagcaaaatatgaccatgttccctgtggttttgggccatcttcccggtggctgcaatatcaaacaagcgctccactacctccaaatgcaaaaatccgatcgcttctgccagtacgattacgaatccaaggagaaccaaaggctgtacggacgttccacaccgccggattaccgcctggaaaggatcaaggctccggtggccctgtactacggcagtaatgattacctttcggccgtggaggatgtacaccgattggccaaagtgttgcctaatgtggtcgagaaccatctgtaccgcaaatggaaccacatggacatgatctggggcataagtgctaggcgttcgattcaacccaggattctacaagtgatgcagtactgggaaacaggaggaggaggaaccaaggatggcactactggttcacccgtggaagaggatgtgccccagctgacaacggagactccgatcgaggaaggaacaactcaaggggacgagaaaattggcaatgtccagggaaatgaggagcaaggtcatgctgaagaaactgagcaggttcaagttaccaccagtcctacctcggaactatag

SEQ ID NO: 16353 - protein, 457 aa, DROSOPHILA
MPHAICILVVLGIYTLDGSGVLGGFMENTYPASVIEDAHLNTIQLLEKYKHPAETHQVTTDDKYILTLHRIARPGAKPVLLVHGLEDTSSTWIVMGPESGLGYFLYANGYDVWMGNVRGNRYSKGHVKLNPNTDKSYWSFSWHEIGMYDLPAMIDGVLQKTGYQKLSYFGHSQGTTSFFVMASSRPEYNAKIHLMSALAPVAFMKHMKAPLMGIARMGMNMFGDNFELFPHSEVFLNQCLSSAAMLKTCMRFYWQIVGKNREEQNMTMFPVVLGHLPGGCNIKQALHYLQMQKSDRFCQYDYESKENQRLYGRSTPPDYRLERIKAPVALYYGSNDYLSAVEDVHRLAKVLPNVVENHLYRKWNHMDMIWGISARRSIQPRILQVMQYWETGGGGTKDGTTGSPVEEDVPQLTTETPIEEGTTQGDEKIGNVQGNEEQGHAEETEQVQVTTSPTSEL

SEQ ID NO: 16354 - DNA, 2556 bp, DROSOPHILA
cccaaaatggtaatgaaattttgggttcgagtgctatcagcatatacatgtacatgggggaatccccccagccagccaaactccactcgagttgttattgttgttgttttggcacgtggcacgtgcaacgtggccaggaaatgccctgaaattgatttttatttttattttagttggaagtcttcgctttttttgctcctcttgccccgaggtcttggcgtaattatttctgtccgctgttccagcatgtgattagattttccagtaaaagtttactcagcttttgttgtcgctcgatgataattaaaaatgattagctcataaatatttcctcctgtcgagggtgagatttatgtgaaggtaaacaaggagacagcagatgccccaagggcaaaagaaaaatatattccactcaaaagtaatgctcatggagaatttaggggaggcaattgtaaagtttgtggatatgctaataaaaacgattcaaatttaaataagtaatgttttattctgtactttaatatttaaagatgtattatatcggcaatattatcacaattcgcgtccattgcatttatctggttcactagagtttataaaaattaaaaattataattggtatattaaattacttgcatggattcttacacaaacactttgtagcttcaaattcacaacgggtgatattgctccacttggacccaatttcctggctgcagtttcgattcaactcatttgtcattctattgaactttcccattatgatttcagtttcctgacactttagcagaaaatcattgcatttgaataaatccccaaaatagttgccttcacttgctacaaaaacactgacaacttttgacgcgaaataggtattaaataatattaaagccatatagtaaagaggcttaccgatcagcaccgatacgattgacatctttaaattaacttaatatgagttcccattttaactgcatttatagagttggaccttaaaattactttgtttgcctttattaacttttgataaaacaatgcgtttattgccagactgttattgcttaagcttttgttaatatcttctgttgctaaacaaaagaacattttttatccagacttgattacaattccaagacatctgcaatgttgttacaggacatatcatcacagcgtcgaaaaatcactaaaatataaaatcagtgagcgctgaataagacttaaattgaaaatgtgactcacgaagacaggtggctttttccatttcacatcgagacacactgttccaccttcctctgcgctcccgacgacaatgacgattaaaggaatctatagtctcatcaaatcgtcctattctggatgtaaatcgttgacaatcgttatagatattctcacagtacactcgactccattgagcatcaatgtggcacaattgcaggatacaaagaactgcaaaaaaaaaatgtgttgttagaaatataaacaatcgttgacaaaataaaactcttacccaacagcaagaatattttccacatttttaagttttccaatctgatatgatctacactatctgcgcggttgtatttatattggcaatcggatcaagatttcttaccatgataaaaggaacaccttttcccagtttcattttattcagatgattcttttgttgtacatgctaatcgatgtcagtaggactatccttgctctaatttgactttcattattatacaagtgttttttctctgttcgcccgtgtataaaacgagttatctcagtttccagctatcagttgtaataaaaatgcggtatctgtgcgttttttccttaacacttatcctttgctgcctttcaataaaggctcagagcttaaattgcaccaggcttcgagaaaattgtcgtccttgcacccgccgcttggtggatcctattaacgacctggaattcattaatagcgattgtagggagaaacttagaggacgttggatttggcgggatgtaaggcgttgtgatatgcaaattgttgcgtgcgaaagtaagtataatatatataagtatttaaaaagtatagtatatagtatgaatgttttaaattgcagatcatgaaacccgactggattgcgagaatgtggctagactaacaggcatgagacggattcgttgatttttcttagctcttgagagaaatttaaagctatttgtctttttaaacaatatttttagacataaataaagaattatgtgtgtacgagcaatgtaagtacttgtgtgtattttattttccgcaagtccatagttggacaaaatcgagctaaatcaagctgaaaaacgacctttgtccaagtttttaatatatattgttatctatcttctacttagcaaaggtaaccaaaagaataacctatattttgggatttgagattattaaaatatttcattaaaatattgtagcaagaaaatatacatttattgaattacaaaatatatcaaagttttgcagaaagaacaacccattcgattgcaatatttaatgagagctagaacttaaaatattacttt

SEQ ID NO: 16355 - DNA, 439 bp, DROSOPHILA
catatcagattggaaaacttaaaaatgtggaaaatattcttgctgttgggtaattgtatcctgcaattgtgccacattgatgctcaatggagtcgagtgtactgtgagaatatctataacgattgtcaacgatttacatccagaataggacgatttgatgagactatagattcctttaatcgtcattgtcgtcgggagcgcagaggaaggtggaacagtgtgtctcgatgtgaaatggaaaaagccacctgtcttctgatttttcgacgctgtgatgatatgtcctgtaacaacattgcagatgtcttggaattgtaatcaagtctggataaaaaatgttcttttgtttagcaacagaagatattaacaaaagcttaagcaataacagtctggcaataaacgcattgttttatcaaaagttaataaaggcaaacaaagt

SEQ ID NO: 16356 - protein, 97 aa, DROSOPHILA
MWKIFLLLGNCILQLCHIDAQWSRVYCENIYNDCQRFTSRIGRFDETIDSFNRHCRRERRGRWNSVSRCEMEKATCLLIFRRCDDMSCNNIADVLEL

SEQ ID NO: 16357 - DNA, 6401 bp, DROSOPHILA
accagggttgtcagggttgccatggaaaagggaaagcccccggcgacatttgctgctgcagttgctgtcgtcttattttatttacagcactcgggacgccgacagcagccgccgtttgtatgcaaaccatatgcaacgagttaataaatgggaaacacaggcttggggatttaaagttgtggtttgagttcagagactcgcactcccttggttttttagtctcttgttctaagaggaagggcataggggataccgaaaactttaaatcaaatgaagtaaagaaaatgacgactagatagtacttgaccagaaacaaaattgtaactaaattcaatggatagattctgattattcaatggactcgaaaaatgaacttcggaaattactgtttaaaaaaatactttcaaccttcaacttcaaatgattttcatacatatgtgacaacaaatccttagtttattgccctttatgtacatgcagatgtattcatacaatttatagggtatttgaaagcccattcccctgcatcttaatgccctgcgtcaacaaattgcgagtggtgttgcagacgggccgaattttttgctgcatgctctttggggtatcaattttcgcttctttactctgtcgaaaaaatggggaacgggaaatgcattgtccgagcgaaaaattgagggactccagacatgtcccggcataggaacacacaaatttgagttgattttttccaactggtttgtttatttatttgcttactcataaatctaagcgcctacgtctgttggcggtcgttcgtttaaattaaaacccttaaaatcaactaaaagtacaacaaaatgatgtggtgtacaaggacagcacatggcagctggatgtgagtgccgagagatggatgattaacaaagatgtccgatgcgactgactaaggggactccatccggatgctcctgctccctcctcgatacgaaatgcccctgaggaggcggatccgttcagatcttcatcgtggttggggcgccggcagaggtccgactcctggacacggcatccttttggccaggtgcttgcacagcggcacatcccgcacagcatcgccgatgaacagggatagaaggtaccattgcttcatcccactgacgcccgattgcactttgtagttcctgttggccgttggatatccgtgttgcatgttccaggcggggaatcggaaagcggattacagaaataattactcataagtaagtgggtaatatgcacacataacaacagaggctccatccctgaactaaaaacaaaagcaattttcaacagcagccccaaaggaagagttttccttcacaatgcaaaatgtgtttttggtggggagtgggtttcacttgggttatttgcataatggtcgggactggatgatgcttataagggggtaatgagttgaggcggtatgtaaaaagctgggggaaaaaaaatgttccattgattaaagtcactattcttgcggtctctactttcattgatcgatttctgtggtaaatataaatatttatatatttttttaaatctaaataaaaatgcaatgaaactttctcaataaattgataggagccttaatgtaggtatttaaatataaattcagttagtcacatgcacatgcttcgaaaaagtcaatatatatgaattaactgccttcttaattaaacttatctcttgaaactaactcagttatttataatgtgcataaatatatgtattcccatctctattcagaagaaaattgcatatgtagcctttttggagaggacccttctgattactttgtgataacatcccattctgccgcataaccctttgcttcacacctacggacccatggacagttcaaatttcacacgtctgcagtggcataatttaatcaactcggtaacaaacacatctgcagctgccctccggaaaatcgggcttgcaacaacaaagagacatggactgactgaccaagagctggacgaaagccggcattggcatgccatttcccaccgggcactttcataaatttaatcaaaaactttaatcatattttattattacaaaacacgtcgagttgcagaaaacttcttctaatgccaattacatttgcagcgcaacgaaaactaaacaaaaaccaaaaccagtctcaatttgagactcaggtcgtgttaggtcaggaatgaaggtgaggagggctcagacagacgaacatttcaaaaataattttgaatatttgctcttgacacgttggccaaacaacttttgtccatttcgggtgatgggatgaagggtgaacatttttgcacattaagtgtgaaagtgtcagatgcatgtggaggaaacctttttgcgatatcacaaaatattaaatagaataaatggagagtgtggccaaacaagaaaatgttacgcatacgacacgtctgccgaagggccctcctaagaagcttttctttaagctgccctttgttcgtcctgtactccttaaatacgagtatttttaaatggaaaactggtggaacaataaaaatattttactaccactgaccagccaagcttccttgcttccttattgcggaaaagcaccaatgaaaaaatcaaggaagaagctgcagagacaagcgcattaattatgaatcacagcagttagcaggggttatcgggatacttttgacgggtgagaagaataacttgatgtcttccagcattaccatgacaatgggaagctgcgagggcaaccaactcatcaggaactggcaagccaaactaaatttatgtaaacttacaaattgaaatccaaagtcggactcgaactcgtgacatgcagttttaaacttggggaacgttgggatacattaaattatgcacagatgagttagcaatgccaatgacaatgggcaaactgcgaactccaggatgagacagcgacaacaaggagatataaaaattgattggaaaacattttgctttagctaaaaacaagccattcatttgccaaatgacaactgcagcagcgccaaactgcaaacgtggccataagaaatgcaatcgcagaacagaaaaggaaccaaattcaactgaagttcaagttgttacagccagtttcagttgagtgagttgccataaagtcagcaggaatatgaaaaagtactcgaaagcgctgattacatgcaggaccctcttggatttccttaaggcaagggtatgataaattaaatgagaatcgcatccttaaagaattcaaggttagtaaattgtattggcaaacttaaagaacttgagatcttcctaagtatatatttacacagaaatccataaggattttaattattacatttaaaacattcaccataactgcatgcgtttgattaataatagctcttgtgttagtaatagctctttagtatctataactttttagtatctataacctaccgcaacacttccgaccaggcagcatgtggctttgcttttccatcaggaaagcggccatcagaactgcctgagtatctagaggcatggacacggcacggctcctccaggatgcaggcttggggtccgaactcacccagtatctgtttctgggccagttcagcatcaagagccagaggatgagccgtatcccttctggtgcgagatctatatgtacctgttcgaaaaagaatcgcatttattcacatttagctgtttgaaattgttcaaaaactatcatttaaaatattatctttagcagtcccgagttcagatatagcaacataatttaattgataagtgaaatgaaataactggtttaaaacatggttaaacgatttgattaaccttttgataatttgaccagtaaaaatattatcataaagaaacggagctccaattggcatgcttcctacatggctctacattatctaatatttggtttaaaactattaataaagcttataaatagcttaagcttatgaagcataatttccaaaggctattgaactaataaaacaatttcactagtctcccccttgcaaattgatttagccccctctaccagctgtatttcgctgagcttaaaagttgtccgaaaagtccagataattattgaagtttcggtgtatttccctggttactcatcccaaaagtttatcggctcagctgtcaacatctctttctgatatttggtttccgcctcggcggagtggcaatttatatggctgaagccactggcttgcggacagccttgaccccatttcacatttagtcggctaagtggacaaccacgatagttggcagccgcttttgtcatcgcacttgcagatcaggtttttacagtccagagcaatgagcaacaagtcacaacaatcagcaatagacacgcatttacaaaatgggttgatatgcctaagtggacagtgtgaaattttggaagcaaccaatttgcattttgcattataagtaccgaagggtacataaattattacattgtacacaccataaattatttatggagggagggtatttctttatcaaatgtatattaaaaaaaaacacattgaatggtgtttcctaatcgcatcgctctatcaatcaatgaaaaaaaagctaggaactggattaacttaaaaaaaatgttccagaaatttccaaagaataatattgtatgattatatttttaaaaaattatctaacatcgataacattaatagcgggcgagcaagtttgataagctttccagtcgagttatagatttaattttggcatattaaaaatcatttaaaagataattgtgcataggaaatgttgcttaaatatagtgttattttgccacactttagtgtttaattactatttcaatgtacttcacttcatttagtcatttaagattgcattatttaaaatgggtaaagctcactcgagtggaaaggagacatacaatacatttgactgcttaatttgggaaatttctccaccgaattcctgcactgatttaaacaatgcaaaacacttaatttatgcacaaaatattttaactttcactcgattgggcgaagaaattaagagcttattgcgatgggcgccaaacttactgggactgagggagtaggccaacttcttggcgaactgggacaggcggacggatagcacgattacggggaagccgaccagctggacgggaagctcgaaaaggggatcggaattctgggccaggccctcctccacgaattccagcagaagcaccagcagcacgcagagcgttggcacgagagccacagtgcagatataccgcagattcatggccgccaaatgttgggtaatatatcgtaacaccactgtgtgttgcgggtctccgaaagtctcgtattttttggagtggagcggcaggcgacttggtgcgcttaaagtcttcgactgactgaagcgacctgctgccgctttaagccgcaaaagcaccgcataaaaaacaaaaaacaagcatacgttaactccaacttaaacgtaaacaatgagcagcggagaccgacagtcgctggccgaacctcaagtgtaggcaccaagaaatcacttgttgtgtaaagctcacactcccctgtgtgggtttctgtggctccagaggcggtggtgaaatttgaaggggggggatagagaaaattcaacattcgcaaaattatttttctgaatcatgtatatgtgtccagaaaataaagaatcaggaatcaggttaatcttacttactacttactactattattacttttttattcatttatctgttatattatactaatcatttcaaaatccaaagatagtcgaattaaattaatatttcagcatattatttgttaaggattcgcctttttttaagcgatttattcccacccccttgttttggcgccactgcctgtttcgtgctttttttgcgggccaagtttattttgcattttgaccaagtttcgtgcggaagccgaagaaagaccagtaagtgaaagtgaggcccaccaagcggagggcgcagcctaggctctacgctctctctctctctctctctctctttctctcttgagtccccaaatccggccaactatattatgttcgctactgcctctctggtcgtctgggccataatgagaagttatgaaatctttgaggcaaatgtctggacattcgcacttgactagtcggggttttcttccactctctttacttctgtgtggctttattttggtcttggcgcttggcttgcatatcaattacctcatttccgttaggtgaggtgttgccgggtgcctggtgaacaaatggccagatttcctatatggacgagcaagtgatttgagcaatttgattcgcttggattagcttgggttgagggtcaaggggctgagttggtcgaccaa

SEQ ID NO: 16358 - DNA, 682 bp, DROSOPHILA
cgcaccaagtcgcctgccgctccactccaaaaaatacgagactttcggagacccgcaacacacagtggtgttacgatatattacccaacatttggcggccatgaatctgcggtatatctgcactgtggctctcgtgccaacgctctgcgtgctgctggtgcttctgctggaattcgtggaggagggcctggcccagaattccgatccccttttcgagcttcccgtccagctggtcggcttccccgtaatcgtgctatccgtccgcctgtcccagttcgccaagaagttggcctactccctcagtcccagtacatatagatctcgcaccagaagggatacggctcatcctctggctcttgatgctgaactggcccagaaacagatactgggtgagttcggaccccaagcctgcatcctggaggagccgtgccgtgtccatgcctctagatactcaggcagttctgatggccgctttcctgatggaaaagcaaagccacatgctgcctggtcggaagtgttgcggaactacaaagtgcaatcgggcgtcagtgggatgaagcaatggtaccttctatccctgttcatcggcgatgctgtgcgggatgtgccgctgtgcaagcacctggccaaaaggatgccgtgtccaggagtcggacctctgccggcgccccaaccacgatga

SEQ ID NO: 16359 - protein, 193 aa, DROSOPHILA
MNLRYICTVALVPTLCVLLVLLLEFVEEGLAQNSDPLFELPVQLVGFPVIVLSVRLSQFAKKLAYSLSPSTYRSRTRRDTAHPLALDAELAQKQILGEFGPQACILEEPCRVHASRYSGSSDGRFPDGKAKPHAAWSEVLRNYKVQSGVSGMKQWYLLSLFIGDAVRDVPLCKHLAKRMPCPGVGPLPAPQPR

SEQ ID NO: 16360 - DNA, 6791 bp, DROSOPHILA
acgttataagaccaggctatcgtatgtctgcgattagttggaaaacattacattgtatattgtgtatagttaagtaagcacttaagagatttcacagaaaaaaaaagataaatgcgtccaatgagtaaaggaagcaaattactactatacatttagctgcaaatattatttataaatatacaaatatttatgtttaacattaagatggtgtggagaaacaatagttgaacaatcacagcgccaaggcagcggcttatttaaactaaaattcgcggtaaacattgtttttaactactagaacatgcaaacaaccagctgcgcttgaaattctacaaataattaagttctcacattggtttcaattgtaaatgagaaaatgaggaagagcttcgcttacgcgacatgcacgcgtaggtggcgatccgtgtgagtgtggggctactgagataagttactacttaattaaagcgagattacaatacaggtagtacatcgattcaacatgcagctcgggagtagaaatatgttggagtgcagcattcatttgaactgtagaagcgtggcccttgtcgccgctgttttttaggctggcgctcgttggtgattggtgttgtgggtggtgatgcgtccaatacaaacattgtttagctaactctactatactcctgatcattcagcatgtgcattgcatctgtcggtgcgaaatacttgacagtgcctaaaaatattcagaagagttagtgaaacatttatattattgtattaaataataaatttacaagtaaaagctaaagggggattgaatctaataaacattccacttaaattacacacaggaactaaagcgattagtttaaaatgccaaaaaaaagtaagttacatttcattatggctgaccaaaagtgttagtctacatgttagctcattatttttccactgtaagaatatttacttcttataaattatttaggttttataggcacttaaaatagtttttcttctcttttttcaaagaaatcgaatacccattttatttgttaaagttttcttcagttcgcatacatttaaattgaaaaagtatgatatggctatcatcatttcgtttcagtattacaaagcttatttcataggacgacaatattataaattcattttgagaattattaggtttgttttcgtcaaatattctattataaaatctatggcagatcttacaaaatatatggtggtttaagtacaatggccagcgtatccactgcatttaaatggataatacttaagggcgctagcttctggttagtttaaatccgtcaatttacataaaactacaaaattcaaaattcaggaagacaatcacggtcaccatcaactcaagtcgacttcgcgaaacccgtcaccgtctttatggtctgtatttttaggaatgtctgtctccaagggtgcagagggtgaggcagtggcggaggcagaagcgaccgtacccttaccattttcgtcgatgttgctgttgcgctgcagatacagctggatgcaaacgtggatcacaaagacaatgaaggcaccaattccgaagatctcaaaggtggtgcgtgcagtgaccgactcaaatagctgtccagcgatcaggctgcccattgacacaccaacgccttcgaatatcgctccaaccagactctgaaatggccacaatatgcataactcttgggatcgccccctacacattcatcgaactcacctgcatggtagcatcggtgcctggcggtgccacaatgcttgcataggaggccattgttgcataaaatagaccgaaggtcaccccgttcatcagttcgatgggcaggatgtaccagggattctgaagcatcgagtagagaataaatctcactccgaatccaaaaagcaccacactcatggcgtttacatggccaattttctttagaatccatccggataggaagaagaacggcagctcaccgccaaaacactgaatccccatgaccaagccctccaatgtcttaatcgagctgtcgcatccctcgaacgccttgtccagctcctccaggtatatgaaaaggaagttccatatcagcgccgttccaagtccaatggcaacgcaccacaagaaaaatataacgcagcgcaccgagagaaacatctgacccacatctttcaaaatattggacgacaaatgtgttggcgtgtgctgtaatttggagtacggaaactttagtttaaggaaaggattttctgtctctgatatgctcaccctcagcttggatgatgcgaacacatcaaatcccatgataagcaaagccatccagaacacggccgtgtagttcttgttcacctcacccaatgacatgtgatccacaaggaggccggccaagagggcaaaaactccccatccaagggagccgcacaggcgctgtttgccgtacaggtgatgacgatcgccgaggatgccaaagcatatggcgtcaccaatgctgaccaccaccgccatgccgatccagctgaagatgagcaggccaaagaacagccaaaactgcggcatggttacggcactactcgtgttaatcacagcactctccgccagctgctccttgagatagtcctcacgacagtccatggtgcaattggatttgaagtactccttctccttcgggcagtacaacgtgacattctggcctgcaatctggccttgatcgtgcggaatcatgaagaacatgcagctgccatcattctcaatcttttgcatagttatgctggctccgaattccatctgggtattggttcgattggcggcacagttttccgtgttgttctttagccaatcttcacacactatgtcccacatgaagggctgtgcctcgcagttcagttcacactccaacgtcctgttcccgtagtaccgctcaagatttctctccacgcactcgccgtactccgagcagaatctcggaatgtcggatacaccctggtggcagtggaactcgaccttgggcaacggcttctccattcccggcacgaacatgatgaggaaaaaggcgatgcccgtgaggacctggccacccagaaataggggtcgatggcgatggtacctttggatgggtgaaaaccattctaattagttaaatcttcaaatagtcagtgtatcagaattagttcaaattttcctattattgaattaatattttctaattggtagaaaaccaacaagtgacacctaaaaacaagtacattatctttcgataatgaataaatttatccatcaatcagcaaaccaactataagcattgtcattgcaaatttgaactgtgtcttttgattgatagtgttaatcagttaatattcaaattctttggtaaaacatatgtaattgatgccactctaaaggggctttatctttttttgttgtttgataatttccttaaattcagttgggatatgcatacatagacactttatgagtatagctcacttgaaacttatcacaaaaagacgtaacattgtgctgagtaggagtttataaaattaaataaagtgtgataaacaaacgtgtttgggtcttggaaattggatctacatggacagataagtcagagggatcatcttaccggtccgcaatgtatccaaagaggggcttcgccagcattccgatgatgggaaggatagtgtacatggtgcccacaacggcgggggagtagcccaattggccggccagagtgggcatgaaggggacgacgggagcggtgcctaaataaatataatgcagaaaaacactagattatcttgccgactcgttagagctgataagtaagatgagtgagtgagtgggtggagatatgcatatgggcagttcgaaagcagtgggtgtttctccaccgccgataagcaaagtcaaccgcaaacaagtgcaactagctagacattgtcggctcgcttcgaagtagaacatacctaatgttaattgaattgaaaagcaaaagtaagctttaattgctgaaagtggtttgcctgtcggcacgtcttaacttttgatgactttcgggcgcggcattgaggtctctgggccatggtgctgtcacaaaatctcgtttcctaacaattggacacctttgacagtgggattgcgatgagtccgccgctcatcatttcgaaaacggtttagtcgtggtttagcttggggtataaagtacaccttatcgcacgtctgtgtttgcatggccaagaatagtattactatcttcacaattttcaaaacatctaattactaatacgaatatcagtaacatctgatgttttaactaaccaaaaatgaattgtgtcagccaattctggcaattgacaccagattggaaattgtattattttgtttctatgtggtcttaactcaaataaagtgcttaattaattggacgccagacatttacagatacttcaaattttccatccgtttccatggaaaagttatattaattgaagtgattccaaatacacattttttgatgattttatacagaatagagcgtgtttcactggtattgctggataggagattatttccacgaaaaatattaatcgtatgaaaattgtaaattgttgctgttttagtatgtatgtgtatatgggcgtacttttaataaaatatggatattaaatggttgtaaaatacactaacatatcagtagatacaagacaattgaattttttgtaacagctcaaagttataagggttacagctaattaagtttcgattacacgacataaacgtaatggaattgctccgattgtaattaaaagccagcaaagtgctgcatcatacgatgggaatcgaatcgtaacccgaatctgcctgcattagcttatcgctatttaactggactttcattgctctatgttctctattgcgggtgattgccttatcttcgaacatggtgctctatatgttcattaatgcataagtgccctgtgacgaaatcgaagctacagatcaaaagttcgcaattaacagctaaatgtatgtacatatggatgtacgtacacacactcatatacatatatatacatatatgcagcacgtgcgtgcctctgaaaacgagaaaacattatcggctgatgtaagcgatgcgcggtgcttaacttaatggttttgctaggtatggggaaggggtacttgccggcgttgaagagaaagtagtgcgccttcatgggcagcagctccttatcgatggtggccttcatttcggcgtaattacgttgacccgcggcacaaagatcaatactatcggtgctaaactagcgcgtttttcagttcattcacaaaaaatgcgagggcaagcagaaagagcatgtgcctgcacactcacacagccagcaggtgttgttatttattttgcatgtgtgtttttgcacgcgggatcacgtttctgctccaattggaatccgctgagttggtttaatccgttttcctttcaaagaatcaacacttttgctcgttggctattcgaagtgcaagggaacttgtcgcacttttagcacgaattgagtgccgcaccacgcacagtccgcggaaatcgagggctccggctagatggacatccaaaacacgactgaatggagccgctggcgttacgagccgagtgtcaacatgtttggttgtgtttgccgtcgtttgtttacgaatccgccttatctgcggcacaccaattattataaactgaatacgcccaccgacgaacaagaagaggcgcccggccgctcggttttttattagcaacacttaaataaacctaagaaaaaaaaaaaacaataatggcaaacacagctgattggaccgactagggatgggagttggtccagctagagatggcacttgcttacaagcgaaaataacgagctttaatgtattttaaaatatttgtctatttagaagattattgaaaacgtccaatagcttctataaattataatacacaattttttgctcaaaatatttcccagtatcaaactcggtctttgtttatgcacatttttatacgcatttcatttgtacacattcgctcgaactagtgggtaacttaaattacaatgactctatgcgtgagatgggaaactcgtggaaaacgtagaaatcgtggctaattgcagacgccctcattcgaatatatggctgtagtgctgctggtatacgtgtatgtagttctccttctcctgcggcgtcatctgggctatcaggttgtcgtccagttggtcgagcggatgcggtcgtccagccactagcacagtgggcacatcgtcgtcctcctccgcggaatctgagttgatataattgtcgaagtcgacatcagctgcaagtacaaaaacgtatattagaacccataaaagatgagatcgagaaatggttggtgcttcttacgaatcttggaattttcgatgtccttttcgtcgtcgctggaatcgctagagttggcgttcgatgagcccactcgcatacccttcatatgcggctccttctggcccggctgcttctcatgctgcagcagcacggacatgatgtcctcgttttcctttcggttgcgatgcccagatccgcttgccgtctgcaccgcatcggccgcgccatcggcagcatccgtgtcggttatcacagtgctctctgtcatccaaatggggcgcgacttgcgctcaatcaccgcatccgaggtgtcgtcgccgccaatggtgacgtccacacgagtttcctccacggcaaagccctggtttctcgtcgcctcacccgaccacgccat

SEQ ID NO: 16361 - DNA, 2704 bp, DROSOPHILA
tttatttaagtgttgctaataaaaaaccgagcggccgggcgcctcttcttgttcgtcggtgggcgtattcagtttataataattggtgtgccgcagataaggcggattcgtaaacaaacgacggcaaacacaaccaaacatgttgacactcggctcgtaacgccagcggctccattcagtcgtgttttggatgtccatctagccggagccctcgatttccgcggactgtgcgtggtgcggcactcaattcgtgctaaaagtgcgacaagttcccttgcacttcgaatagccaacgagcaaaagtgttgattctttgaaaggaaaacggattaaaccaactcagcggattccaattggagcagaaacgtgatcccgcgtgcaaaaacacacatgcaaaataaataacaacacctgctggctgtgtgagtgtgcaggcacatgctctttctgcttgccctcgcattttttgtgaatgaactgaaaaacgcgctagtttagcaccgatagtattgatctttgtgccgcgggtcaacgtaattacgccgaaatgaaggccaccatcgataaggagctgctgcccatgaaggcgcactactttctcttcaacgccgatgcccactctggccggccaattgggctactcccccgccgttgtgggcaccatgtacactatccttcccatcatcggaatgctggcgaagcccctctttggatacattgcggaccggtaccatcgccatcgacccctatttctgggtggccaggtcctcacgggcatcgcctttttcctcatcatgttcgtgccgggaatggagaagccgttgcccaaggtcgagttccactgccaccagggtgtatccgacattccgagattctgctcggagtacggcgagtgcgtggagagaaatcttgagcggtactacgggaacaggacgttggagtgtgaactgaactgcgaggcacagcccttcatgtgggacatagtgtgtgaagattggctaaagaacaacacggaaaactgtgccgccaatcgaaccaatacccagatggaattcggagccagcataactatgcaaaagattgagaatgatggcagctgcatgttcttcatgattccgcacgatcaaggccagattgcaggccagaatgtcacgttgtactgcccgaaggagaaggagtacttcaaatccaattgcaccatggactgtcgtgaggactatctcaaggagcagctggcggagagtgctgtgattaacacgagtagtgccgtaaccatgccgcagttttggctgttctttggcctgctcatcttcagctggatcggcatggcggtggtggtcagcattggtgacgccatatgctttggcatcctcggcgatcgtcatcacctgtacggcaaacagcgcctgtgcggctcccttggatggggagtttttgccctcttggccggcctccttgtggatcacatgtcattgggtgaggtgaacaagaactacacggccgtgttctggatggctttgcttatcatgggatttgatgtgttcgcatcatccaagctgaggcacacgccaacacatttgtcgtccaatattttgaaagatgtgggtcagatgtttctctcggtgcgctgcgttatatttttcttgtggtgcgttgccattggacttggaacggcgctgatatggaacttccttttcatatacctggaggagctggacaaggcgttcgagggatgcgacagctcgattaagacattggagggcttggtcatggggattcagtgttttggcggtgagctgccgttcttcttcctatccggatggattctaaagaaaattggccatgtaaacgccatgagtgtggtgctttttggattcggagtgagatttattctctactcgatgcttcagaatccctggtacatcctgcccatcgaactgatgaacggggtgaccttcggtctattttatgcaacaatggcctcctatgcaagcattgtggcaccgccaggcaccgatgctaccatgcagagtctggttggagcgatattcgaaggcgttggtgtgtcaatgggcagcctgatcgctggacagctatttgagtcggtcactgcacgcaccacctttgagatcttcggaattggtgccttcattgtctttgtgatccacgtttgcatccagctgtatctgcagcgcaacagcaacatcgacgaaaatggtaagggtacggtcgcttctgcctccgccactgcctcaccctctgcacccttggagacagacattcctaaaaatacagaccataaagacggtgacgggtttcgcgaagtcgacttgagttgatggtgaccgtgattgtcttcctgaattttgaattttgtagttttatgtaaattgacggatttaaactaaccagaagctagcgcccttaagtattatccatttaaatgcagtggatacgctggccattgtacttaaaccaccatatattttgtaagatctgccatagattttataatagaatatttgacgaaaacaaacctaataattctcaaaatgaatttataatattgtcgtcctatgaaataagctttgtaatactgaaacgaaatgatgatagccatatcatactttttcaatttaaatgtatgcgaactgaagaaaactttaacaaataaaatgggtattcgatttctttgaaaaaagag

SEQ ID NO: 16362 - protein, 575 aa, DROSOPHILA
MPTLAGQLGYSPAVVGTMYTILPIIGMLAKPLFGYIADRYHRHRPLFLGGQVLTGIAFFLIMFVPGMEKPLPKVEFHCHQGVSDIPRFCSEYGECVERNLERYYGNRTLECELNCEAQPFMWDIVCEDWLKNNTENCAANRTNTQMEFGASITMQKIENDGSCMFFMIPHDQGQIAGQNVTLYCPKEKEYFKSNCTMDCREDYLKEQLAESAVINTSSAVTMPQFWLFFGLLIFSWIGMAVVVSIGDAICFGILGDRHHLYGKQRLCGSLGWGVFALLAGLLVDHMSLGEVNKNYTAVFWMALLIMGFDVFASSKLRHTPTHLSSNILKDVGQMFLSVRCVIFFLWCVAIGLGTALIWNFLFIYLEELDKAFEGCDSSIKTLEGLVMGIQCFGGELPFFFLSGWILKKIGHVNAMSVVLFGFGVRFILYSMLQNPWYILPIELMNGVTFGLFYATMASYASIVAPPGTDATMQSLVGAIFEGVGVSMGSLIAGQLFESVTARTTFEIFGIGAFIVFVIHVCIQLYLQRNSNIDENGKGTVASASATASPSAPLETDIPKNTDHKDGDGFREVDLS

SEQ ID NO: 16363 - DNA, 3505 bp, DROSOPHILA
ttgttgttgcatgtgaactttttcgtatcccccaacgaacgagagagcgagatggggctatgctatgcgactgccgaaataagagggccaatttgtagttgtagttcttgttgttgatgttcttgcttctgttattattgttgatgtggttcttgctgttgttgttgattttgcaggggacccccagtcgttgttattgttgttaacgctcctcttttatccgctctgcgctttgcagtccgctttgccgttaattattttttcactccttcgctttgtggctcatcttcgctttatcctgcgcgcaccgcactcactctttctcgctcgccctcactcactcacacagcagtagcagcagcaacaacaacgttgcacacaacatcaatatattggatatatatcaacactttttcgcctgcgtgcttgtcagtgtgtgtgtgcatgcgtgcgcttgtcgattttcactgccttcttttctttgtgtgtgtatatgcgctgcgcgttgtgtttgtctgcgtctgtgcgtgtgttaggtttacgtgtgtgtgtgagtgaacgaacgaaatgcgtttagcgaacgtttttttaaaaaatccttaaattttttgtggattttggcgattaccgacacttaaaacggcactgcacacgcgtccccgaaaacaacggcacctagattcgctggccgagttacgatttgtttgatgctacgcacggttttcggacacttttacacggggctttgtttttacccatcgcatcgtcgactcttttgctcctaaacgttgttggtgttagtggtcagcgatagtgctcacacactcgatatgggttttcgatcattttcggctgaatattcgataaggtcaatagtatcggttttccgcgtacgatttcccagttttcaaatgacggtcacactgacattcattcttgacaatcgatagtttttgtcgagtgacgctcttaatatcgaaaaaccataagtaacgataggcccattttgttggtggtgttcacaatcttctcgcgctttcccaggaactggtcaagatgcccatcgccgggctgtgcatcgaactgcgcccgaacctacgcagcggcgtggtcttcctgcgattcgaccaacaggtttcgcagagccagaagactcgcgtcgtcgtccgcgactacaatgtttatatcagcgagaaacctaagaatcaggcaatcgacttggattccagctccgaaagcgacagcgaggactccgacaagctgatgctcatccggcacgcgcagtatggtatggacattgtctgcctgtccacgttcttggtcagtggcaggaacatcagtttccgcttcaactacaaccagattgatctggccagcgtggatggaagcgctgtggacgtgcctctggcgccactactcctctcctgccaggagaacgagcccatcactatcaactgtcgtgattgccgagcggaattggtggcaggccgaagctatcgcaggttgagggagtttcccagcctcttggtggatcccactgagttcttttgccacaatcatggaccagcgggcaagacccaaccaattagcttagtgcccgccgaaacggatcttttctatggcctcaactatgtggtcatcaactttaacgaagaaagttcgtgcatgctcaatcgcgacgatcacttgtactgccagcgctgcatgcgttatttggggctgaccatgttcgatggcgccgccgctcgcatctgggctgatgcagtacgttggcgtcccgcaggagcggcgacaaatgcccccgatcgccacttcttccaaaactccacgctaacgcagcttttcaagcgtctgctgcactcgctgtggcctcaaccgttgcctcagctctgtttgaacaccagtcgtgcggtgctggtcacctcgctgcccaaccgaaatcagcaatacatgtttttgcacgtggtggagtcacagctgcgtgtgctgcgtcgcattcgcccaaattcgaaccgactacgctgctttcgcgcctgcaagctgtactacggcgtttttggagccaatccgccgctgctggagaagtggcaggcgcagcagacgctgccccaaatggatgtatcaccgaacatgttcctaaagattcagaagcgcctcgagacgaatggccacttgattccggacgccttgagcacgaactgtgcggaggagcacctgcagttgtcgtacttcttttatgagaacgaggatcaacacgacggcggggtcgtcgcttcggatgtgtttacggatcaaatgagcaacgtgtatcagaaggaggtggatccgtacgagacggatgcaggacatgccagcgagagcgatgacgagtactcggatacggacaccgcttcgggggacacggcggcttactcgctcggcatgcgtaccctgcagaaacgcagccccactccgccgcggtctttcgccaaaatggccacctccgcctcgccggaggacaagtagtgacccaatccgattcaaaaatcaagcatagcttgtatgtcggaaactatgttacttgttttcactatacaaagacggacttggcccaataatttgtcaaagatattttttttttaaagttagcccttgattgataatcaattccatccaaaatactttactatgcctttgattcaaatcctcacatcctttgcttttgtttatcgttatacattcgcttagaatgaattaacagtacgcggaattgataacgccaaagactatttattgttttgtgaagaaaattttgattttattgcttgactcgatcgttatatatatatatgtatattatatatagtttaacaaacgttttgcaacaagtattagctggataaacgacttctatatatatgtatgtactagcacaaatgcagtgcgttccgtgactgtaagtgccaatgtcttggccttacagctgcgaaacgcactgcacatgttttgaagaaaagtaagaagattgtttgcttttgcttacactttgacgttccctattaattcacttaagttaacgagaaaaaaatgagagtagagtaatagtttaaaagtaaaattgaaatattgaaaatattcaattttaatatattttcaaagaactgaattaacaagttttccaaaatgtgacttaccaaaacaaaaaaaaaaacaaaaaatggactaaacgaaaaaagaaaagttattgcttacgaaaaacatatattataaatatatactaatatacttcaatatgtttccagaaacaagattaaaacagaatatgtatgaactatgatttagctgcgtaaacatttacacacaactattattgtccaacatttgtaattctgttcgcaactacgcatgtcaacgaatagccgagaaaaattgtaatttcaaaactctgatgtaaagtatatggaaaacaactatttatatgtatatatttaaagtcaaaatgggatgaatgtaaggcggagcagtg

SEQ ID NO: 16364 - DNA, 1505 bp, DROSOPHILA
cccattttgttggtggtgttcacaatcttctcgcgctttcccaggaactggtcaagatgcccatcgccgggctgtgcatcgaactgcgcccgaacctacgcagcggcgtggtcttcctgcgattcgaccaacaggtttcgcagagccagaagactcgcgtcgtcgtccgcgactacaatgtttatatcagcgagaaacctaagaatcaggcaatcgacttggattccagctccgaaagcgacagcgaggactccgacaagctgatgctcatccggcacgcgcagtatggtatggacattgtctgcctgtccacgttcttggtcagtggcaggaacatcagtttccgcttcaactacaaccagattgatctggccagcgtggatggaagcgctgtggacgtgcctctggcgccactactcctctcctgccaggagaacgagcccatcactatcaactgtcgtgattgccgagcggaattggtggcaggccgaagctatcgcaggttgagggagtttcccagcctcttggtggatcccactgagttcttttgccacaatcatggaccagcgggcaagacccaaccaattagcttagtgcccgccgaaacggatcttttctatggcctcaactatgtggtcatcaactttaacgaagaaagttcgtgcatgctcaatcgcgacgatcacttgtactgccagcgctgcatgcgttatttggggctgaccatgttcgatggcgccgccgctcgcatctgggctgatgcagtacgttggcgtcccgcaggagcggcgacaaatgcccccgatcgccacttcttccaaaactccacgctaacgcagcttttcaagcgtctgctgcactcgctgtggcctcaaccgttgcctcagctctgtttgaacaccagtcgtgcggtgctggtcacctcgctgcccaaccgaaatcagcaatacatgtttttgcacgtggtggagtcacagctgcgtgtgctgcgtcgcattcgcccaaattcgaaccgactacgctgctttcgcgcctgcaagctgtactacggcgtttttggagccaatccgccgctgctggagaagtggcaggcgcagcagacgctgccccaaatggatgtatcaccgaacatgttcctaaagattcagaagcgcctcgagacgaatggccacttgattccggacgccttgagcacgaactgtgcggaggagcacctgcagttgtcgtacttcttttatgagaacgaggatcaacacgacggcggggtcgtcgcttcggatgtgtttacggatcaaatgagcaacgtgtatcagaaggaggtggatccgtacgagacggatgcaggacatgccagcgagagcgatgacgagtactcggatacggacaccgcttcgggggacacggcggcttactcgctcggcatgcgtaccctgcagaaacgcagccccactccgccgcggtctttcgccaaaatggccacctccgcctcgccggaggacaagtag

SEQ ID NO: 16365 - protein, 482 aa, DROSOPHILA
MPIAGLCIELRPNLRSGVVFLRFDQQVSQSQKTRVVVRDYNVYISEKPKNQAIDLDSSSESDSEDSDKLMLIRHAQYGMDIVCLSTFLVSGRNISFRFNYNQIDLASVDGSAVDVPLAPLLLSCQENEPITINCRDCRAELVAGRSYRRLREFPSLLVDPTEFFCHNHGPAGKTQPISLVPAETDLFYGLNYVVINFNEESSCMLNRDDHLYCQRCMRYLGLTMFDGAAARIWADAVRWRPAGAATNAPDRHFFQNSTLTQLFKRLLHSLWPQPLPQLCLNTSRAVLVTSLPNRNQQYMFLHVVESQLRVLRRIRPNSNRLRCFRACKLYYGVFGANPPLLEKWQAQQTLPQMDVSPNMFLKIQKRLETNGHLIPDALSTNCAEEHLQLSYFFYENEDQHDGGVVASDVFTDQMSNVYQKEVDPYETDAGHASESDDEYSDTDTASGDTAAYSLGMRTLQKRSPTPPRSFAKMATSASPEDK

SEQ ID NO: 16366 - DNA, 3209 bp, DROSOPHILA
gatggccgaaatgcagatgaagcgggcggagatggctacgcggcaggaggaggcgccggatacaatcaaccagaattccgaaaagcaactggatgaatatcgcagacgccgggcccatggagcctccttgcttgctatgattgaggataatcaccggaagcgggcggaggccaccgctgaaaatgttcagtactttgacatgaaggccaagatcgatgccgagcaagaggaacgcatcaaacaggagcgtttggccatgttgagccaggttccttcctccgtgcttcgatatctaccaaagcatgtccttaagtctacggatagggagcatttctgcctaattgacgctcaggcacggggcggtggcgattcctagtcagtggcatagttccaaattgtaattctaagacggtcaagtttatttttggcttccaaaaataaattatttaaaattaagcgccgttgtgtctacgtgacgtgtatcatttaggctagcgaagatgccagaccgtcgcctgtgctgccagttcgttgttttgctcgattggaaacctcgattgaaaggatattctcacagaatgcgcatctgctgtttcaatttggtttaatattattttgaaagctcggcctaataaccgcttcataattgccgcgaaagtgtttatgcagtccaatcaaaaatactataaatgttatctgtaattgaaattttatatcaaattgactactaactatttctttgcatcttactaattgcattcaaaaaacataactttcataaaatacatgtttagatatacgtttattttgactggtataccaatatatatctttttataaaagataaagccagtgctgcggaagcttgtcgctggtgcagaagctcgtgtgtgtgaatagcttcttttcgaaatcagtggtaccgagcaatatcgaaaccaagacatccctaacacgcccattatcggactatcgatactatcgcgagtgctagctgacgctggtctggttttattttatgttaacgggagtgatcttgcgtacaaacaataacacggaatcgcagtgaaagggcgttgcacaaatgacagtgttttggcaaaatgcccgggctagttttgaccacgtttagcagtgcctagaacgcagagtgcgcgacgctaaaacaagagaaccgcgacaaaacaaaacgcggaaacgcataaagtgaaaaaaaaaacacaaacgcagacagcgaactttggacacagacaatcgtaaacgcacggggaaaacaaagaaaaacgaagaaatgtcggcgcagcgtctaaatgcagcggaacgggatttggagaagttcatcaagttcctggtcttgaagtccacccaggtggtggtgcagtcccgactgggcgagaagatgcagacacagtgcaatccactggcgggcagtgattggtttaacatagccgtgcaggatcatccggaggtcctggacgagaccaagcgggctctgaacctaaagacaggagagagcattctgcagcgcctgccgttgtgcgtggaaatatccctgaaaacgactgagggtgaccagatggtgttggaggtgtggtccctagacctgctccagccccagaatggtgcctccccggccaccaatgacctgaaccccgaaggccagaccctaaaggcagcccacgccatctacaatcgcatgggcatcatgctcaagtccctcatatcgctgacccgcaccacgcccgcctacaaattatcccggcgccagtgccccgactcgtatggcatcttctacaggatctacgtggacaggccgcaggtccacaccctgggcgagggtcacaagcacgtaaagatcggacaactcagcacgattgttggctcgctggtcatgtccgtggcctaccgcacaaagctgaccatttcgcccacggctgcccagtcagagagcaacaccataatgctgaagtcggatcactttagacccgccacggatgccaatacacctggcaaccagcagcagactcaaaatggcactgtcgtggccaagaaactgggcttgggtgccctaaatcccgcccagggtacagccgatcggcggtttatcgatatagagaagccgttgcgaccgggagccttcacagatatgggcaaactaaagcagtacactgaagatgactttgtgttgccggaaaccccgcctttcgagtggcttttgcgaggacgcggctctgtggagtccctcaatcgactggataacaattcggtcgccagtgtaaacatcagtaataacaacaatagtacgcaggatagtaaattcaaccagatcagcaatctcaacaacaactcggcaggcttcaagagtttcgagaagaactcggaaaactcagtatcgccaataaagagcctgctgatccccgccagcgccacagccacatatcgtcaccattcagagccttcgctacaaccaccgcctgatgatgataatctgctaaaagagctccacttccctttcgcctcgcccacgtcgcacgtaaacgatctggccaagttctacagggaatgctatcatgcgccaccgctgaagggacttaatgaactgcaggcagagatctcatcgatttcctcgaccccgccagcatccagtggttccggcggtgtagcagcatgcggtccgacggcggcggccacagcgatcgcaaccagttccgctgatgccagcgccatggacgatctgtcccggcaactggagcagttcgagacctcgctggaggactacgacaagctggtctcgcagttcgggctaacgggctcctcatcgacgggtagccgcagcagtggtgggctccaaatgagcaactgagcggaataatgcctctagttatgtcattagttagtttttatttatggaagggcggtcaatatggagagaggcagggacaaactaaaatatcaaggacgactttagaaagattgcttgggaaagtaaaggtcttaagttcagcatttctctcatccttttaaaatcagttttcagttatgtatttcgattagataaggaatgtaagatcagattttactgcataatgtttatatgtctttttaaaacaacctactttcttatcacccaagcaatgttgcataatgattaaagaatattttcaaagaaatggatttcagacctatactttggcttgagccctccgcat
